United States Patent Application Publication US 2014/0057251 A1 - sequence listing, part 99

SEQ ID NO: 184675 - DNA, 4436 bp, Cannabis indica
aaatatgatatatttgcccctcattctccactttcagttgatcatttaattctgccctctctctttcataaatatgtggaggaattttgccaaaaaagctacttcaaggaagtttaagctctcttccgattctcatatttcttcttcttccagttctgcaagagatactaattttctacgaaaatataggcctgacacgactcgggctactgaaaattcatggttcccgttgctgggttttcgtcgatttgggataatatcgtcgctggataacattttgggacaacccagtttgttgaattcttcaagtaacggttttggtactcttggttttaaaggctacgcaagtgttgccgaggccattgcttctactgatgcggaggacgattcgtcgggttccgatgaggttcaggagttgttagacgatatggataaagagaacaaggtggattcctactttaaggggccgaagaaaatggtcgcaggaatgggaatcacgaagtaccacattcttaggaggcgacagataaagatggagacagaggcgtgggaagaggctgccaaagagtaccaagagcttttaatggacatgtgtgagcagaaacttgcacccaatttgccttatgtgaagtcattgttccttgggtggtttgagcctttgaggaacgccattgttgctgatcaagagatgtgccgggaaaagaagagtaaaccctcttatgctccctattattatcacttgtcagcggacatgatggccgttattgcaatgcacaagctgatggggttactaatgactaacagtggagcagttggtagtgtcagggttgtccaagcagcttgtcagattggtgaagctattgaaaatgaggtgggtcgctttaaagtttccatttcgttttgttcttaagcataatacatcagtatgaaagcaagtatctcatgtctacatttatcttttatttgtttggtaatttgggtaggtgcattttgtagctaactataaaatgtgcatccctgtgctactttaccaggaagtttgttgaaatagttcaattatcaatttgttagtttcagtttcagaatcaagtttgcgacatggtttgctttcagacatgattttagatttcattttctgagactatttgcatttttcacaattagtctgctatgatcaatggaattatagaaggtttgagtttgtgtacatgtagctgtctgctaaataagcagacctagaaggagctggcgtgattacgtgaactatatataatgatttcgtttgtaaaccaggttaggatacagaagttttttgagaagacaaagaaaaagaagaagaagaaggatgcaaatacaaagagtgatgacaaggaacctgaggatgagcctgatgctgaaactattgagaaagagatatcgattaacaaggatcaacaaaaactaaggaaaaaaattacaatgttgataaaaaagcagaaggtgcagcaagtgaaggaaatagtgaagcaacaagatgattcaaaaccttggggacaggaagcccatgtcaaggtttgtgatgctcataaaattggttcaaaattgtcatgttgttcttctcctcattgttactttattttggttctgggaccatacaggttggatgccgtttgattcagttattgacggaaacagcctatatacaacctccagttgatcaattaggtgacactccaccggatatacgccctgcatttgttcacagccttaaaactatcactaaagaagcacagtaagaaagcttgcatctctggtgaacttaatctctctcattctgtgttcattctgtaatatatgcatttcttttttttttttgattaggaagaccagcaggagatatggtgtaattgaatgtgacccacttgttcggagaggcctggagaaaactgtaagtataactaaaactatggagggggtggggggtgcactaaaattatcctccttttaattttatttttttgttgtagatttatgtgctgttatgattgtttgcataacttgtatcattcatagggagtagctaatcatagaagttttattggtgttcctacaggccaggcacatggtcatcccttatatgccaatgctagtgcctcctaataattggctagggtatggaatttaagcctctttgaatgatttgttttttcatttattattatataaaatatatatggataggtttttggagttcaagttactgcccatatagaaaattgtaacatcacgttttactttgaaaccaaataaccttgtatattaaaacaaatgttccattatatggcaggtatgacaaaggagcctatttgttcttgccatcatatgttatgcggacacatggagcaaaacaacaacgtgaagcagttaaaaggacttctaggaagcaactggaacctgttttggaggtctgaaagccttgttggagtttgttttattaattccttcgtgattttgcttcagtgctttgcctaagcttccccacaaacagatcttacattcacaaatagattcttcatctttctttatatgttgccactcttgtttggcattttattgttaggctaatgcttttttttttcttcttctttaggccctggatacacttggaaataccaaatggagggtgaacaaaagggtgcttagcgtaatagacagaatttggtctagtggaggctctcttggtggcttggtcagccgtgaagatgtgggttgcattttaatttaattttgaatttcttattttttcatgtagtgcttaagtactatacacaggcacaccaatttacgtaaacatacatatgtttatagtatgctgtgctctcgtgaacaaaagaaactcatattgcttgattgaagctttacatcttacctttatgttataatgtgtgtggggtaatggctgtgagttttaatcataaactattctaatatattaatttttaaataggttcctttgccagaagaaccagacactgaagatgaatcagaaatccgcaaatggaaatggaaacttaaaacagctaaaaaggagaatagtgagaggcattcacagcgctgcgacattgagcttaaacttgcggtaatattctctctcctttcttgttttttacagactttgtgttgtggaattgtaagttctgcttgaattgatatggtaatttttgttatgagaccaggttgggcgaaagatgaaggatgaagaaggtttttactatccccacaaccttgatttccgaggccgtgcgtatcccatgcatccttacttgaaccatctaggttctgatgtgtgtcgaggcatcttggagtttgcagagggacgcgctttgggaaagtcaggcctatactggttgaagatacatttggcaaatttatatggtggtggtgtagataaattatcttacgatggtcgagtagcatttaccgaaaatcatattgacaacgtatttgattcggctgataggcctctagaaggaaagcgctggtggctgggtgcagaggatccttttcagtgtttggcaacatgtattagtcttgcagaagcattgcggagcccctctccggagactactctttcacatatgcctgtccatcaggtatttttctctttgcttaacagtttgcattttatggttaatgtctatacttgatcggcctaaactagtggtgttgtgacatggttctttaattccagagaagtataaatttaatacttttccatgaaaacatgaataagtgccatcaacagcgaagaagaaatttagtcaatagttaatgtggtatctgttttatttgtatctgctgaaatagaagtggtttcttgatattctctggctccattggtttctatagcacaatttgtagacacattgacatgttgcattgagtttttttgtgcacttgggttccgcagagtttatctttgcattgttcctttgatatactattggggttgcttttctgtgaaagtacattaagatatatgttgacatgtggggttttggtttttgtttgaatgtgcaacatgagcttcctgctcatatatagattttgatatttgagctcatgataaatgttactctgggagtagatgtgtactgttctttattttgtcactgctaaaaatgttgagaggcaaccagaatatttgtatttcaataccatgtgaaataatagctctgttataaaaattaatcattttcctcttgttcaatttgcaaggatggttcgtgcaatgggctgcaacattatgctgccctgggaagggacaaggtacccaaagttctaatttattaggagaaataaaaaggcactttaaaagctgtataatatggctgttttgttgtaatttgcaaatgcttcaagtctatctatttgtagcatgttcttttttttttttt

SEQ ID NO: 184676 - DNA, 4255 bp, Cannabis indica
acacgtaagagagggtggtagaaacgacgggtgaatcttcttaattaatcatcagtaatgagtaaccgctcaaaacgtactagtttgtttatccaaactcatataaaaggtaactacttgacacctgatgtgatgacaatacttggtacgagatatgggagagttaaaatggtaactctcatgtttaccaaaaaaacaggttgaaaatacagaagcagaataagcagttgagttgagtatcaaagcaagggcattgccggcaaaacattcttacccaacccaacccaacccaacccaaccgcctactccaccggttccttccttctatttatacacacacgcacgcatttctttatttaaatatatatatatacatataacttttgtgtttacttcctttccttcactttcttttcccggaaaattctcttctaggattacccgtaaagctacagtttggatgcatagaaagactgatccaaacaaaagaaccaacgaaaatgcgaggtcatgattggatcaacacttgtctaccggacgaattgatcgttgagatcttccgcctacttgattctaaacccagccgggacgcttgttccctcgtctgcaagcggtggctagccctagagcgccttagccgcaccacgctccgagtcggcgccaccggcagtcccgacctcttcatcaagctcctcgcccgccgattcttcaatgttcgtaacgttcacattgatgagcgcttgagtattacgctccccgttcagctcgtaagtttttgtttcatttaatgccgaaccaattgaccatcagtttctgccccattctagattgtgattctcttgattttgcctcaattactcttttcttttcaaattctgggtcgtatgattggcttaacagggaaaattagaatatatattttttttcatatgagcttggaattgacttttgaatctcaatgttctcgatgtgtaatatacatttgaattgtcgcattagattggattgaattggggtggatgttgtaccaatcgggctaagcttgttcgtgttcatggtatttgacccggtttattagttttcttgctctttcaacaatttgattatttgattgtgggtacagggaagaaggcgcgggaataattataatgtggtttcgtctcttcaactatatgcaactgaaaaagatgggcctgaagatgttggatttgagtcatgtagtctatctgatgctgggttgattgcccttggcgatggttttccgaaacttgagaagctgagcttaatctggtgctcgaacatctcaagttctggcttaattgcactcgccaataagtgctcatttttaacagctttagatttgcaggtgaattttttgtttattacacgtaaaaattgtaaggtgttttatgggggcttatcttttttgttcaaaaatgaaaatatagtttattgtttacctcattttccccaagttttttgacatatcattttggtatatgaatttcttcaaagggttgctatgttggagatcatggtctagctgctgttggacagtcttgtaagcagcttgaggatttgaatttgcgattttgtgaggctttgactgatacgggtttagttgaattagcccttggttgtgggaattcattgaaagctcttggtattgctgcttgtgctaagataaccgatgtctcactggaagcagtgggcagacattgcaagtcccttgagaccctttctttagattctgagttcatgcacaacaaaggggtgcttgctgtagcccatggttgcccatctttgaaagtattgaagctacaatgcatcaatgttactgatgaggccttgaaagctgtaggcacttcttgtgcgtcactggagtttttagctctatatagcttccagagatttacagataagttagtgccgttttcttagtatttgtcgtctctcagttcttacaattttttatttgatatgcgcttttggtcatttattgtcaagtaatgtgctatctgattacaggtttgaagaatctgtaaccgtagaactcattagagcaaaataaatattacgtacttttttttgtcttttacatttcctcttagttttattttccaatttttctattgtttatctaaatgttattgggtgccttagtttataagatagaagagaggtggtaacggcttggattattctcttttcccttatatctttctttaaatttctagtgtgttctggtactcattcttttatttcatcctgattctaaaactcaggggtttgcgctccattgggaatggatgtaagaagctaaaggatctcactgtaagtgactgctatttcctaagtgacaagggtttggaagcaattgccactggctgcaaggagcttacacatcttactgttaacgggtgccacaatattggtactctgggactggaattcattgggaaatcttgctcgtatgtatctctcccagcttgaattaaaattggtatataataggaggtaatactatgaatgaataggatggagttgacgtttaagttacatgagcagactattcttgaattatgttaagttctgtaattttactagcgtgttaaaaatatgccatttcttcctttccatgaagcgtgaacttttctttttccagcttgattggagaaataataatcatttttgttttgtgccaattagctgttcttatttatccttttttttaaagtagactagtttgtgttaggacgagctcggttatttggttgttccactacattaattatgcttgttcagataaatttctaaatccgctttttcttcatgtcaagtctctcggttgcacttgcactaatattgacatctgttcacgcaatagtttatatcttttagtttgattgctatttcatatatcctggataattgcaggcttcttactgaattaacgctgctatactgccaaaggattggcaaccgtgcactcctcgagattggactgggttgcaagctcctacaagctcttgatttagtcgattgctcaagtattggagatgaggcaatttgttttatagccaaaggctgtaggaacttgaagaagcttcacattcgtcggtgttacgaggcatgttttctgcctcacatattagttacatcgtttatgagtgttccttctcccataagatccatttatatatgccttttagactaaagtaaatatgatactttcggacaaggttactactctagaaccatatcattattactgagaaatgccttataagatgcatttgagtgtcgttttcttgtagtggttggtcaggtagttaccatgtgaattatttttgaaagcatatatatccttgttgttggtggttataggttggaaacagaggaattaaagctgttggagagaattgcaagtccctgacagatcttagcctccgattttgtgataggtgaatttttctatttcattgtttttgtaaaatacaaatatttgagtttgaattacaccttgatttctgtcttaactcatatatcaattattagggtcggggacgaggcacttgttgccattggtaagtgtaactcgctacagcgtctaaacgttagtggctgccatcaaattggtgatgctggaataatagccattgcaagaggttgtcctcaacttacctacctcgacgtgagtgttctccaggtatgttgcttccttgtcttccctctcctcctctttctcaaaggcgggcaggaaaagccttatgtttattttgatgggacagaatttgggagatatggcaatggccgagctaggagaaggctgttcaaatctgaaagaaatagtgttgtctcattgccgtcaaataacagatgttgggctatcccatcttgttaaaaactgcactctgcttgaatgttgccacatggtgtattgcccaggcatctcatcttctggtgttgccactgtggtttcaagttgtcccaatataaagaaattgcttgttgagaagacgaaagtcagccagaggccaaaaaggagggctggctctattatatcttatctctgcgttgaccttatttaaactctctatattattgctgctcttccaaccctgaaatgaaatccacacacaatatacaaaccccaaaaccaccaactaatgatcaaattttatgtttctttgtggtatatagtctgattgcttgtttgtaacggtttttttttcccctactactaataattaac

SEQ ID NO: 184677 - DNA, 5812 bp, Cannabis indica
aggtaaaagctgaagatgggcatcttttaattcattaaaaaaattgagattcgggcgtgtgataaggattggaataaagttgaagatgatcaagaggagagtttatatctaaaatatatctttatatttgtataggtaagctaagctaagctaagctagatcttttaattgcactatcttaaccttttatcaagaataacaagttggaagatttctcgtgttggtcacgagatgcagaaaagagaagagaagatttataggggccccagcatgaataagatatgtatatatatatatatagactataaatataggggcaacttggctttcattcactttgcttccttttgggttttcatttaattaaatctctttttcattcatggttttcatcaattactcttcatgagtatccatatataggagggaaggaatctattactaaattcatgctttgattggtggttggtggaaaagtagtttggatcattaatattgtatatttatgtgcatatatagttatgtttaagctgaatattataaaaaagtacttttctaagttgcttatgttacactaaaaaataaaccagagtggaagttttcttttcttttctccacatttcatttggtgggccaaagctatagagtaggtttatctgttgggcacaaagaattcttcatcattacctaaggcccatagtgatgtagataaagaaagcaaagcccacttaaaactctcaattttggatttggattaatcaaaactatgtgataaggaattgactttacaagtgttttaatacaatcctatatgtgtttcatatttgtattacaagcttttcaacaagaaatagcataatttcaattaatgactgaaaagtaagatagttcaaaatctttgttttagtgagatttaaaaaatatattacttgagactgttgaattaattctgaaattgttgtctgagaaaacttattactttcctcgtagggtcaaatcaatctaaagtgaaggtgtagaagagccctgaagtaaaacttcatgttctggaagagataagatagtgatccaagttgtcctggagtctggacaactgacatgtaagttttccccactaacctaaaagttagcatttgggccagattttatcttcttccctatcatatcatacctattacttaatagtattgatttgagatacaactcttctagctaatggcttacataataatgtaaaatctcaattctctatcaaatcacattaatgaaaatactaatctgcactttgccgacctttatcaacagatataccattccattggtggtggggacaactttctcttcacataattgtgtttttacccccaacaaaaaaacaagtaaactaaacttgttctgtactgattaccttctctgttttgttagataactgtttgaattttatgttttataaaatagaaaatataatataatactttaaatccaatttgaacaaaactaaatttaggttgggattgaccaaaatcgaatttaagtatcattatgttatattttgtattataacacagaatcataagacagaagggggtcgataaataattttgcaaaacaaatgattcactctactcgggagcagcagaatagtcatttcttctataaaatggtaaacaaggcagaatctggataaataaaagaccaatgtttcagtcatatgctgatcagatcactccgttttttaacatacaaaataactatgtaaaactccaagtttggctttgcaaggccattagtatcttgattggcttcgtaccctgtagaaccacttttcttagttaatattcctcatgtgaaaacaatacaagtagccaaataatatctactagactactacaagcaaaactatgttcaccttggtgagcgagagtgagaccgagaatgagtccgagtacgagtacgagagcgagagggagagcgagaaggagaacgggaacgagagttatatcttcgcgaacccctgctgcttctactagggcttctacttcgtctgtaccttctacaataagcacatcattcatacataagtgtgctggcatactaatgttaatcaaccgaaatgaaaacagtatgattacttcatttgctagaataagtactctacagaatcaaccgaacatttatgattaaagagaaaaggcaactgcgttgctcacttgatcaatattaaaaacacgaaatatcctacataaatatcaagggagctaacaccgaaaagttgagcatcatcacagacaaagcaaaatgaaaaaccttggtggggaacggctgtagctcctgctacgactgcgactgcgacgcctacttcgacttaaccgatttgtttcagcaagtttctccaacctctgacgctcctgctctcgttttttagccatttcagcagctgtatctttcttaactgtaaatggaagaagtaacacaatcataccaattagtgaaacccactttaacagtcacaacacaccacaaaaaattgtgaacaaggtagcatgacatgagaagggtacaaaacaaaagatacactttgctcaaaacaaaagcaatcacaatatttaatatactgctgctacgcaaaagttgcattaagctataagacatactttgtttattaagctgcctgctcataattcttttcagccgttcttgaggagtttctttcttttccccctcctgttttaacagacccccggaagtacttccctttgtcaactttgctattgcggaagatgcgctgtaaaatgatagaaatgaaatcaatatagactccatctgtgcaaaaatatagcctcattccagtcaagattgaaacagcaaaaaaagaaaaataaatagactacatcaaaaaatatatatatggcatacctcacgggtggtactttcaccattttagtccctttgtccctatttacagatacaccagatgcagggtcaacatgcagtgcctcaagtataggaccagatgatggcctgcatgaaagagaagcattagagactcccttcaatggttcaagttaatcgaattctttctacaaagtccatttcatggaaaaacaaaatcagctttagggaggaagcctcctccctcttcctcttggaattatgatgataacctagatgtgatctattctaaaccacaaagttttcctcggctaacaaaatgtgttaaagctgcagcagagtaaacattgtccaatctatctttgcaagaattaaaggtcgagtgctccgaccggtttaacacatcagtatgagatggaggagaagatggtggagaaaatccttcatgctttgactcactcccatcgccagagccaccaaattcagtaatatattcgattttgggagccacttgtttgctgcggtgagcatcatcagaatgtcgtccgcgaggatgtcttctagaatgtgagggtgagtacgatcgtgatcttgatctgtacacacaataagcaagttaaaaacttctacaatttgtctaagttcctttggaaaaaatataaataagatatacaacaatgatgtataaaaagttcaccttcttgaacgagaatacgcttcataagttggacttcgccttgtttcactataaaaacaaagagggaagcaaattataataaacataagtaacatgttcagtactaactattaacagggaagtaaatcattgattaacaaattataaaattttataccgatagggatcatgatggagaacacgggttcctgtaatccgtgcagcttccctttctctctccctttctacctgagaaacctttcttctctccttacgagtaagcttcctctacaaaaaatatataaatatatccatgttacaaatttaacactgaccaacatttacttaagacagataatatttaaaaacctgaacttatgaaaacatactattgcagggtcgcctttgatcacttctttttgcctcttctcttcctccttagctttcttgtccatgtaaacaagccaaccaaaccttttaacaccaaaatcctttgctattttatccattccttcatcattgctatcatcactattaaaatcatcataatcatcgtcttcatcattgtcatcatcatcttcctcgtcatcatcatctgagaattgagcttcctcttttccatcaccttcataagagaatccaacctgtgaataagaacccttagttgcagaaggctgtgccacctgagatctgccagatacgaggaaaataattgataagaaaaacttgatcctggagaactcaaaaatacacatataaaaagcttgtgcaaatttgtattcttgaatgcagagaaagagatatagacactattaaactcaacagacctttgaggagcaaatgaagcagtaatcttagcttccatctcttgttccacatgttgtagaccatcctcatcagtaactgttgacatgaaacttagcttgtaaaccataatacaaataaatagacaactaacaaaaaaaactatgaaatgataaactaaatataatttttaaaccatgaatattgcataactattttttctttcttttttttcttaataagaacaatcatttttgaaatttttaacaatataatgtatgtaacatcaaaaaaaaattaaaaaaaagtaaccgacatcctctacgtcgatgcttaattaaatcccggtaacgctcaaaattaacaaactcttctaattcttcctcttcttcagacttttcttgagcccggaaatgtctagaccccggttcgcgaataaaatcaagaagggcacgcccatcaaatctgcttacacaaaagaaaatttccccttcaacttaaacaacatgtcaaaaaattatgatcaacaccataatacatcacccttgataaaaaaaaccatacctgtcaattaaaacatcttgtttcccattccaaggtatcctgcaatggaagtttaaacaacactaagtccaagaattacacatgaatggtgatatattgtgctgaaactaaaatataattcgaccagtctacagactctaaacagatagaatttgttcaaattacagtgttcataaacaataaaacactaaaaagtgttaaatgcaaaaccccaatgaacaaagcagagtactaaaatcaattatttactcaaaaaaaatccagggttcagtggcaatatcatcaaagttaccaattgaaataaagagtaatagaaagctatgatcaacttgaagaagataataagataactaataggtataagagggaacacatacaggccttgctgatcctgagtggcctggtagagaccgtcatcgcggtacatacggcaacgagttccgacgacttgaatcgattgctgtggatcgccacggcgtttggccaagaacacggctcgtctctgggctcgcttccgagccgcgtccatcatatcatggaccttcttctcggacctcctagcctcgtgccacatcttctttaccaatcacaacaaccgattggtctggtaggatcagaatccagaattctgcggattgaaaagggaagacagaagggaaccctaaaaaaaatcctatccttttcagctacagcgatggcgaaagtgaatgaaaatggattcgacactgtattgagattcgagatccacgggtcttagcccaaacccagaaatccgggtatggaccccgagaatcgtgtttattcttgtcgtttgtgaaaatccacagtcgtttttctaaaaggctattgcaattggtattgggcactagtggtaca

SEQ ID NO: 184678 - DNA, 4121 bp, Cannabis indica
tatgtgtgtgcagtgtactaccaatatatagttctgtacaatatttacatttgcacgtcatgaaataagtatgcatatcatacaaaatcttggatgagattttttgatgaagacactagaagttaattaattaatggtcacaaatagtttgcatgcatgcatttatacacatatatagtcaccacttaccaaaaagggcaaggctagctaattaattatgtattcgtataaatatacacatacattttttctaaacatgtaattggcttttcaaaaataaaaaattatttaattggctaacttaaaaatgtacgttcaaaacatattatttatatatttcttatattcatatccatagagagaaagaatcatatgaattatgacaacaaatcaagttaattagaaatcaattctttaccaagaaaaaaaaaagagttagaaatcaatcaatatcagtagtaaatattacttactataaatatataacagatactcacatatatataattaaatttatatatataaccacatatatagtgaagtaatgcatcgatgtatttttctttttccagtaccacatatatataggggatcccaatgtttgttgtccaagaaaatgacatgtatctacttctcaaagatgtctcttaattatacaataagttggtattaattaattgatcataattttcaaatacgcaattaattttcagtaatattaatagaattagataagaaaaaatagtgtatacatgatcattagaaaaaaaacacacacatgggattacttttaactgacccaaaaatttaccgaaacaacagtactatatttcgaaggatcttaaattatttaagtctatctcattttaattggtgcagtactcatgagcatataattatacagactggcctgcagttggcagccattatatgatgagaaaaaatgcaaagagaatcttaagaagatcgttactctctctaccccaaatgaaatctttgtatcgattcaggtaaaatattggaccatatatatatatagatctgatattatatatgttataggaatcttattatatataaaataataaagcatatcatttcaatccatggggtccaagtgttcgccatgccgtatatatggtaattattatagtgtctagtacctttactaatttacaatgctaataatataaaaaattaataataataagttaaagtatatatatattatatataaataaatggcatgcagataagatcatatttacatataagctagcttattgctttcaatatcttgctttataagaaaacttatatgtttattagggtttagtcgaaactaattactatggaccaaaacaatcaaataaaaattaacctctcgaaataattattaattagcgcctaactttcttttctttttctttcttatttaatgacaatgttcattacttatgctcatgcaataatttaattaagaataaaaaaggttattttgttaggtaattaagatgaattttattgcaaacaaattaaggaacaatttacagctatacaagaaagagttcaactttaatgttgagctaaatctctcaaaccaatcaatatgtcatctattacaaatatctctcttaactctatttactagatgtaaaaaaaaggcttttaattcaatatgtatagtaaaaataataatagtaatcgaagacagatagtagaatagatgaaaaggattttatatgagaagcatgaagtacatatgggttaattgaaaatgtggtggtgggattggcagctcatcactttggtgtggcagtggcatgcacaaccttcaaataagcacaaaagctcataataatgatgtgcgttttgtattttagtaatataacattttcacaaatggttgtacagctgacacgtgcacatacctaatttttggtccctttagtaataatattaaatttatatgtatctgacgtgcgtgttcagatattacaagacttaaaaatgccaatgaaaactttctcgtgcgctacaacattattaataaggtgatgatatatcccaacatatgtagctcaccaggaacattatagagtgttaattaaatatcataacagcaagaattgagatattactattagttcattttttatatccgagtaccgaaaattttaattttataaataaattaatatatatgaaaaattcctaattatttaggtagcaacacattattaataaacaacgagaaatataaatgggaatagaattagtagtagaaatgaaatagaataaaatttaaaatgaataaaaagattgattctaatcttacactaaaatggtctttttatttttttatatattttaaaatggaaatagtcatttttattttaaagttatttttattagagtaatattttaatattttaaaatgtaactaaacaatataataaaatgaaaatttattcttttttcttcattatattttattacaacgtaatatagtggtccttaattatttaaaatgcactttgtattataattgtataaacacacaaaagatgctagctgctctaaacttccaataaaaacaatattacaaatacaaattaaatccatttgtcaaatgccaaattccccaattgttagttataataagctcatcctagttgaattattcaatctatagcaacgacgattttttatatatatatcacaatcaactcatttaattgcttgacaaaattaataatttgaacacgaagctaagaaacattttctatttccttatattttattatatatatatatatatatatatatattcaaaattaagttgtagcctataaaattatatcagatcaaattattttgatacaacagatttaattaattaaaaattttctgtccaggggccaatattttgttggggtcgaaggtgagtttgctacgttgaaaacttggccattttgatccaaaatggttgatccaatcaggttgtgtttcataatggggaagatattgcttaacaggaattcgagcaacacgacaaaactccaatatttggttattcacaccatcaaaagcctcaacctcctcagcagtacttgaatgaagtaaagctacggtgtaaaaaacttcttcatcatttggtatcacacccgacattttatcatcccacctatatatacgtacacacattaattaattattacattaatataatcataaaaaaatgttacatcacctacaaaattaataatattaatattaataaacttacttgtttcggtttaatgggtaaacaataaagactccaacaggaactttcttttgaagaagaatatttacgaaaacgccagagttgaattctgacattcttgattttgggataaaaaggtttagccatggatgaggaacttcccaaagccctagctttctaagcttttcctcgtcagctgctactctattaagaaattctaagtatgtaacatctttcgagaaggcaaacccgggaataaaccctaatcctttcaataaaacttccaaatcctgcattaataataaagttcaattaattagtataaaaattatatgtaaaaaaacaatatatattatatgacataatacatacctcgtcaacagggggcgtatcaacgtaatatttggctaattcaagtacgtaaacgacgtcgctttgagcaacaagagttgttattctcaactggtcaggcactgaataaaaggaaagatctaaaggaccctgcttcattagaagaaaaccttctacatattccactccacccttttccctcattcttccattcaatgagattaaacgctcttggtctcttgaaaaaactgagaaatctgtgtaaaacagtcttaaccacttaacctgaacaataattaagttaaatcaatatgcaaaattaataacttaataatataagtttatttctttaattaatcaattataacttttttagtaccttatttggtgctttggtttaggggaattcttgcccgggtaataatcccaaattggcctaaacctccaagaactgaataaaatagttctggttctttgattctggagcaagtactaaatctcc

SEQ ID NO: 184679 - DNA, 2244 bp, Cannabis indica
cattgctcctataatgctttgataggttattggttcatccaagacttgaccatccgttatggcttttcggcagtcatagatgtcggacaaggcttcaaatttagcatattcatatttttgagcaactatgttatatatttcccatgcctaagatacattccaatagtttctatttataccttaattttgaaaaagtaattgagatctccaaattctttgagagagaatatcttgttcaatttttctatgaacttctcaagtttaaccaagttgcttctcgtgactataatatcatctacatagatgagagccatgataacaaattatggagtcttgaacatgaaaaatgaagtatcagcttttgaattctcaaattccaacttatcaagttactcttgagttgctcaaatcaggctcgatcttagagcttgttttagcctataaagtgatttctctagcttacagacataatctggtctctctttgtccaaaaaatcctatggttgtaccatatacactgcctcttctaactttctatttagaaagtaatattaatgtcaagttgtctcattatccaccctttagaaactgctataattaacactactctaattgttgaaagtttgatgaacaagattaaatgtctccccaaaaatttagacatggtctttgatgaaatcctttagctataagccttgctttaagcctctgaaaagacccatcaacattatatttttctttaaataacaacttgttttcaactacattgtagtttagtaaaggtttgataagaacccatgttttgtttcttatgagatgatagaattcctcactcattgcttttttctagccactgtgttgaagtgcttcaaagtcagatgtgggttctccaccattgggattccactgagcttgaccaatataaacctttggcttgaaaactttagctttagacatgattaccataggatgcccaacttgatcagtcgatggttgttctgtgttttgagttgcagaagcaactcgtgatgatgtagatacatcttgcgactattgtctcatatcaatggtatcatggtcaatgaaatcaagattaacaaagatactagttgagagatcaacctaacttttgtatgtagcagtgatacttcaggttcactagttgtgtgatttgtattagattgagagtgagtttctgattgaatagaattttgactctgagtggcagtatttgtggtgactggtgactcattttttggttggaattaaaataggtagatatgtccgggaatgtagagtttgaattttaacagtttattcttttttgtaagtgttgaagaaaccaattttgtacggaaattctttctcattaaacactacatcccttaaaatatataatctccatgttgagcttagacacttataatctatgtgagactcactatacccaaggttaacacaatttgtggagtggaactgaaacttatgattttgatatggcctaagacatggaaattaaactaccccaaagaacttgagaaacttgtaatctggctttttagagtcgacaattttaaagggtattttaccatttagaacaggtgttggtagtctactaatgagatagactgctatttgaaaagcatctacccaatacttaagtggtaggcttgcttgagctaagaggggtagtcccatctctactatatgcttgtgccttctttcagcacgcccattctaatcagatgtgtgagaataaggacgagtgaacaatatgccatgttcttaaaccagattactaaaggactaatattctccacctcagtcagtgtggaacctttttatttttctactaaattggttttcaactaaattattaaaatgatcaaaggcatgtagggcatcagtcttagctttaagtgaatatagttaagtgtacatattatagtcatcaattaagtgaatgtagtatttcaaatttgaatttcatattctaagtgttgaaacccaaatatcagtgtggataatgtttaatattcctttggctctagagtcagataatttgaaagaaagacagtgagattttccaaattgacatgcttcacaaaacaattgctcttcattcattgaaatttttacgtgtgtattagataatattttatttaagactctagaagaagggggccagttctcctatgccacaaatccttctaagtggtacaagactgactagaagataaatta

SEQ ID NO: 184680 - DNA, 3602 bp, Cannabis indica
aatagggcaaaaattcttcattgtcttcggttttttgattttctaaatcaatgtcataagagttttatgaaaaattttagggctgccaccatgattcaaaacatttagaacaacctttgttaccaaatttctaacaatatgccaattatgctaataaaacatagctgacactccatcaacaccggacttttgtcagaccccattgttttcacggctgtaaagacatcatcggcagtaaatttttttaataataactcattttgttatgaagaaattgttgttggagttgtggataaaacatgagataaagcccaatggtcctcttcagatgcagtcaaaagagtagtaaaataatcagcaaccatcttagaaattccttccttagaagttgtgatatttccataatcatcataaagagctttgatcttattgtttgcattccgagcatatgcttttgaatgaaaattttttgtgttatggtctcccgattgcagccaatctactctaagtgttgctagcaatattattcctcattggccaacaactcatctataatagcttcagctgattgaataacttgagaatgatccaagcttgaagttgttgaagaatttaactactgaactttctgctatgcttgggaaatatctgtcttcatctgtccaaactttctatgatgccatccttgtaattgttttgcacatctctgcagacacaaagcaagaccagtagaaaatcatcctcttcactaaagcaccagcaactcgaaataatacttgagcattcctcatcattcaaccaaaatcgttcaaatctaaatcgagaacgtctacatacacattgatcttgtggttgaaagaaagtaatttcagctataagaactctatgatcagatccatagtaatccaaatgtgatactgttagcagttgtaaagaatccttccacacattttttataaaacaccaatcaatcatctctttcaaacaagtagaatttttcttatttttagcccaagtaaaatcatctccaacaactggtaaatcaaacaaaaaatattggtccaagatagcacaaaatgcttgcatttggttatcagttcgaagtggattgccatttttatgtgcttgtaaaaaaatttcattctaatcaccaattaacatccattgaacatcggccaatcttttaattaaagcataagtatgctttatattaattgcttccaaaaatccataaacagcataaagatgccaacgagggccatcatcaaataagacataacaattaaaatgatttgtattcatagaaagaagagttacatcaacatcatcttaccacaataacataattccacctttcaacccaaccctaggtacttctaaaccattagtaaaatttaaatactttttaaaacgagaaagagcatcaacattcgtatccataagaagcaacacctgaggagattgctcatgaatgagcaatcagagacgtcagaatgcacttgggctccccaaaccccgtgcattccaacttaagagtttcatgatgagaagcgggattgcatagcaatcaccactgtattgtcattcacactagcaggatcagtaggtacatcaaaaactaactggataatctgcacttcatctgacaaagaagaagtttcaaccacattagttgcataacatgttttcagagtttgtctcaaagattttggatcatgatgcctcttataatggcgattaggatggatactttcttggtctaagtcactactaacaggagaagataaattaagaataatggtgggattagttattggtaaagtgtttgaaatgttagataagggcatggtcatagtgattggagtagaaaattagtggtatttaaagtaggcaatggtggataggttgcataaacatgagaagaaaaagttgaggaagatttaacagagtaattgtctcctaaatttagtgtgtagatttatgagaagttagtgacagaagcattaagcatggcagttaataggcagatgaattcatttatgtgctagaaacgcaatcgtattcgttgttactaggagtagaaaggaccaagataggggttaaactaggggttaaacaggtagattgactaaggatttcgcgggagaaaatggaagtctccaccgaggcattagcagaggttgtagcaggagaaaaaccatgtacagatctaggattaaggtctgtgaattagaaccctctccaatcaacaaaggcttcgaatgtgcagaaggtcgagtaagaattttgggtattgttgcagtgagtgaagttctggctagtcgcttaaggagcgtccaagcatttccttttggagaaatcggtgcgatagcgatcatatgctgatgatggaagtgcagatccattcaacattggtccgaatggaaagttaggttcaataccattatcgagatcctctaaaaacttctggcatttttgatataagtgaccaataattccgcactccatacaatactcaggaaggtgttcataacgaaattcaacccaaaagtcctcccaaattttgggtaaagaaatcattttttcatgaaacaaaggctttgtaatatccaactggactttggatatcaaaaaaaggaccccaaccttcatttaaagagttttcatggatagtcaaaaattcacccatcagattccccaaagacttcgccaaagatcttgacttgctaaggaaggggagtctgtatgcttgcacccaaaaggaggagaagaccttcaattctggagtgacattctgcaacgctgttgggtgataaagaataatgtggtaattttagaaatgccttggttccttgtctagagaacgtaacatatcaccttcacaccaaagcaaagtacgaataggccaaaataatgctttttaatattcactttgaacctaccatcccaatgttctgccatttgacgctgaaatgtggaaagccaaattttcttatgggtgacaactcgagccaacatagtatattcttgaggagtagtttcctcacaagatccatcatcagtaatggcaaagatagtctttttattttcaatcaaattcatagaagatttcatcttattaatgaaaggacccataggatatgcaggaaaggatgaacacacaagaagatctggacaaacaattaaaaagtaaactcaaaaattgaaaaaaaaaactaaagtggacagtaattgcctcagagcactaggaaggacagacacttcttttttttttttttttattttttttataactgatatgattgatacttttcacttttattacatttatatgatggaacttatgtgacaagattatatctcgatcactaatattctcacatattcttgtatgaaacgatattcaatatttcattagggattgttccttagactaagagattgtgctcgttagattgaatgaaaaaataatctgataacataaaataaatataatattataaagggtaaataacgacataagtacccaaagttttaagttgtaagcgacataaattcaattatttatttttagcggcataagtacctaatgtttgtaacac

SEQ ID NO: 184681 - DNA, 6871 bp, Cannabis indica
actcttcatttaaaaaatctgtgtttaaactcttaaaaatcgttgcaaatagcctcacaagtgttctaaattgtcgggaatacccaatttttttcgacggttttaaacactcatttaattttattagtgatgatcctcggaaaaaatcattttgaggagcgacgggaatgcccgattttgtagtagtgtaacgatcaggcaatgatcaggtgtgtgcctatccatcctttttaacaactccaaacctgttacttacggctttatgggtgcccaaaaaggaggcgttataaaaatttcattgcagacggttgcttgctgagtcagtctcatttcctactctatttcttcacttgaagtacacatttttttggatttgaatgcacataataaagtccatctcatcctaaactgtaaataatatattaaacagatttggatgatatatacatactgtgcaaatcaactaacttccaactgtcctaaaatagaagtttttgtaagagaaaaaaaaaagtatatactactatatagttatcaccttatggaacatgatttcatcatggtaagaagaaaaagaagcatcttaatatatatgcttagtaataatcgccagaatgtgttgctctcttattaaattttcacgaaacgtcccactatgttattgaccttgctctattcaccaaacggctaaaacaatgtctatggggaattacttggccaccttgatttatagtaactttttcttagaattaaaccctttcttcctctttttagcaactataactataatatcattaacacaggatcatcatcaagtactagatcttctttataatcttcactctagtattacaaatttcattcacgtttagttaggtccacgtttgatctaatcttgggtcatgggaaactgctgtgttagaaaccaatttcgacaccaaaccaaaacaccctcatttttgagcttccttcaggtctgcatgcctacagtactactacttacatgcttaattatacaacttctttaacttcaaaatatttatttcctagtttaatctgtgattaattttattgtataagggctcagcaaaccaagagtttttcaacccaacataaaccgggaaataagatccttaaatggaactaatgttaagacttgtccaattagtctaagagaaggtacttatgacaccttgtttcatattctcctcttagccattacataacaactacataacattattcttcttaatttgatgataaaatagcagccaagcataataaattacatgaaagctctagagatgaaaaacacagtcgaccaaagaatagttcatttgtttcttcaaacacaaacattggtaagtgggctttgtctagtatgaaacatttgtttatcttttttttttttggttccaacgtatttttttgtgatcttaaataaaatgcagcaaaggggactgaacaatataaaagacctgggactgggaagagaccaagttcaatagaaaaagtgaaaaagaagaatagtgatgatgttgagttgaaaaaggaacacgtggggtctaatgtagcacatcatgataatattagctacaaggtcccctgttttccctatagtatactaaggaaagcaacacaaaatttcagtaaaaagaatttaataggtgaaggagggtttggtgatgttcataaggggtacgtcacttactgcaccatgaaccatgctaaaccaaatgagggtaaaccagtcgctgtaaaaaggcttattcaccggagttcacaaggccccgaagcatggaaggtggcctcttttttcttcactattaatcgtgacaagattaatttgaaaatgttatattcacaagtcaaattttgaaggaaaaaaaatgatttaaaatttgggtgactgcagacagaagtagatattttgggcatattaaatcatccacatgtagtacaactacttgggtgttgcaatgaaggtaaccatagaattttggtatacgagtacatgactaaaggcagtctagacacctttcttctcagaggttagtgcgccattttcaatttaaaggtccactttagaaaggaaaaaaaaatggtatctattctagtcacctttctctctagtttctactcatagctagttgggtctcctttctttcacattgacagaaaatcgggaagagttacactggcgcagaagagtccaaatagcaataggtgcagccagtggcttagcctatcttcacactcatgggaagcctataattcatagggacattaaagcttccaatgttcttctagactctgtaagttccctctttctggtggttttcataggaatagaacatagcagtcagtaaaaattgttttatggttttaaattatgtgattgcactgaatattttgccaacattggtagcacttcaatgccaagatttcagatttcggccttgctaaatatggacccgaagatgaaaatgatcacctcagcacaaaggttattggcagcaggggctactttgctccagagtacttctatagaggtaggtatcaaaaatcaacctttccccctcaccagtttttggagaaataaaaaaaatatatattttttaacggttacagggcacttgaccataaaggctgacgtatatagcttcggagtggtacttttggagattttgtctggttcatgtgctgagaagagatgttcaaaggggattccagaagatctaattgagaaaacaaagtacctcctctgccggaacaccaagccggaactgcatacagtcatggacaagcagcttggaaacatccccatggaagaagctcaaatattcgctgagcttgcctaccaatgcctcagccaaaaccccgaaagcagaccaaccatgggagaagtggtagctggtttagagcagttgcaacacagcaaagttggagccagtactctccacaactccatggttgcgagattttctgcctggcctcctccctcttccaaaaggtcctccagataatttggatgtgaacaatcaagtttgttgatatgactatcctggaaagacctgcacgtgcctttggcgataaacctgatatctaacatgtaacaatgataatttgtgtaatgccaatgagcacatgctttcttaaacttcaaccatccacttgaaaagatttcactacggtccaatatgttgtgatgtgttcatactattactattatacaatgcgacacaacttgtcatgagtgctgcatgaaggataaatgtgtatacaactcaatcaaagaaaaaaagtgtataaatatagttgcgaatttagcttgaattattcacaccaatatattaaacaagtggattgccacgactttggagctccatatcatatgaaaaaaaggctgcccagtaacctgttccagcatacttcaaaattgtgtcgcatgaatgacatgcctcgtactccattctaagggaacgaaatggtaacagaagaaatttacaaatctgagcgccctttttaatgcactcgtggagattgttggatggatcgcaatggagatgcaatgggtggtggatttagaggagaacgatgttgtcgcattggagacttccgaggagaaaaggaaactgggtgctgctctggttggggaagagaagctgaatttcttgggccttcaagttgttcaagcgttgataatacatctgccatcttaggcctaagtttagcttcattaagcaggcactgcatggcaagcgtggcagctgtatatgcacctttctgaggatattggccctctaatttggtgtccatgatccgaaacaactttcttctgtcacccaaatatggctttgcccagtctaccagattctgctcaatacctactttggttttatcaacagcacgtcgtccagatagtagttccaatagtacaaccccaaaactataaacatcactcttagctgtgagacgacctgttcattggcaaatccacaggtaagatgaccaccttaaaatcacttttaatttataaattgacaacaaagttaaaaaaaagacaataaacagagtaaaaatacactgttattctctttaaacactgttattctctgaattgcacttgccataaaagggcgtttttttttttccacaatagctcacccaataacagatactaagaactaataattgtggatagcaaggtaagactacacaataaatcaaattgaaagcacataaacctgtagcaacatattctggagcagcatagccatgagttcccataacctgagtagacacatgagtcctgtcaccagtcggacctgccttagccaaaccaaaatcggaaagctttgcattgaagtcctgcatcacaatgtgtaaccggtatatgtaacttagacaagaatgcaaaacgtaatcattatataatcaactgacaaattttacattttattttaacataccgcatctaataaaatattagaagccttaaagtctcgatatatgacttgtgatttggcttcatgaagaaaactaagccctctggcagcaccaatagctactttcatccttattgcccatgaaagaggttgtggccctcctgtgaaccattaaataggactcagcattagaagaaaagttcatgaagccacaccaagacatttctaagttcaagtagagacgacaaagtttcaaaaggcaatagctctagatattggagaggtgtagaaacccattaaaatcatattttagccagtgacataagcatgtgattggctgtacatacagctcaacactgtttttccatcccatgcagactattttagcaagacgagtgctaccaacactatttttcaatctcttacaaactggcatgtgaattcagtaaaattatagtaataaaagaaactgataaatataattgctagatcttctcttttaagaaattaaaaagcagaaaaactaacgttcaggaagtacaaacaagctaaatgtaagggacagattttgttctgcaagacaacttcagagcagtgagcaccacttacttctaaatagatgattctctaggcttccttttggcataaactcatagaccaaaagccgattctcaccctctacgcagtatccaataagcttaaccagatttggatgatgcaactgaccgagataattaacttcagtctgaaattgaagggctttcagtgaataactaaggcataatatcgcaaataaactcacttaataaaattaaggagaagatacctaccaaccactctttgtgaccctgaaaaccttcaggctttagcttctttacagcaaccactatccctgaaccaggttttacagcagtatatgtgtgttcgtcaatccatcccttgaaaacaaagccaaaacctccttctccaagaagactgtcgggacggaaatttcttgttgcatttttcagctcattgaatgaaaaaggattcagatttgaagatgataatatttcaccttcagttcgtggcgtaggaagacttgaagagttgctcttttcgctaaaagaaggaatggtcaacgtggaaggaaccgaagaacgactagttctgcttgaattcttagaaactcctgaccctgacaataggaaaatgttgggtcagaaagaagtaaatttgcaggaaaaatggcactgcttcaaagaacacttaaaagtcaagtaatacaaataaaaaaaaccacaccccattcaaagtaactataattgtcatattttccacaagacttaattatttaatttcgaagttatggagtagattttgttttgtaaaaaaagctccgtcattgttatcttatttattttgtggtcactttcaacagagctatatacaatgtataaggagtattttaacaacaaagaaagttccatgccgccctggatgatgataaaatgcttaaagggtaacaatctttgacccagcaatctgcctagtaccataatataatatgcatatcatgagttatctcaaggaccacacaatatcactttataaacctcctagttctctgatagtctacaacctagaccttattataaatcaatccgctttaacacatgggcacagaacctgtcttgtgtctgctactgtaaaaatcaaattaagaccaagtttcaagaggatctaaaagaaaagctgaatactatacccgaacagtcaccatactgaactcaaaatctagtgctacaaatatcacaatctcttcaaacagaatgagactatgttcaacttgaagcaataagtagttttggaagatgggagacatgtttattcccgcaatagcaattagcaaggcttatttctaaagctccgcctttcacataacgaggaattgagtgaaacaattataacagacccttttaggaaaaaaaaaaaaggtcccaaccatttaataagtactaaaaaagacaagtttttcaggatgtaataaaataccctttgaaactctcatctcaataaataggaatatacataatctaactataaatgcaaaaataataagaatagtaaaaaatcttactgatcttcaatgctaattcaaggaaaattgaggtgagaaactacgcgtaaacctaccataacatactaccgaggttcataatataaccctgagtaacgaaattggaaaaccctagaaagtaaaccgatctcaaaacgagaaagcaggagaaacccccgttcccactaattgaatccagtttcgaaagaaaaatagttgtcgcaccaaattaataaacccatgaaaacccacaaccagctccttgaacaaaaatgatcaattataagcatttatggagagagtaaaaacagagagagagagagag

SEQ ID NO: 184682 - DNA, 5809 bp, Cannabis indica
tgaaaacttgaatttttaatcctttgaaatgctctaagcgaagaaatctaatcttgagattcttttttacaaaatttggtcatttttatcactatgaaacccgaaaaataccattttcactaaaaagtaaaatttcttcttctaacacttcaaattcaaagaaaataataaaaaaaaaaaagcgtaaatccaaacattaaaacataataacactaaaaacgcacactaaaacaggctctaaaacaacacaaaaataaacctaacatctaccattcttgttggactgaaaatggttgggaccaagtgcaaaatatactcctttgtatttgtaatcaatcgattagcgagtaaaatctcatacttaacacatattgggcctagttagtctgagccacatgcatggttcatataaatagaagctagggatattggcggctaaaccacctagctttaaattttttaacacttaaccacaaaaactgatttattgatggcaaaacataccaaactcacattctatttttccctttacacttccatccaaaactctcagttaagtgcaacgatggactgcatgcgtgcacacaagagtacacgtggcaagagtacacgtggcaattttttttttctttttcttttctttctctttcttctcgaaagatcccaactccccctaaaccttcttcttcttttgatggtggtaatggcagtcttctctgtgatttgccaaaccagacagaacccaagcaaaaagacaacagaactccgacaacacccagactatgagacagtcgatccccacagaacccaagcggaatccagtccgaccacccctctatctcgcgcacggaaccagatggtcgcctcctcctttatctctcacatgaactctgataaccactctctatcttctcaaagaaacccgattaccactctttaccttctccaatagaatcagaaggctcctcccttcagattttggtcgagctccctcaatctcgagatctggtttgtatttaattttttgattttttattactttgtgtataaatatgcctatttggttctatcaaaaaaattttgctttttaaatttttttttacttttttctatgtttagacccaagaaatataagggcggtggtggtggtgggagtgaggagatggggtggcgtggtttttgtggtggtagtgtaattgtggtcgcggtggtgggagagaggagttggggtggtcgtggttttggtggtagtggtgtaatggttgcagtggtggtgggagagagaaggagttcgggtggtgatggtgattgtaggtggtttcactcgtgatggtggtttcaggggtttcaatggtagtagtggcagaagaagaagaaggattggggttctggatctttcgagaagaaagtgaaagaaaagaaaaagaaaaaaaatggaaaaatgaattttctaattttttatttttataaattgtttttttatttttaaatgatttttattatttttaaaattaaaattatgtggactactgaaatttttccacgtatactcttgtgtacacataggcagtccacctgagggttttggacaaaagtgtaaagagcaaaacataatgtgagttcggtatgctttgtcatcaaaaaatcagtttttgtggttaatagtgttaaaaaatttaaaatttaggtgatttagccgccaatatccctagaagctattttttttactgtaaaatgatttgattttagtttttaattaagccaaaactctactgataaaaccataagaacctccattgttgtaagtttgaacaactctaatattccaagactcatggactaagatttatcaatacacaccaaccacataaaaaagcttgtatgagtataaactaatatttgagatgtgtttaacctagaaactcaaaatcaaatgataatttggaatgtttattaagaatgtttgggtgaatgtattttttgtatttggaagctctgagcctgtttgtgactattacgtttagtcgtagaccttttagtcataacatagaaatagtaatttataattagtcataatttttttttataattttagtgactaaaataagattttttgtagtggttaataaaaatgatggtactgtgttttataaaaaatataggaagaatatatattaagttcaaatcaaggataactaagggtaaaataaaaagattagctgcttaaatttcgttcaaaataacttagttatcctaaatagcaaactatatttatttatataataattaatgatgattatgacccacaaataggagaggcatatattaatgatacatagaaatatgatcaccacccaaaattcacgaaaatatcagctagagtaaactaataaggtaaattaagaggaaaaaaaattgtatgaagatttcatattaataaataaataaataaggtaaagtggaaaccacacagaactaaaacctaaccaagattttcttggtttttttaatttttcatttcgaaaccaattcttttcttttctcttcctaattatcttagtgaaaagtttcacaacaatgaactatagtcatatatactctataattaaatataacaaacaaaatctgagacacacataattaaagattaaggttaagtcaatatatgatcgagagatataaacatgtatcatcatataataattaggactggccaatatcatcaaatacaaaaatcaaatttctatagtggatgcaactatatatatatatatatatatctatcttattccaaaccaatgaaacaattaatatatatatatatacatataaaatcaataagataataacttagcctagtatattaactagggataattgtgatatatatacaattctctattcatatacttaaacaaacatttactttgatcatctatagtataattaattattaattaattaagcaatattttaatattcataagcgcaaataaccagtccaaaaattagtatatatattactttaattactattatgtaatgtttctcaacatcactatagtaatgtttatagctacaaaagaacaaacagtgtaaaattctaaatatcacatgagtaaattacgtacgaggatatataaattacagatttattataaaattaataattttgtttatctatatatggttaataaacaaaactgaaaagtagtgtagaattaaagaaggaagaaagtatatttgtcgaggtgtagtgactatgatgatcaataaatgaaaattaattagacaatatatgagaggatcgatacatacaatatatatatatatacatgatatatctctgaatgaattaaatgcctttgatttctgtggtttgtatgtatttgggtattggccataaatgagcaggacaaaaagaaacactaatttcgatgagagagagagaaagagagagagagagtggcattttggtaattttatgaaacagagaggttacgtaataattgtaataatccccacggaaatatatgcccacacaaacacaaacacaaaaccctataaaataaaaattcaatctttatttcttttcatttcttcactgatctgaaatctgtaatagataatgacactgcactgcacacctttatcacaccactccaaaaatataaaataaattaaaataaataaaaggttgaaaaaccatgttcaaattattaaccattaaaaaaaaaaaaaacaaaaggaaataatcttatggaataaaaataatatattgtatcttattaattatataatgttaatgaacaaaaacaatatatatgatgaaattgtaaaataaaaataattaattacccaaaaataacttttttgttgttgtctttgttagttagatgaggttgggccatgccctagcctaagctccagatcgagttcttcttcttctttttcattgttattatgatcatcatgatcttcagcagcaacagcccatgactgattattaggataagcattattcatcatataattactactactactacctccgatcatcggccgtgacccggcggctccgccttgattaggagagatagaaagatgagttcggtgctgataatgattatcatcactactgcatgcatttgtacttgaaatgtaagtgccggagccggcgccggcaccgttgtaattagagtttggtaattggtagagaagacataatccgctaccgttgcctcctccattggtggcggtagaggagacaaattctcctgtagggattaagaaagaagaagcagccacgacagtaccagtggctgctgctccagatacaccaccaccaccaggatgatggtggtggtggtggttagttatagaatttgatggaggtaggacttggtgaagtctagcgcggtctcggcggtggacattcatgtggccgccgagtgcctgtgctgaccggaattctctcctgcaaaaagcacaggtgtaggatctcggcggccacgtggtccccatgacgttgccggtgtcctcggcaaacgccctgacttcccatgagtcatcctcatgaggttcttgatggtgtttagggttccacatccaagaaggagtggtagtagtagtagtagttggggttagggtattagggtttaattgatgatagtgatcttgatcttgattttggttgtcttgtgattgagccaagttgtggaggtgggtcaaggagagaagaccaagctcagtagccatgggtacaagtgtttttttctctaataacacattttaagatatttaaacagatagatgtgatgatgatgatattttttgatgatagggagagttgggtatgtgggaatgatgaaactgaaaaggaaaaatgagacatgggctatttatatatatttatataaagataattgtataagggatgatatgggctatatagtgtggagacaaaaaaaatcaaaaaccctaataatctatcgatgaaatcgaatctatcacccaaatttgacaacaaagtgattggattttagtatatataccataattgagagattatatatataatatctcactttggcatcaacgcccctctgtagaactacttgctcagctagtttagaatgtcttaatttcttattatagttaattataattagctaataatgatcatcttcaatctatctttttcacaccatcatcatcatcatattcaaatacatatattttataacgagtataaatatatatatatgaacttagctacagagcggagagtcctaaaacgcggtgagatatacggacatatataacaatgagatgtattttttgacactaaattaagtacattaatttattctaaaatagtctgtaatatatcttaattaagtatgttttgtcatcaaatgttttgtcatcaaactcattttaaaatgattatatcatgacccacaaatcttaattactgacatatattttataatagaatatataatgctgtttttttttgtccaaaaaagaaaatcttttattatatttcacaatgtgtaatatacaaagtatgtatatatatataatatatttgatataaaaaatcacactaaatatggtatttattcaattaccaaaattctaaatctatacaaagtatattttgttttgagttttaaaaaaaaatctctgaaaatctagcagtactttattattttatttttttcaaaaaaaaaaaaacgaaatttatttagtacaaaagttcaatgtgaattttaattttcaaaatctattttttttttttttt

SEQ ID NO: 184683 - DNA, 8119 bp, Cannabis indica
cttctatcttcatccctttgagtccaaaactctctctttcttatcttactactactactattacggccttactatactctcttaagattattcttgttctctctcccaaaccaaacagaaacactccaaaatatccctgctatcttctcttcagtcccacgaaaaaacatagaaatctttccttaattttgttgtcatgagaaaactctgtcccaatttcgaccgcgaagacggtctcgatactgtcctcgaggttccaatccccgaagaaatgtttgcttcgaagactagtaatatgatatcatggcagaacatgaaggcttggatgacatcatctcatccttccaatatgaccgcacttttcggtggccgaaacgccgagatccagctcttgttaggagttgtgggagctccgctcattcctatagcaatctcttatgatcacgaactcataagccgtaacatcaaagaccatcctatcgtaagtaccacatatatatatatatatacttggataaccaccagccttaattatattcttactgattatagtattaatttgtgtatgtttaattaattattataggaggcttcgatggcgaagtacatagtgaagcaatacacggcggcggttggaggagagaaggctttgaattcgatagagagtatgtatgcaatggggaaagtgagaatgggggcttcggagttttgctcaggagagaagaatgtaaaggccatgaaagtgaagaacttgagatcttctttacaaggaggagagatgggagggtttgtgctgtggcagaaaggaccggagctctggtgtttggagttggtggtttctggctgcaagatcagcgccgggagtgatggtaaagtcgcttggaggcagaccccttggcaccactctcacgcttctcgtggcccacctcggccccttcgacgttttcttcaggtgctttttctttaatgtttctctctactactgttacgtaatagtaaaaaatataaaatcaaataataacaattctatttacatctactgctttagtatttaattagctaatttgttattaatggttagattacggttgttgttgttcttgttgttgatgaatatgacaatttggcgtttctttattacgaaagttgatgggacacattaaaattagttatttttcttttctaggtgcttgccatggtctttaatttgttgaaatacatatagctggacccaataccccaacaactaaagtgttttcatttggagatttcgtagactttacataggaaagtaccaaattctaaattccatgtttgttcatcttggttaaccaacgcctgccccacagcctaatcagtatttttttttttctttactaaagaaaaaaacgtgctttcacaattcacacttaacttggtcaagggatcccacaactactctatagacttttggagtaattagaaatatatgtatattttaaagtcaaacattctcgatgtgaatacaagaataaaatataacaaagcgattgtgaagaatgtttttcttttccagctacaaaaatcaattaaaaataatacttaggtacacgtataattagttagatacataatagattacactcacagatttatccatagtctcattgatttggataaattattccattcgactggagtagtaggaaatctagttagctgttggaaatatcaagcgcagctcaacatatagaacaaagccagctattattatcatctcaaataatggttaataatattaatatagaaagaaaagaaaaagactattgggtacattattgtatattaataattgaattttatattgaaacagggtcttgatccaaggtctacagcaaatttgttctccaactcagtttgtgttggtgaaaaagcaataaacgacgaagattgtttcatcctaaaactggaagccgattcatcaactctaaaagcaagaagcagcaacaatgtcgagataatacgacacactatatggggctacttcagccagagaacaggtctcttggcacaactcgaagactctcatctcctaagaatcaaagccaccggaaacaacgacaacatattctgggaaacgacaatggtgtctttgatacaggattaccgaaccatcgacggtgtgaacatcgctcactctggcaaaaccactgtctccctatttagattcggcgaaaactcgacgggccattccaggacgagaatggaggaggtttgggagattgaagaagttgattttaacataaagggactttcaatggagtgtttcttgcctcctggtgatcttaagaaagaggaagaaggttgtggtttagtgactagtagtactaatccaaagttacccttcaaaattcgatcagcttcttctaggattagtgcatctaaagtggccgccattgatttggatgaggaagatgatgatcatcatgatgatcaagagaactttgttagtactagtgatgaagatgaatcagtgtaaattcttttggtttcgttggtttctaatttttgtacatagcacatatataaaatagccttcattccatcattgtattatttatacaagtttttggcaatagatgagcatttataaattagtcatattttgtaccatatgaaaatgaaacacgacttgtgatctgtgctctgttggccttttttgttcttctctttcttcacaatccatctcttaattgtaaggtctcctgagtctcaatcaatttagtgttacaagttatggttgtaaagcgataatgacaattttggtttttaccaataagagagtttacaaatcaattatgaaacatttcatgatggtgtcttcatatttcatttctctgttttgtttttcaaatttggaattcaatcttttaaacatctgcttctccatttagtttttaaaacagagaacttgattcaaaaccatgtaactaacaacaacaaaataagagtcctcatctcaacagcatcacccaatgaggattaattcgaaatcacgtcactctatgctctttggtccactcaatatcaaaagctttaagattatctgagatgtagattaactagacacattcagctggaagaattgttctacattctgatgcactgaaaacagtggcttatatacacagaagagactaaagaaagctgattaataaccaaccaaagttgttacaaaagaagctgtagtaacagactctaaccatcactattaattacactaacagacacaaatacagttagacgaacaagtattctagctaactatattattatctgccttaacatgcctgaacaaaaataatttgagggtgttgattctttacttatttgttatcatctttaatttcttgtgtgtatgtgttagacttagttttgctcttacaacaagcttagtgcaggttatgaggttttgattgtgccaagaaacacaatcaagactcttacttcacatgattatatcaagattcaggatgtctacttctgcaaattttgaattagagaaattctatggaatcacttatttcaagtcattggagagagtctcaagggcacgcaatttagtgcatcaaatgatagctaaagttgtaatagacacaaaggagcttgcttaaaagttcatgacaagaaatacaagacatgaaaaactagcctatcatacattcattgtgtacttgtcaaaaaaaaaaaatgcactgataaaacaactgaaggggtgcgagatgcattactgctatatatgtatatatatatatatatttccttctacttcattttggtatcagcaatatatatatagtgtactactgttccattactctctccaccttcaaatggcagagtttgaaaacgaggaagtagaagagggttacttctatcagatttcacacgaaaatctccctccacagtcgccggataagctctactctgttctaattgtaatggtatgcatcatcttcgtttttcttcttcttctctctcttcttttttttttttttcgggtgttgatatggttggtgatggtattcattgtcttgttcggatttgtgatattcaggtatttaagaagaatgagcgcaatgtttcgttacgattccctagcatttattctcttagtgagtacttcggcgatgagagctatcggaacacggacaacagaaaggtgcctgtgctagatgaacggcacgatatgagtttggagattgccgcttctgtacttcgccggagaatattgcctgatgagtttgagcttcggcggaaattttccagtttctgggctccagttgagaggagctttagacaaggaaatggcgctgatcgtggcagcggtgacgttgccggtggaagtagtaataataaggtggtttgttcgaagagctcctgtttgtctctgcttaagtgtacaggtctggttcagtgggggagtcgccggcaagtacggtacattggaaggggaaaaccggtggagaaagagaaaaaagtaattgtagaggaagctcgggatggtgaagaagatgaggggaaggaggaggaggaagacgaagactacaaagacgtgaaggcagtgaatctttgtaatcagcttgctaaaactcggtctgcaactaagaggaagatcagtactggtgaggagttcaaaagaagtagggaaatcgagaaaaaaccaaaatgtcttaagaaaaaaaatcaaacggtacttcacagtcggaataagacaaagaccttgaaaaactccattgatagatggtctgaagcgaggtacgtatgcaaacaaaatctatatatatatatatatcgatcgtttcttttttgtttagttgatcgtttcattgtttctaattctattgaagtgatgatatatatgcaggtacaagttggctgaacagaacatgttgaaaataatgaaagccaaaggagctgtgattggtaacccaatactgaggcctgatttaagagctgaggcacggaagctgattggggatactggtttgctagaccatttgcttaagcacatggcaggaaaattggctcccggaggaaatgagcgattccgccggcgtcataactccgatggggccatggagtattggcttgagagtgctgagttagctgacataaggaagaaggctggtgtgacagattcatattggacacctcctcctgggtggaagctcggagataatcccacccaagatcctgtatgtgcaagagagatcaaggcaatcaaggaagagattgtcaacatgaaaatgtaaattttaatttggtttttttttttttgttatttttatagctttggttgttccatttgtcttttgggaattttatattttggtatggatttacagggatatgaaggaagtcatctctagcagggataggcaggaatccatgtctagggatatgaaagagctatggaaagtaatagacaagatgaagaagtaagttttgtcagactaattttgaaatatagcattctatttagatggttatgtttgatatttctggtattagggtaactgagcaaggattgaagaattcagaggacagtgatttgactactgtgaccaacttggttggtcatgtagattattttctaataccaaaggtaagaaaaacataaaaaagatttgaatctgatgagagagattgtttaattttgtgatagccatgtttaaaaagtatttctttaaccagtatcgcatgtctttttcaatggcaggaaacttttatggatttggtgagcaaaaatacaaatattgagaaagagctgattgaaatttggggaagtttgagcaacatagaggtacaaaatattaattgtatatttagctcaaaaaagaaagaaaaaaagaacattattattgtctcttatgattaaattatcttcacttataatataagaatgaaaccaaatagtaaatgcatgtgattaaattaaaatcatccgtacttatgtaagtataattatttggattcttttgagagactacttgtatgttttgctacctatatgcaaactttaattgcaggggtgtagttattaaatgattctgtgagatatatatttctttacttattacttgattggtagctctactctagctaatataacatttataacttactttgcaggaacaactaatgatgacaaaaaatggagtacgtgtgtcgtcagaatctgaaatatgggacgccaataaagagaaattaggagaaagaagggtatcagatcaaggaagggataatgaacaggcagcaatggcaggagagaccaaggcagcaaagatagagagattgaagagtggtttcaggatttgcaagccacaaggtaccttcttttggccaaacaccactactacatcatcaggtccttttgtggtccaaaccccatcatcagcttcttcatccacattctccccagtactaccccacctcctcctggtacctctttctccatctgggccccaatcaactccacctgtgaagcctgtgcctgtaagaggtgcccctttaagcttcatatccgaaggccttcctctttattctcctgatcttaaggctcccagttcttcgtctgtcattaacctaaacgaggtacctgtggaagagaacattattacctgtggaagagaacaatagtaatgttttttgaaaagatttatatatagaaaactcaaatattatagaatgaaaaagattacagggaaaatattatcataggactaatgaaataaataaacacattattagttattattatgggatttaccatagttatgggatttacatattgtctactttatgtaattctcattattatggggttctttttgagttgggaaatgggaatagttcacagaaatctatatttcatcatatgtacatttatgaatttgatcaaattcataatcattcatatgtttatcttaattttgtcttggttttatatatcctatatttagtagggtatatcctacaaatatagtacttgaaagaaaactttacactatagtggtgacgggtacatatgtacataataaccacgcttttctgaaatgatcacaagtcttgtctcctgagaatgctaaacccatcagaaatgcttcacactgtaaagaaagatattttaacccagttattttaaagaaagaaaccaccataaatgcttcagtactgtaaagaaagattttaactcagtcattgtagaatatttaagagttatatgcctcaattgaattgctgtaattatagctaaaaagaaaaatgacaatgcctaaagataagagcaaacgcaaataatatttacaagagtgtcagtctaataataataataataatcttccaaagagtaaagcacagcgtgtactgataagtatatgtgaaagtttcatttccttattttgatcatatagacttgaattgcagagtttgttcaactgaccattttagactagaatctcgaaaagagtaactagatatagaagacctacacaaaaatgttttcgccctatactctctggatgtttaattaatgacctatatcaccattaatgtttcccatgtatgaaaaatgtttttaggcttttattattaatcagtttgggcaattataggagaaatgctagtgggtgtgaagcgttaagacacacgtaggatgttattaacggtgcattttaatattgagtcccactcattttaatttaataaataatataaaaaattactaactaattatagaatattacattgctattaactattaaccacctaaagataccaaataataatattttagttttaatgtgcatataaaaaacattttaactatattttaattattagaccatctccacaataagtaaaaagagagttattattgatgttataattttagtgagaaacaaaacaaaacaaaatataatcaatgtattataataattagtgactacaataaatttttttttcttataatttttatactttaaagtcatttttttttatttttacgaaaatctacataacaactcatatataaattaaataaacaacctaatttacaatcaaaatccacataaca

SEQ ID NO: 184684 - DNA, 5100 bp, Cannabis indica
aaattccttttgttatatatgctcctatattccaaaaagaagtaataatgtaatagtggcatgttcaattcaaatccctagttctctcaaaaagaaaaattcaaatccccagtttaaagagaaaatcaaaaagtatgaagaggaagagctttatgtacaatggttgtatggctaggaagctataaagaaaagctttcatgagtgagccaaaattaaacctccttgtgaagtccccatcaaaagctttaccttttttcttttcttttttattgaagaagacatgcataaataacttaatggggtaaataaaaattgttaaattttcaaactttaagtaatgtttattaacaatgaaatttcatatcattcccttcaataaataagaaacataagaggttagaattctttccactaacaaattaacaatcaagaataacaaatcccaccttataaagtaaaaaaaaaactctacaagccatgaaagagttattttaacaaattacaaaaacaacatgaaacacattctgaaaccatgaccctttttttttttcacaagttagatcccatataaaatgttgtcgttttcccccctgttactattttttttctgttcactttacccccaagaaccaaacttgtaccaaaattttctctctgtttttttcttctttttttttgtggttttgttttaagcagctcgaattctatccagccagtcaacactcttccttcctttttctaactgttggtcaacacttctcctagatttctcatggtactctacactccttcttgacctctccatctgatcaaatgagagtctatatttttctagcttgtcaatgctgctaaacttgtattcattcaattttagcttatcgggaagcctgtccacactctttctcggtttctccctccggtcagtactcttccttggagcctcataacagtcagtactccgtctggaatgttcgacaccacgatctgtgcttcttcttgaagtaaaccgccgtgaaggagatttctctactgttgatatgaacttcttgagatgccttaaatattctggatagagttccaaatcacagtggtttcctcctttgagccatagtggttcatatttctcttgacagagttcccagagttgctttccgtgagaacaatcaacaacttcatccgctgttccctgcaaaatgatatcgaaaagaagctcacaggtataagatagtgtacaaaatgtgcaagtttggaatgtaacttataaaattgagagaaccgagttaaaaggaaagcacaacatagtatggacattcgatgttaatggtgggcgtcttaaaatcatgaatgtaaaatcataatgtaaaagtaagccgaccgccataacatttttatgaaaaatctattatgcaacacaataaggaaatatggtagagaatcaaactacaaatacttacatgtattacgagtacaggacacttgaccagagggattttgtcaatgttctgcatatccacaaaaaccaggtttcagatacaaaccgcataagagctaaatgctactgaatgaaatctaccaaagaataagattttgaccttatagatatcaaaccaataagtgcgcttcacaggatacatgactcttaaacctgagagaatgggactgtgcagaaccgcagctcttagtcgaggcaaacgagaagcaagatctactgtaggtccacttccaacagattgaccatacaggactatgtcttcttgcttagcaccataagtctcttcaagacacttgtatgcagcttcaatatctgcataagtattctgctcacttggctgcagaaaggaatatacatctaccttagcaatcggttaaatatcaataaaaaagactacaacaataagactattgttcttgcagcaattacctttcctgatgactgcccatatccagagtaatcatatctgcataaatttaagtgaggagaataagaattgcattcctgtttgtttcttagtcaaaatatttacaagtacatttcttcggtgctactggcaaagatttgaaataaggagcccacatagttacaattaagcatagagcattccaaattcgacactttcaacactgcattatcagtttttgccttacaataagcaataaaaattctgaaagcaaagctagcatcctctgttggaaggccttgcccgtgttaacatgagatttattaacttgatactaactgttggatctgatttcctataagagtttatgagggctttcataatcagcaacatgatttagatttagagccttattatcttttaccgttttggagatcagcgaccccatttgacgcatggttaaattgtgcaaggttctcattgagacgatgaatatttgagcgaattatacaaatcatgagaaggaagttcataaatttgttttgctccatacttggtacatttcttatgttaaaagggacttaaaactcatccacaatacgaaaagtttgtctttacctcttacaaaggcaactctacctaagaactcaactaactttctgcctcttgcaatctaccagctccaaccatctaaatttaagttcacttttcatctgtattcttttgaagctttgctctgcccattaaagctaagatctcaaagttgaaaacagaagacaaccaatacacgtctaaatcatacctgtatctcacattagtgtctaattacccaactttgttaaatcagttgatccagttagtgtaactagcggattaaaagggttcatcagaaatttccaacctttatcacttcccaaaattgaaaaaccaaaaagatctatacaaataacatcaaatgattcaaattatgtgatgaaaacgtggtagatctacagaaaatccaaaaatggggaggcacttcatttagctaaaatcaacaatttagaaacttctggatattatgaaacaacccaaataatcatcaaatgaaaaaaagaaaacattaaaaccagccaaaagttgcattttgaaaattctgattcccagaacccagtaacttaagctcaaaagtattccttcaaacgcaagatttccttataaataccagaatggtactgttaatttaacaaaaattcatttaaaaacactccaaaaaacgatgaattacatctcaacacacacaattctatgtttagaaacaaaatcatcaggaaaaaaaagtaagataggaattaagagagaaagagaaagaggtggatataaattgaagttaccccaaaatattgatacgcaagtggatactgagctcgacgaagagctcatacatttgaccaatatcagcagcgttgccatgagagtaaagaagcgtggaagtggccattggataacgaatataaacagccacgatctccgttccccggcgagttggaagcttcaaaacgtcaacgttttcacggtgtggaaaagggtctaagagcaaaagtccagtagttccatctgtaattaccttataggatggcgggtttggtggaaagaaagcgaattttgcagccatggatgaagtaacaccacccatctttctctctcttatttctctctctataaatcttttggggttggagaatcaaagaagctcaatagataacattcctccttattgtctttactaaactaaaaactctctcttttctcttcactctatggagaagaagaagaagaagagtatctttgcttggagttaaaaatggggaactaagaaaagagaaaagagaaagaaccctcctttattgtaatccataagtttctttttctttttaatattccaaaattattatttttaaataaatgaataaataaggggccataaataaatataaataaaatatttcttctttctagtgggcgaatgatatcctgcccacttaaacagtttgcccttatagaccattgtcagctcacgtgttgtattattgtcctacaatttttcttttttttttttccaattttttgcaatatagtcctcaaacttttcattattctatattttatctaagcttctagtattaataatcttttattagatactttacaagtacatgtacacaacagtatatccatgttattaaagatggttagttaggacttaggaggagagcatgtgtatcttagaaaatgaatttacaatacattagtagctgggggcatattgcaatgaagtgaaaatttagggtattagggaaactccaattttgttttgtaatagttacacactctgttacaggttgtcccattttgctactcgtgtctctatgtctctcatgactcccaaagccaaggccttcgacaatttataaagacgattttgtcctcagcttgtcttgtaacaagaaaaagaatttcttttaattagtttatatatagaaagtgtgagattaattaaatgcaaaagataaaatttgtcgaaataagattgaaaggaactgatcaaccaatgatattgttgtctttaaatactactagctgatagagatagagatccaaatcgaatattaatgttatgatcaccagccacacgattaacaagatcaaacggtgaagactgaatgatgtacttcatgataaatgagaccccttttcaataaacaatattggttgcaaaatcagtccctcttcaatgtgtgtatagagatattgtgagtgaaaaatcagagccaaagtttgcaaaaaagacctctaatgaaaaaaaaaacaaagtaaaaagtgaataagagaatctattagtgagagttattcttccaatgcatggttgttgtgattatgaactgtggatcatgtgagtgaaaggtttttattagagaaaaggactacgaattaacatattctatgggttgtagttgtactttaattttgtacataaatgaaaatatattttaagattattgaagagaaaaaatattgtaaaaaacttaggtatagagataaaaagtgaagattaaataggcctagttattgtgcattaaatggtaacaaaaatatgaagaggatgccattagtgcataattaatacataattagcttgtgaatattttagatgaaccaaaaa

SEQ ID NO: 184685 - DNA, 1429 bp, Cannabis indica
atgctttggttttatgaagctgcagcctccaataacagatcacatggctccaagtccaagagcttggtttggagaaaaagaggtagttataggtgttgggctagaagtgtgttaagcaatattaataccgaagagtccccaatccggcgatcaatacagctttcaccacctccgccgcctgttgatggccgacagagagccatgaatgtgcctccagctccagcctcagctgcctcatttcattaatttttatcttttgttatttatatttgtggacctgattaataactaataggatcttggtatatacatacatatataatgtttcatagtgtcaatggcttcctcaaatggaagtttgtgttaccgattattaaaacctcattgcatacacaagtttttgtttcctttattgttatgttcttgatctgtaccttgtagccaatggcaatatctctttttcattttgcttgttattagtgtaagggaaattttgtatagaaagtacaaatcatattatatgtaacaagatgtaatggaaaacaacacacacagcaatgtggacttatcttaaacaaaagcaaaaacagagaaagtttcataaggaaaacttgaaaaaacagcagctgcagcatgatacatgaagtgagttaagctgggattagctctctcattaatgatgttgattcatcattctctctttgaaaagttcttgtatcatagatgtagtcatgtatgttacaatcggtatgtgtttgatcttataattttcttgtcctccatctggtttcaaccttacttcatgatcatcaagcaaaggcatcaactgcaaacgctgcagcgtggtgacaaactgtaagccttcgggaagagtcctcagccgtctgcagctatgaaagaggaggtattttaagctcggtaatgctccctcttcaagttctgtccattcctctagaaattcagaagccattgttagattttcaagttttggaaagccaccagccttgcaaaactctttccccatttgtaatccatcataagcatgccaaagacttaagactttcaagtttggtaggaactgaagtaccaaagccggattctccaaaagatgagagtaacctaatcttatgtttgtaagcctttccaatgagccaagccaacttggtatcttctccaaatacccttcaagcttaagcttttgtagagataaaggtggcgaaaatgattccataagaacaagtttttcagttagcctagatttttttgattctagtgacaagcttaaaaggccctgcatcttcataatagaagaagatagctcattgataacctcctcagttacatccattactccaagtcttctgagctctgtcaaattacctatttctcttgcaatttcaccattagggtctataccagtaagtgtcaa

SEQ ID NO: 184686 - DNA, 2801 bp, Cannabis indica
  modified_base (73)..(73): a, c, t, g, unknown or other
agagttggtaagttggttcattgggtgaaggccaaatatgaaaaggtgatacatctcaacacacctagaatanagtgagggcagttttggacagtgacagcgtccacaatatactctttaaagcaaatactgtgtgaggagattgtctaagaacaccaaaaccagaatcacacagcaaggaccacatgattgagcaacgcatgcttgatctccattttggggtgatacaatggttacatataatctcaacaggatttgacagtccctgcagtggaccatatttaggttggtagagaacagcctcaagttcccttctatttggtatcatgttttttacaattgcttctattgataaatgaggaattggtttaatctaggaatgaaaagtgttactttagcactgttgaacctttacatgttttccttttcaaccacaaagctacaaaacgacatccaaattatctgtgattttttcaatgtttattaaacattaggaaatggatgacaatatgcatgtatgcaaaatttcactgtagatccaagaaattgaatctgtgctacgtaaagaaattatgacaaatgaactcctaaaacaaagcaaaaatatcaatcctcatttccagagcttttctcttctttggggggtgcatactgtctgcaaagcttggaccttgtccaaggatccatgggagctctctggggtggttgtggtgttgctggtttagattgtctgagttcattctctctatcgataaacctacacaagcaaatgaatatgataattaaaaggcaagccaacctctctcttgcatcaatcaaaaacataacttaacaaatggccacatcaatcgataaatagaaattcaaaagatgtcatatgaacattcattttggtaaggtttacattccaaaaggagagtgcactacatagttaaaggcataagaaattgaaattctcacaagatcacaagtagttaaactgcgcaggggtaatacagttatacacacttacacttgcggaacaaaagtaagccattgagaacaaatatatatacatacaattatacacatatatacacttgcggaactatgctcttactcaatataagccattggggcagcatcaccaacacggatacgtgttcgaagcattcttgtgtatccacctgctctatccctgtagcataacaattaatcagtgtaagtaataattgttattatgataaagtgggatacaactgctgtgtgagtctgagatttacttatatcgataagccagttctgtaaatagcttgtgaatgacatcatctcctcgcacaaaagcagcagctcgtctagcagcacatagagagccctgtcatggtccaaatgaaaaaaatatatgtacatttagaaacttcaatacatacatgttaatatagacatcaatgaaaaaataaaactctatgctcaaaaaagcgtactgtcacattttcaaattcacacagaaatcacatccttaaagttggactgcggaacaatgctaaactagaatttcttttcctctttgactgttcgtgcttcgttttcctagatgacagtatcagtatattctaccacacgtccctcttccaaattttactacttccatagattgaaacccttaattccaccacttttcacctttaaatgaatataaaaataacataaaaaaccccttttttgcattttttttttctgaacatacatgcaacatttggtctagtgaaaaaatcacataccataaatataatctgtaaatcccactacgttttatacggaaacaagagcaaggtgtaacaacaatgataacttaggcagagaccagtaagaaactcaagcaaacacatagtacttcggaaaaaaaggagtttgcatccctttgaaagttcattgctccattcaactactagagctacttactattgcaatcctagtttctcctcaaaactcatttctcatccacacttccaggaacctacatccatcttccactccctcattcttgttccaacatccagaacatctgctcaaccaaattttaatttgtaaaccaaaaatacttttgcaaatcaagtgaggttctaatgcagaattgcaataaaattagtggatctttctgctaaggctgattcactaagaaaactctcaaagttcaataactttacaatgatttactttttaccaggagggaacatggaagcaagtatatattaagttcaaaagcataaatgaatttgagcatactataaatttagtggctgaaagcctagaatagttagctatgtcgcacctcctttccaagttgaaccatattatcagctagacgccgaacctctttagcctgcaaatgggtatagaaaacagatgagtccgaattcaacccttaataaactcaattcctgggtaaataaatgatcaacaagttcaagtgttacaacatttcaatgacatcaaaagaagcataaaaagatcagttcaacttaactgagatcacttcttcccagaaagaaaaacaaattcaaaagagactgtatttaaacaaaatcaccttgtactaatctaagaacccaaggaaaccccagattagattaagcagggtaattaaataaaaggttaccttaggcaacagtggtttcaaatgcgctcatgcttaaccagctgcgaaaccatggtcctaaacaatgcaaaagagagattatagaatgcgcaaataaatgagctgcacaagaattaaattgaaataggaaaccaaaatacctagagcatggacatccgactgg

SEQ ID NO: 184687 - DNA, 2975 bp, Cannabis indica
tctaacgttttccatagggtcttggtaagtatgttgaatggagcgcaaatatgatggaagaagatgcgaagagaaagctaaagactgcagaacttcaggccaaaaaaacgagattgagaatttggacaaattacattcctcctgctacaaactcaaaagcaattcacaaccagaatttcacaggaaaggtaggttgacaggccttttttacgttgtgcatttttccttaaacagtttaatttataagcaatttcattctgcccggtgtgtgcatgtatataattttttgatggtttgctcatcaggtggttgagattgttagtggggactgcgttattgttgcagatgacgcggttgaatttggaagtccttcagctgagcgacgagtgaatttgtctagtattaggtgtcctagaataggcaaccctcggagagatgaaaaacctgctccctatgctcgtgaagcaaaagaattcctgagaactcggattctgggaaaacaagtatgtctgttgcacaatacttgattattattattattattcaaattttccttcaaagccttctttttctttcaactattattatttcgataatgattataataagtaatacttgacactttttttttgttgtacttatttattatttcactttttattctggtgattttgagcattaattaatgttggtcatatgtgaaggtaaatgtacaaatggagtactctagaaaggttggcatgactgatgcgcctacagctgcagctggatctacagattccagagtaatggattttggatcgatctttctagtttctcctgttaaggctgagggagatgatatcccagtacaagccactactgccagccagccagctggggtgaatgttgctgagcttgtggttgggcgtggctttggaaccgttattaggcatcgagattttgaggaaaggtcaaatcattatgatgcccttctagctgcagaaacacgagcaattgctgggaagaaaggaattcactctgccaaggatcctccagtcatgcacgtaaccgatcttattgcggtgagagattaaactaatgcaaggatcatgtatttgttaatattttctctatataattctgtatctttcttttcctttttctataggcaccatcaaagaaatcgaaggactttctaccatccctacacagagctgggaggattcctgctgtggtgagtatgtatttagtggtcaccgtttcaaagtattactcccaaagcaaacatgcagcattgccttgtcactttctggtgttcgatgccctgctcgtaatgaaccatattcggaagaagcaattgctttaatgaggcggaaaataatgcagagagatgttgaggtatttctagttttcctttagactggtgaagttcccttgctttgctggttatctacagtattaattttttttttcttgtgcagattctagtggaaaatgtcgataagactggaactttcattggatctttgtgggagtctaaacacaatgtggcagttgcacttcttgaagctggactggccaaacttcaaaattcctttggcaatgacaggattattgaattccaccttcttgaaaaagctgagcaagttgccaaaaaacagaagctgaaagtaagaagcaaaccacaagtgcatataggtatctttttctgttaattttctaatcaatttttttgttacagatatgggagaattatgttgaaggggaggaagtctccaacggtgcagcagcagtagcagctgaaagtaaacaaaaggaagtcctaaaggtttgttgtagcaccatagctttagcaatttaagagcatgatgaattggttggtaataaacttgccttcttgattgtattttcaggtggtggttactgaagttttgggtggaggcatgttgtatgttcagacagttggggatcagaagcttgcacccattcaacaacagttggcggccttgaatattcaagaagctcctgtgattggagcttttaatcctaaaaagggggacatggttcttgcacagtttagtgcagatggttcttggaaccgagctatggtgagttgtgctctgtcttgatatcttggctcatccttttcttgtatttgtttcaaagttttatctctgctatttgtgtttgagttaacctttcaccccctttcgtttttcttccgttgtgtatgagtatatgattctgatttagaatttaccgcactgctctccttagtagtgctagcaaaaataatgctattgcctgtttcactttatcttaacagaaatttgacagttccaatgtatataggagaacttctagccttaagaaaaaactcagatcgtttgttttgtattcaacatttgtttcaataaaatcttcctggggccttatttttttttttgtaaagacacttttgctttcttttcgcttcataagatccgttgttagaatctacgggatttagatagcaattaggtgtagccttttgtcgctgtgacgcgtagaatgtatgatcttaaatatcagtttcatttcattttttaggctagatcaagtgtagggtttctttcttttcttttttttttttggtgtgtggttgtggggtgtcgggtgggagaataatggtttgggttcaaatcttcatgatgaaacccaaatattttgaatttaaggtacaggtgtatgttttttctccaagtaaattaatcatgtcttgacatatgatttatcgactcatgtatctcttgtgcttattgtttaacgttgaccttgaagattgtcaatggaccacgtggagctgttgaatctcttacggacaagttcgaagtgttctacattgactatggtaatcaagaggttgttacctacaagcaattacggcctgttgatgcttcagtgtctgctgcacctggccttgctcagctctgtaaccttgcctacatcaaagt

SEQ ID NO: 184688 - DNA, 9598 bp, Cannabis indica
ttttttttttttgagaagaaaatttatacttcaaaacacttaaaaggaaatactatttttatttatcaattaactatatttacttttaatttatatttaattcaaacattatttttttttattttttatatgtaatgtgtttaaaaaaaaaatctccagataaaagagtaacatggaaaatatcttaaagtgaccgcgctaaaattagtacaatattaaaaaaataaataaataaaaataatagactttaaaaaaaattataaataaaataaaagaatataagaagagtatagagtatatgtgtaccatttatctattttgacattccgaataattttttattttaattttttttataattttgtatgttataattattgagacatttgtaaaatttttaaaaatttagaataatttcaaaaagtttatttcacacgagtgtatcaaaagaaaatcacacgtgcaaaaaattttttataagatgtcttaaataactatagcatacataaccatgagaaaaaaatttactaaaaaaatattttaaataccaaaacaaataagggtgcattccttttaagagtgtgcattgtaaaaataactatagcatatactacatcatccaaaatagaagatctaatatgtaacttttgcaaaatagaaagtccaaaatagtatttagcctttaaataagcatgtaaaatagactatttgaactctatttttagcataaaaaattctctcaaatgtcaaaatagataaagaatttagtgggtgcattctaaaatttttctatatatttatccaattttttttatctaatatcaaaatcattgtttaagggagattctatgattttgattgtttaatgacacttattcaagaatccatgttctattttagtgttaaaataaacagcttttacttttatatcataaagaaaatatttttacacctttctttttcatctgaaagagaaacaatgagaatatcctagatcatagcttaggctgctctcattaaaggaataacatgttttcatttttttccaaaaaccaaccaaagtcttcttatagcaacacttctccttcaacctctcaccaaactcatcatcacttttctcaacctacccagaagccaaagaagaaaccttagaacatggattacacctctttagatcatgatctagccataagaagattttgtccagctaagagcgagaatgggaagaaatatagaatgaaattgagatgtgttcttctccaacaacaaatccaattaacaatggtacttatattcctcttttggaagcttggaaaatcgatgaattcgtcgatgagaacaacaaagaaagactcatcaccagaagatgatgaacaagtcattagttatgatttaagagaagaagaaggagaagcatcattatgaaagattggccttgaaaattagaattgtataatagataaaaaaatcacaatcaaatattacaaacaatagaaacaaagtatagagtaacatccaccaccaccaacaccaacaccaacaccaacaatgtcatcatcctgttggcaacttaacaaaattgctaccaaatcagagagaccaaaccacatttgggacctgttaacaagtatatatcatcaccatctttttgtatacaattgaatgaataaaatgatcatgtttgtaatcatcaaaccaagacataacaaacaaccatcaatcagctctcttatttaggtggcttctgagcttgtgctttggcttggctagctgcagcagtagacatttcgcgtaagcgacatgcgatttctgtgaaggatggcctcaccataggattaggtgcccagcactcctccatcagcgttctccattccgcatcacagtaacttggaatcgtcggcctcaatgtattattcactatacctcctgtgtgtgtgtgcaaacaataattttcgcaaatgattcaatagataaaaaccatgaagaacaatgcaccttgtgtgtatggaaagaaaaagataaaaacataccgataattgcaccataatgcatgttggcatagggctcctcactggtgagaatctcccataaaacaataccaaaggaaaagacatcaacctgtaatcaacaaggaccgaaaagatcatgattgagcaagagtaaaccggttatgattcaaagatcgcttcgcttcaaaagcttctcgaaaaattatgagagaaaagtatctctggtagtcatttaccttctcagaaaccttgttgctgctgccattcagcaactctggggccatccatggtaatgttccacgaacaccgccagaaaccagtgtatttcgttttatttttgaaagcccgaaatcaccaacctgggaagacaatacttctcattagttattcatgacaactaccaaatttaacattagtaacaccacaataccatcagaattaccttgcaaattggccttaaaggatctttcaagttcacaagcaagttgtcacacttcaaatcgaaatggacaatattctttgagtgtaaatattccattccaaatgctgcatccatagcgattataagacgcttgcggcgatcaagatacctatgaaaaaatttcgggttaaatgcctagaatctaacagaatattttcccatatcacaatatgagaaaaaagttaaaaataacaaaagaaagagatatatacatatgtatagtttacctatcttttcgaagtaaaacatgccttagagaaccatcaaccatgaactcggttacagtagctaacgtggcccctggtccatcttgcactacaccataaaacgctacaacatttggatggtgaagctttgaaagaatatcggcttctcgccagaattctacagtctgagaataacagtaattattatcaaccatagcatacaaaacaaaatatttagccatcacctgaatcaacaaattgcatgactatatcattgatatatgttctcatggagggtcattaccaatctctcttgttctgatgatcttccggtaaagcaactcttctttattctcttaatcgcaacgtctgttcccctccattttccatgatacacagtcccaaaggtacctgaacccaattccctaagctcttcaagatcttcatcctttatggcctgaaatgtaaaccaagaaagatgaatgaacagaataattctgacctcctcgccttactaacggttatcttagtcaataacaaactttcaatacagtgagtgaaccacagagtaacttctataatgtcaaagcattgaggccaagcataatacctgcaatgtgctaatatccagatcgcccagggaaggatctaacggaggtagaccggatgtcctggactgaaagtttccatcctatttccaagttatcgaaaaattatcagaaaagatacataagagatgcacaaacgataaaatgatatagttttacttaaaatacctcatatcccgactcctgaactctaaggttttccatcatacgatcaaattgcatgctttcggtgtcctttgcttgggagtgttcataatttggatgcagacttgaatcgccttcagttggtccagataattcgttatggttgatttcaccaaattttggttgtggagcaacacggtgcggtgaaattccttcagcagatacaaccataggaggctctccttcatcttttcttagtgcagatgcaaaatgaagatcctggtccataagagaaaagtctttctgatcaaatccttcttgtgccaacttctgaaaatatgaccagcgcttcggttcatgattttccatgttcaaactaacaccaggcccgtcgtgtgcatcaaatcaacaccaggtgaatctttagacagtattgctttggagaaatgtcagaaagcaaatcacgaggaaatcggtcttcaatgtcataaggatatctccctgcacttcggttgaagatggaaaattttcggtggccacatgaaagtcatgccctggatgattgtttgaaggatcaacatgttggtccacagaaggtgtctggtttccatctggatatgcagatgttgcttgttgtggggtttcatcagttacgagtttcttctgctcatttctcaaggcaactgcttcttggtcagacttgacaatgttgtcctcattaacatcttctacattgttcggtattgcctgcttcgtcgactcaccatccacattttgcaaaagctcagcattcatttgacaaaccgaatcagcaaactctttatactgttcaagttgggtaagtccatcatcaacagtatgagtatccacaggcaatggtgttgatgttaagaaggaaacttcagcctgaggaggtagctttccatctttctgcgaattttcagaatcattcgtaattgaattctgctgggtagtagtatcagactgttgttgaggcatgacaaattgggaaccatacgagtcatccgactttgataatctactcagcaaccccaactgctcccttggtattttctccgaatagaaaactctctgaggaagtgctggaggttcgtggtaggtctggtcgcttacactcgaatcagacctaacataaccatgagactgatgatcatcctcgttgaatttaggcaccggaggtagatttcctgaatcaatcataggagaaatattgttaggttcctggcaccttccaacgttttttgaagacaacgagcgttgaccttcttccaatgaagtaactgtatgtgatgcatcttcctttggaatatattcagagttactattttgctgttgcatcgaaacatcagattttacattcgcatgagttacaggcacctccaaattgtctactgtagagccaccgagtaactgtcccgttgaatatccttgttgaccacccatcatcccatagaaaggcatcgaagcagggacttctacaaaaggggcgtaactagatgcaacttggctgttgtacaatggattaatcatattctctccatgatgcatcatctcgccatgataaaaatgagggttattttcgtaagcatttgaggaaactggcggtataactggttctgaagattggattatcgacgatgaaacaaaattgttattcaaaccaacattgctcacaccagctgggccaaccactgctgccatgttcttctctttctcaacacttcgtctttctaacgcacctaaattgtttgttgatgagcttgtaaatccatgcatactcgagctttttcttgaactcaggtccatgccattgacagcaactacatattgaacctcggaatcaccatccatgctattgataccaaactgagcatcttccaaatcattcatagagaataaaaatattctaagcttttgtgaaccttctctacttcctaaatcactgcattcctccatcatgttctgcagatcctcatcacaagacaccgaaaccagtgcatcaagatcttccccgggtagctgatacttaatgatgctagtttggttataaatcgaaaagattttctgagttagttcctgccaagaaatatcttttctgatacggacaatgcgtgtttccccaccaacatatctaagcttcccatcactaggccgaggtagaactttaccaccaaagctacaaagaaccttcatcttcgaagaagagctatcagaggctccagaagaagcatagccatgactaactcctcgattactctcatagcccgatgacatccgttgtactgactgagtcgacgcataaatactcctatcttcatgtgctgatgaattttttcgatcatattgtgtcgggcctttttcagttgcattaagcatcgaaatatctgacccactttcagaccccgtatggctgatacctaacatccctttgagttccatataacccgaaacatccccaacagtattcggaagcaaaggtttccattgattcactcgatcacgaataaattccagagcaaattcctcacccgtctgtaaggaataattaagcccgggtttaacttctgtattcggtgttgggactctcatactaccgcgtatactgccatgagtttcaggcataaatgattgagatgaggactgatatgactcatttccgggttcaatggaattgtactgatactgcttatttgttcttgattgatccattataacattctttgaaactatatctgtttctctaaaattaatcaagaataataaaaagaacaggacgccatgaacaaaccatctaaacaaaccaaatttccatcggcagttatagcctggaacacaaaacataacaccttaataagacattgattcatagaaatataagaccaaaacaaaaaaaatataaattctcatatttggtatggaaagagaaattgtatagtaaaacactcaattcaacaaaaatttccatatcaaacatgaaaatggatttattcttttcttctcaacattttccttaccttgccaaaatccaacttccaaacatagcctaaatgaagttgaataaatactttcaattcataccaacacttcccaataagacttacatttcagattattataacatctgaactgatttaatccaggaaaaatcaatacatatatgtatgacaaacaaaaactaggtcattatatgatattaaaccacaagaaagacaaaaaaaacctcagcacagatacccaacaaacagtattttctccagagttgtaagtgcatgttgaatagggttaaaaatctagttacttaaaaacaacatatgtaagataaataataatttctgacaaatggtaaaaaatataaaaataatcagaaaatcctcaccttcatcttgagcttagttctacaccagaacaaccaaatacataaatacattcaaaaacaaatggtgaactagttttataaccctatttttttttctcagccaaaagcccagaaattcattaaagcttagttgtttagcatcaaaacaaaaactcaaagagattaaaccagaaaaacaggaaaccccatatgataactagatcaagtcaataaataaatgataagaaaaacccagatacctgatgaaataaaaatgctttcttggttgaaagactctatctttatgtcagagtaaagatgaagaaacgaaaaacccacaacaaggagagaataataagcagattaagttgaaacccatctgaaaaaacacatgtttgaagccaaatttccctcactttcaattccaaaatttgtttccttttcttaaagacaacgaaaagacggcttaagggattgagctctcttctcttttcgttttcttatatatttctatattctctttctctttctttcttcctcacactgctaaatactgccactgtcccaaaattaatactttaatttattttttttgtaagtcaaaataaaattaaaggtgcaatttttattccctttttaccctttctttattgggttatttacgtaattgccattgaagcgtgatatgtactcgttgactgaccaacgctccactcctctcaagttaagcttttatgggtgagtcctcatcattcttatggtgtactctctcggcaattttttcagtctaatttttgatgaattgttaaattattttgaaaattttaaataatttacaatatataaaataaaattaaaatatacttcatttcatttgtgacctttttttataagagtaggtggtgttaacagccaactcatcactcggacaaaaaataagttaagttagttgtcttgactgtctcttactttcaatttgtaccaatggctatataagggtttgtcaaaataattgtaaagggtaatccaattattaaaacatagagagtttaagaagtgtcgagggtgtttgagctctaaggattaagtgtgttgattgtaaagttcttggacaaatttagtattgttccattgaaactattcctacaatggactaaatggggattgcaaagcttttggtggaaccacttaaaattttggtgtttatcattttttaatttattagttttcaatctttattggtttgaattgtttatgttagttgttgtgtaattaaatcttgatgtttggttgttgttcaaaaaaaaatctacatgtttgtttatggtttttcaccgtagattggtaacttaatttttaaaattataacatacacgattacgaaaagaaattaaatatgttaagaaacttttttaagtatcaaaatagttaagaatttacggaaatattgtttttgggttgaacattaataatacttacaatgctattatataataggatacttttcttgttataaatatagcatgtacattataattatttattatattttaaaattttttgtaataattataaatttataattgaaatactttattctatgtgagtctttatatgtatgtgtgataaaaaaatgtgataatttgcaagatatatcctaaatatatataaataatatatacattcttatattatatttatacataaggtatatatattttttgttgaagagtgtaagaatacacctattttttaggtagaccttaattagaagcacctaaactttacttttcatcaattgtgtcattatttattaatatcctagttgaaaagtttagaggtaaggagcctatggactctacacatagtttcaaatttaatattacaattttttcttttaattaatacaaaaattaaagttaattttaattaagagttcaaaattatatatattaatgtgtaattgatattaattattaggtaaccacattaactatgtattaaaataaatttatatacaactgtgaatgtgttcaacattactcaactatctttgaagataaaagaatgatatgtaatttattttaactattaattttttatggcaattagtaattattaataatgtcaatataatcatattatttaagattgtatagttttttaatgaaaaatgaggattaagctcattttttaaggaaatataatagcaatacaattgtaattatattttatcatgcattacatcataattgttattattattatttacatgatcaaattgtgctgtaattattagattaatcaataagcaataataagaatagagtaggtgttgcatttatggtgtgtgtggaattgtgcaaaatattaatttttcttcaaatgtaagagacaaatcaataatataacatggggtcatgtgacatcctactatgagagatccaatcctatttattaattaattaattaaatgaataaataaaaagaaatattagttttgaccttctaaatatttttaatcaacgtatatatctctacaaaaaaaacacaatttatatacataccctttaaaacttttagagaaaaaaaaagtgtggtcggtctttttataaatttatttaatttagtttgattatatttggtaagggaaatttgattttctatacttagaaaatcaaaaaaaaatttccctaaaccaaaaatttaaaacctaaaaaaactattcttttttttttcaaaaccccaaaaataccccccctcacaatattctc

SEQ ID NO: 184689 - DNA, 4161 bp, Cannabis indica
ttttaacggacggaaaattcaaaagatacaataatgcgtaagtcatagtttaagggaaaaaaacctaaatagcctacaaatttaaacaatagagcaacttttgacttgtttagagagagacctaattgagtgaaaaattctgtataataatcacatagttcttccttcaatagaaagaaataaaaattaaagatatgaatataaagaaaggcatctgaagtcgattttacctgaagaaacaaatctgtatgagtctttccttcatacaaaattgattcagctttgactccaaggctctgaagtgtttcagcaaatttcttgctgcacaaaaaaagatgttagctttgtcaaatatatatttatatatacatatatatgttagccaaaacttgatcaaaccaatgaacttatatgttaataaaagaaagtgaattattagccataaaaataataaaatggtgagggcttgatctcagagaagactttacctggaatctgatggtatagaataatcagctgtaccatggaacaaaataatgggaggcaggagagacaatgcatttttaatgtttgggtcctgtaccatcacttctggagaaaaccgtctaagagattgctctccttccattatactgtaaaaatgtttaggaggtagacataaaattaaaaccaaatttttgttaaggaaaaaagtataatgcacttcatcttcaataagatgaagaagtacgggtaccttagaaagatggaacggtagagacctcgagtgtggaagtgatctattaagtcaaacaaattatacctgtttttgtccaaattgccgtacatactgttaaatatgtttcttaaaagaagttatcatacatataaaatagtcaaaagttttaaaacagaattacagtacagaaagggaaaaagaaaaaagcagaatgaccatttgcaaaactttttgcttacatgattgccatactcgaatttttaatcaaacaagatgataaactctaccagtgacttatccaaaactattcgagtggcatagaacattgagtttttcatttaaccagttcgtagaccatattaataaaaatctaatcctaaagatggatgtgcagcgaatgtgaaacaccgccaaattgtctttaggatggggcagctggggttgttgcccaaggcccctcagcccaagaggcctcccaacctctttgttttttagagaaattttttaacattagtccccaaggctcccaaaaaacttttgctaaaaaaactgttatggcctccaaaaaatcggattgatcatatatctcatggtgggcgaaaactgtaaacaaatatttacccgccagataaaccaaagtaagcctttaactgggagacactccaagaagtactctctccttcaccattctccttgattgcttgctccaggagcgtacaagctgcaatatgtgcaccagctgattgtcccattagataaatcctatacaagaaaaacattagattattatataatttgtaatatgtcatgaatgaagaacatgtgtatatttatatataaatgattgttacctattaggatcacctccatattctgcaatatgattgcacagatatgagataccttcagaagcatctgcaaccatatcactaatggttccttgagggaaatttctacatgaagatttcaataacaaaagttagcatcacaggtagtcagcgtccacaatgggaattttatttgtacactacataaacatttgaaaagaatatataacctgtaatctatgcacgccacaataatgtctctttctgataactgttgtcccagaagagaaccccatgctttatagctgcattagccaaaaaagagatgttaagacaagtaattatgcaactgagactgttttgaattggcagacccagctgcttgtttcctccggtcatctacatcttttatttttggtatctaaaactttccatcaagtttgaactgatcaccaaaaccagatgccagcatacattctttcatattttttagttacaaaaatgccaacattaatgttacagaagagctaacacacccaataatccaggctccaccagttacaaacgcaatgactggttttggcccatcactatttttaggtagatacagatccagcctgcaaaacaactgtcacctattaatgccacaaatccagaaattaaaagattcagtacatcaaaatgcacaaggaaacagagtttgttctacctatttcttggtttatcgccgtaaacaatacttctgcgtatctgactggagaagaaataattataaccaactgaaatgaaaaagcatgctagttactctcccatacattaattgttctgagttctacttagataacaatatttataaactgacaactataaatgttgcggaccttgacaaaaaccaggtataagtaacaatgcataacaaccaagtgcaagaaatcttgtcatccatctgtagcctaccctgaatataagaaaaatggttaggaaccatctaacaatgaagagggaggaaaaaaaaacttaaaagaagctctagaagtacatattgaagttgctaagaaaaaattatcaacatagaacagaattgtacctcttgaaactgttcaattttatcatttttcatggatggaatgaattatcactatggttatataatatgccagagttctaatataaactaatccaacaatttgcacttctatatatttatctttctgtcatctatgttgttttccacctaagatctattaccctctctaatttaccatcaacttaatagatcacaccccaacaagttgaaatttagctaaacacatatttaatcaagatactctaacaatgtccatcagtaccattctatatgaagttgattgtattgtgtgccttccattcaacatgatttgaaaagaaaaagaaagaagtgtactcctcagaggcaattatgacaaacattaaacaaagtctaactacatctccctcctaaattcttaatatgatccagttagaactatgtcttccattcatcatcatacaactaattgtcaatggaaaaaagacaaggccaattttgcagcttaattaccacattaatcagataaacaaactacaaatgaagttactcatacaaacagatcaaaatcgcaaaactgggtataacataaaaggaaacaaaaagcacaaaccacaaagcgaaaacaaaaaatggcaattaaaatctgattgatgaaaacttactcacccaagatatctcaaaagcttcaaacagagacgagtgagcaagaacgtctcggccgcggcgtggcggacatcacgccccaaagatcgacggctttcgacgtcagataacgaggacatagaatcttcactattggttcgccgtcgccggtgctgataagacgtcttagccgttgttatcttgggaagaagaggcttgatgggcttgaaggaggctttttcactttcaaatgacgaagaaatgagaagcctcgcagttgggtcatcttcaacgttgagcaacattgtgtctacggaagatgaacaaccaggcgagattgaagaagggttcgattcagaaaatggataggaagaagacaattggtgctgggttatgggcaaaatttgttgggacgacatttttgtagacaaagccagatgctttcgttggcttcaatccaaaaatgtgttgtttttttggaatcgaaacaaaaacaacacaactgtattaacccctattcttatggtttgttttggtgggtaatgggtattagataatagattaaagggaaagcctttgaatttggcttaaactttagctcacctcagatcaattcgcaaagaaagattcatggatactctctatttttgtcatacgaacctttttctgctttcattttctttttctcaaaattttacagactgagaaacaaaaggtggctatcttctattggtcgtatggaagccgttggatttgtccaactggaattttatgattggttcgttcaaaccttgttacccaacaagtatagagttggtcttcttttcggaaaaaaatcacatgtcgccatattctgtccaatctctgtcccaacgaattatattttgccaacggtacatttaaga

SEQ ID NO: 184690 - DNA, 8204 bp, Cannabis indica
tcatctctggtgaacatacagcaccagttgtacatgcattatttcttgggctggattctcaggctacacgtcaatttaaggcagtgactggtgatagtaagggtttggttttattacatgcctcgtcagcaatatctttgtttagtaggttcaatgtcaaaacacaggtaagttttttatacttaacctagaaattaatctgtgcacttagatttctttttatatgctagttgatgtacatattcacatataaatcctcagagtttgatctttgctatattgattgagctagtgtcttcttgatggacaaacaacgggaacagtgctatcagcttcaccactcttctttgatgaatcttttggaggcgcttcactgtcctctcagggaaatgcagtgggtcctgctagcagcatcggcagcatgatgggtggtgtagttggtggggatgcaggttggaaactctttaatgaaggctcttctatggtagaagaaggtgttgtcgtctttgtcacctatcaaactgctctggtggtatgaagctttcagatgattggatatattacgtgcatcttttcttcggtgaattcctgtatgcttctttgtgaatattcacagtataataatgctgaatctttgttgcaggtgagacttagtccaactttggaggtctattcacaactttctaggccagatggagctcgggaaggttccatgccttacactgcctggaaatgcacaaaacaaccatacagttcgtctactggtatgttctgactgaatgtgtttaattttagttgacagccttttaatatatatgtttgctgcagagaattcacctactgaagtttcagaaaaagtttcactgcttgcgattgcttgggatcgaaaggttctggtagcaaagctggttaagtcagagctaaaggtatatggcacgtggtctcttgaaagtgcagctataggcgtggcttggttggatgatcaggtacttgtaaattaagctcattctatcttttgtcatgtcgggattccatctaattctatatgtgtttgaactctcttcatgtcttaagttctattcagtacaagtataactgagggttttgtgtctatccagatgctagtggttctgactgtgactggacaactatgtttgtttgcaaacgatggaactgtaattcatcaaactagttttgctgtagatggttctctcgggaatgactttgtttgttaccatactcacttcatgaatatctttggaaatcctgaaaaatcttatcacaattgcttagccataaggggagcttctatctacatactcggcccatcacatctaattgtgtgccgccttctgccttggaaggaacgaattcaggttttacggaaagcaggtgattggatgggtgctttgaacatggcaatgacaatttatgatggtgaagcacatggtgttgttgaccttcctaggaccttggatgctgtacagaaggccattatgccttttctggtagagttgcttctttcatatgtagaagaagtattttcctatatttcagtggcattctgcaaccaaattgaaaagatggatctactggatgatcccagtagcataagtagttctgttcacaatgaaataaaagagcaatatacacgtgttggtggagttgcagttgaattctgtgtacatatcaagagaacagagatcctatttgatgaaattttctccaagtttgttgctgttcaacaaaaaggtattttagtacgctcttgcattaagttctttcataacaatggcgtagattaagttgaattctacatgtctgaattagtgattatgtcattagccgcaaaaatgcagtcattctgtgttagaatatgtagaggtaactctgctgtcacaaaaagttattagaaggtaggctcaatgtcaaataaaatgttctggcatatttctaattaaattgggatactctttatatgattctcattgaatcttaaatccagtactgcaacgacacatactccttcatttactggcctgtatagtctggaacatattcttcttcagtgcatgattcatatcattggagttttgttactagtaagcagtgtaactgagtcagtattccacgtgtttggtttaggaaaagaaaatgtcatttgttcgagtggtttttccttttagtataccaacctgctaattcattttttattaaaggagatgcagttcataacatgctactatatgcactgcattgttttatttgactgccaatgaatgtttcttatttgtctgatttcttttccaatatcactgtagacacatttttggagctgctggagccatatatattaagggacatgcttggttctctacctccagaggtatagcatttcaagtattttggctattttacgacaagctatttgtttgtactatatttttattttttttttgatctttttccaagattatgcaagcactggtagaacattatagcagcaaagggtggttacagagagttgaacagtgcgtccttcacatggatatttcttcattggattttaaccaggtcaatacctttgagatctttgctgaaagttttcttatattgaatggagttgttctgttatatttaacaccttgacccaggaacttgtactttacttttttttttataggttgtacggttatgtcgggagcatggactttatggtgcactgttttatctcttcaataaaggattgaaagatttcagggcacctttagaggagctttttgcggttttacaaaatactcacagggaagccaattctgcccttgggtatgttcttaacatcttcagtccttaaattgcttgtatgttttagattaaatttaccaataaaaaatgtgcttctgttccatcttttttattgatgtagttggatattatgataatttactggagccatttaatctgaagtttctttctttttttttttttccattttttgtttcgatttttggcaacaggtatcgaatgctagtttatctgaagtactgtttttcaggccttgcttttccgccaggtatgaccttgatgtattcctattagtggaagcataaagcatatttctatttgtatcttcttggagttaaagattctacaatgctgtggtgaaagattaatctcattattctctattgataattacattaaaaaaattctatgcaggacatggtaaccttcctccttcaggcttgcaatctgttagagaagaactgctgcaattttgttggagtcatctgatactcgaaattcaagagttggtacaagattaacatctggagtgccatatctgaacctttatttcctcttagaaatggatatcgaagctaccctagatgtgctgagatgtgctttcgaagaagataaaattccacaacctgagctttctcctcataatatggctgatactggcatgaacacgaaggaagataacattttaacggaaagtcaaaatttattaatacagcgtacaatagatgttctcattccatttcttgaaaaaggcatttcacaggcagatagaacttctggtgatgatgaaggatcagcagaagagtggccgtcagcaaaagaaatatgtcatttgtttgagtttatagcacattatgttgcgtgtggaagagctaaagtctcaaaaagagtcctcgatcagattttggagtatttaacactagagaatctgcaatcaagtgcttcttcacatagcagaatctcaaaacaaagagagaggcaggtacttgcgcttctgaaggtagttccagagactgattgggatgcctctagtgtgctgcaactatgtgagaaagcatgttttcaccaggtacgtttactcttttgaagtttgctagtaggactgtagacttgcagtattggacaaaatcaactcacactatcaggcactattgccatcttaggtttgtggtctaattcataccatcaggcatcagtatctttctgctttggatagctacacgaaagatgtagatgagcccattcatgcattctcttttatcaacaaaatcttattagagctcgacggaaacgaccgtgacgctttccgatcaggcctcatttgtcgtattcctgagctaattaacttaaacaggtataatgcttaactcttaatcttaggtctatgttaccatttaaaatttttgtgctctctttctatcctgaacttacctctagcatttctgataatttcagggagggtactatcttcttggttattgaccatttgaatgatgaaggttcacatatattatctgaacttcgtgctcattcaaaaagcctttttctttatttgaaaacagtcatcgaaattcagttatctggcaccctgaactttgattatttgagaaatgatgacataacgagtatgaaggataaatctgaagaactgacagcttacttggaaagaatctctgattttcccaagattctgcgcagtaatcctgtacacgtgacagatgatatgattgaactatatcttgaggtgagcacacacattactatggttaaaaaaagcatggattttttttatctatgtgtctactgtttccttattttttattaatagaatatgtttctatcatatggttgctttaataaggtacatggttgataactctaggactcatttcatcagcttcacagacaagaatttagtcaaacaatcatatttccattactatgggcatgtccctacacctcctgtattgttcaaatgattaacacatgtctgtttctttttcaaaaagaaaaaatgtttgggtagccaatttggttcttctatatatgcctatcattttgggaccacatattatggtgacaagttgatctaggatttacagattttttcgtggtgttatttttcttccactatttttttttttggcttgtaacttacagttggtgctacctttggttttaaagtttttatttatttatttgtttttttaatttttttttttttgtcagttattgtgtcagtatgaacctgattcagttctcaagttcctagagacttttgatagctaccgcgtggatcattgtttacacctatgccaggaacatggaattatagatgctgcatcattcttattagaaagggttggtgatgctggcagtgctctattacttacactttccagccttgacaacaagtttgccaagcttgcagatgctatgggaagtggggctgctcgtaaacagcatttcagtactgtcaaaaaattgggagaggtctgttgatatgatattcagtgagagtatgtcattaagtttctctactggcaataacaattttatgtatgcttacattggtgttttgttttatatgtgatctctcacaggtgaaagaaatagaaaatatattgcgtgcctgtattggattgtgccaaaggaacacccctcgtttgaatcctgaagaagcagagatactatggttcagattactagactcgtaagttcactgccagtgtggaatcttctgttttgcttgtcaaattgaatatctttttctatatatctctcgtggcattctacaatttccacaagtacaggacgtttctatggtgaagaataaccataaatttcaatacagattttgtgagcctttgatgggttcatttggtgatggtggacttcttgaaggaggaaatcaaaatagaatattagctcagacatccgacgcagataattttgaagaggcgtccatcatcaattggagaattccaagatcccacaaaggtgctcatctcttgaaaaaattgttctctcagttcgttaaggagattgttgagggcatgataggatatgttcgacttccaaacatcatgtccaaacttctctctgataatggtagccaggaatttggtgactttaaactcacaatactgggaatgcttggaacatatggcttcgaaagaagaattctggtattttcacttctttttctttttccttatgtatattatgttctactgtgtctatttacctggattctgtgacatgcaacatgacttcttgtaattatcacatatttaagtcaatttgtcctttttttttaccctctgtttttatacacttctctcttataatttttcagttcgttttcttaatattatatactttgatgctatgcaggataccgccaaatccctgatagaagatgacacattctataccatgagcttactcaagaaaggagcatctcatgggtatgcccctcgtagtccaatttgctgtatatgcagtggtgttcttgccaagaacccttctagctcaagcattcgggttttcatttgcggtcatgctactcatgctcagtgtgagcttttggagaacggagcatctggtgctggttcctcatccggatgccctgtctgcatgcctaacaagaaatcacagaaatcaagaaataaatcagtccttgtagagaaaggtctagtaaagaagtcttcaacgagaccccaacaaacacacggaacaactgtttacccacacgaccatgatttgtcagactatgctaacgggcttcagcaagtctcacgggtatgaagtaatgtttagcttgttattgttactagtattgacatttctgttttatattcaaatttcgtgttactattcttgaatgaaatttcgtgttgggtgctgcagtttgagatgttgaacatgttacaaaaagagcaaagatttgttcaggtagagaatgtacctcagttgaggcttgccccaccagctgtatatcatgaaaaggtaaagaaaggaactgatattctaacaggagaaagtagcagtggtctgtcgagaacagaaaaacagaacagcagaagtaagccactaaaagatctaaaacttaaaggctcgtctcttagatttcccttgaaatcgaatatatttggtgagtttttgttcatagtgtgatctttttaactatgtgcttcatttattatgtcaataatcccttaaaagtaagtaaagtaacatttgtgatgttgatataggcaaggagaaaatcagcaagaggtgatgcattgtgtagatatatactaacaagtaacgatacaattctgggttcggtctgggccttgggccgtccatgatgtcaaatagttgaggatcaattttcagtaaagcccatgttggcttgagggagatttttttttacatttaatttctgtatatatttatgtagaaatcttgcttgcatttttttccctgatttatagttgcctacagcctactgtatatgatcaagtaggaaattttgttaaaattatgaataaaaacaaataatttgacgtggaaaaaaagtgtgatttgttgtttcacttttcacctgtattttccgagccacttgttatattgtagattgtagttacaaaacgtaattaaagcatttaaatcttgttacgaaaaaaatcttattaccagtttgattgcgtcctcaaaatttggaggtgttcaataaatttctttcttaattgttatattttttgcaaaaaaaaaaaagtgaaaattaataatattaaaaattgcagttattaggaggggggtcaattcatatactatttattttattttatttttttaattttaacgatttgtgttgttcctagttattgtataagttgcaatgtagatttaggttattctgttggttactttgtatttcgtataaatgcaaaatatatatatatattttgaaatataataaaaaaaaaaatccttttgaacatttttaacttatcttccgttaagattaaaaaaacagaaagaagttagttctagcttcgttattttgattgggttaaacaaaaaggcttaataaaaagaatgtcttatgtttttgtcttaggttttctctataattttttccttgttgctaaatacgtttgacttctgttattttgaggtcatatctaatattcagagtttgccacaatttggtactactctcacagctcgtactgaaacagtgctttaccctaagatgtccagtcaacttatgtcagttttgggtacaggtacccttttattgaaggtcgttcgagctttccctaggagtatggcatgggttacttcagtgtcgtagcgccttggtactcgaatattggatcaaggcattttctctaccccttctt

SEQ ID NO: 184691 - DNA, 4426 bp, Cannabis indica
tttttttgctgaatagatgtgctttattaataagagtaagttgttaagatggatagattataattccaaacacacaccaaccttacaaattctttacaaacattcagcaaaaaagcaaattctttacaaacttcaatgtcccggatgaagttgtaaatatgttagtattgattaatgaaggctctttcttgattaagaaaaaacaaaaaaaaacaacttaatcatactattattaaaaaacaactgaattatttatcaaaataatattaattattttagtttattgagaaaaaaaatcttgagagtttaaaataggatcatcttagttacttgagaagaaccaacacaaagaatctagaaaagtttaaggaaataagatcaaagaaaattatattagttaagatcttgtggaaaagcttgggaattagaagaggagagctagttggaattatctggtaagttatttcaagaatgaaatttcctagaggttggattgtaaaatccctctcggtgcccttttctctcttgctctcgccctatgtactaacattttctcttgtgttcgcccccacccttctttctctcaccctctccacctcaccctttttttcatccccgccttgccctttctttcatcgtcacccctctcaccctctcccccacacttttttttttctctcaccttcgcacggtgcacttgccctcttctcctgggaagacaatggtcagcttacctttctcagggagagagtaatgtgtctaggggcagaattcattcacatttcttataatatatctctctctctctatatatatatatatatataatatgtgtgcgcgccatagatccacttcaataaatgagaaaaattaaagacaaatcaaacgagagaatgtttaaaatctttgtttttgtttagtagaattataatataaagccaaatggagcagatcaccatttccattcacaaggcaaactaaaatctaagaagcaacaagtagtagaagaaaaatgtcaggttcgatacatataggaaattcacagtaaatttactttcataccaaaatatttcatagtgaagaaggagacctccgtacacaaatataccaaatcagcatgtaattttgtgaagggaaaaaaatcataatcacctggaatagccagagggtggataaccagggggcggatattgagctggaggataccctggagctggataaccttgagcctgttgagcaggagggtaagcataagctggttgatgtgcatatccaaccgagggaggaatttgctgatcgattcgagacatttgctgaacaggaggaactgccatcactggctgaggcccaaacttctcatctcttttgtccatttcaaccttgtgttgcgtctgcaaataatcaaggcagattgttatatagtgatctctcatataagaaattgtgtacattgctaggcataaaacaaattaatagagcgtggattgtgcctcttacctgcatgcatgcacacaccctacattgaaggacacaacaatgaaacagttagttaaacccagcagaactgagatgtttcagaggaatataagaaggaagtcttacgtgcagtagaccatctcagccaaacaagacaacaattgagaagcctcagaaatttcttcacttccaacaatcattgcaactatggagaaaatgcacgcaacttgctgtaggcagaacataaaaccctggagacagtagataatatattaaactgcatcatcttgaattgcttcatttaaaataaaatggacttaaagaatcaacatagttgcaagaatgagagagcagcgagagagcatacaatgatgcaattatcacattgtgtagtttgtatgttgaactcgtcttgcaacaaaaagcgtgttgaggccacagaatttccaaagcagagaacaacctggagatcatcaagctctgtataaatgctactctgccattttatggcctaaagataaaataaagtaaaataaaaaatattttcatttatgttatctttctatacatatatcttaaagtggtaaagcaaaagttttcgtatcacccaaagtttcttaataattcatctattataacttattcaaaaaaaaataattcatctattatatatatgataccaatacaaaaaactaacaaaacattaggaaaaacaacagaacgaaaaattttggttcattttcatattgtttttatataaagcttccaaatacttacctcagttgccaggcaaaattctggacatctactttctccacaccttccactgcaaggcatataacctgcgcagcatacatatctaagaaaaagaagttaaaaaaaacattaattccagggaacactcacatcagtagaaaagggtttattcgataagtaagagcgttatcaattaccttgacatgtcattgtatagggctcgtttccttagcaaatatgatacacaaggagcactagagaaaaagaaaaagattaaatgtaaacaaaggacagaaaatctatcataagtaaatagttttcatatgtttttcggaagttagaactcttgcctatgaaatttaattattatgcttaagtgtttaagttcatatgttgtgtgaggtaactaggagtatagaacccaaggcacattctcataatgaaagatatgattagatttaaaaaaaaagggcggaaaatctatcataactaaatagttttcacatgttttttggtagttagtactcttgcctataaaatttaattattatgctcaagtatttatgttcatatgtgtatgtatgaggtaactgggagtatagaacccaaggcacaatctcataatgagagaaacaatattagatgtaaaaaaaactatcataattaaatatccttcatgtgttttgtggaagttataactcttgcctacgaagtttagttattatgatttagtgtttatgctcatgtgtatgcgcgatataattaggagtacagagcccaaggcacattctctgattctcataatgaaatgcatgagaaaatcaaaactttataaatacctacacaattggctagtgcctctaaggacattaaagagacaaaatactacaaccccagaagaaacccaatttaatgtttagataagcattagcctgaaaattacagggctttccaagctaaattttaagggaattaagcacgactctttcaactaagacaatgccaccaaagatatctaaccagcaaaacccaaaatctaaacagaatgataaagattaagattcaacaaccatagtaatcaaaaaaagaaaaaaaaaagattcaacaacaataagcttaataaataaactaatacatgcataataatatagattaagattaaattattaaaatttacaaaaacaatgaaatttacaaccaaaaaatatatgtgtgtgtgtgtaatcaaaaactcgttactactgccacttatagctgagcctgtggagcaaatgtgctcttggctgtcaaaaccagcccttacaaataacctcggatttaagggctaagggggttccagatttccaatgtctatcacttcacactttacatttaacagtttaaagatgaagagcagcaaattaatttcccaaaatcattgcgaaatccgcatcccggtacaatgccaaatcatttcatagtttctccaataagaaaaccatcacaaggaagaaattccacaaaaattcacattgaaattaaacataatgaatgaaagtactcagaagcagaacttatagctacaaaaacatcagattacacgatttaattatgaatcatcaaagtcaacgctcttgacgggaagtcaacagccccaaataaaatttaaaaatgcgaaagataaaaaaaagcataaagatcttgaattaaataacaaaaacactgtaagaagaatggtggagaaattagaactaggacagatctagaaaatccttaccaaaacaaggaaaggcaacaatctgccaaaagaaaaacacacattcaaagccaattagatacaatataaatatagagaacgaagataaacataataattttgagagagatagagagagagagagagaaagtacaaggagtatcggcctgaatagtgttcatgaggctagtgtgccagagatttcgataattctggcgaagttgcatcttctcaaggtgctctcgattcgccatcacaggtgagttgaactgaactctctctctctctgtgaatggtctttctccggcgaagtcaggggacgaacaaactctatgattattatgaaaatgatattagacaaataaatttctcctatttctagggcttaattgaaagaaagaattttcccagaagccaaacagaccttacgaaaattaaaaggccgaaacttcgagattg

SEQ ID NO: 184692 - DNA, 713 bp, Cannabis indica
atccacttgtaaacccctttttccaggataaggaaagggcagtaagtagagaagaagggattgctcttgctcaagagcacaaaagtttgtttcttgaatgtagtgctaaaacaagggagaatgttgaacaatgctttaaagaacttgtgttgaaggtacatctttcctcatctgatcttatgactcttatttcacataagcaaattgttcgattaattgtcagatcttgcttcacctggattatgacttggttatcatcttagtatggaaggctgctcacattagagaagaaagttgtttttgtaattctaaattagttgcacaaatttcctgaactaacaacttgcattacatgtccttgtgtacaaactattgtaccattctaaatttctaatcctgtcataaaaaatgtttcgcttttagtatctgttgggaagaaactagagtcaatgagtcgatgcagccatatcttgtgtttacatatttgttgaattgtagaaatgtgtctggtgacagagttagttttggtttacagatactggaagtaccaagtttactggaaaatggatccgcagtagttaagagaaacacaatgaagcagaagcaagcacacagttcatctcgaggcggtggtggttgctgccttaactaaattgctcaaacaacaccttagtatacacaaaactagacctcctacaattgtaaaacaagtt

SEQ ID NO: 184693 - DNA, 2856 bp, Cannabis indica
aatatagtataattttatctcacattgaaaatgttcttaaacttatgtaaaattaaaattttaatcgaagttaataaagatgtacatattaataagaaaatattaaggggcatattgaagtgtcaaataccacaaaatgtagcataccatgcatttcaatatcaactcccataaattttaatttaataaataaattagaaaaatgctaaccagttattgaatactacattgtaatgatattgaacaccttaaggagtcacatagaaatcccttcctacattagaagggatttcatcgagaagacgattgtgggtcggacttttttcaacaaagggatcttcaaaggtcttctcagatcggcttttgcacaaaaatggaggttatggaagggttggaacatcaaggaggaagataagaacatctatatgctaaggttccataagaaaaacaaagcggattttgttgtggccagaagtccgtgggctgtgtgcggaggacatatggtgcttaaatcactaccagcttatgggagatggtggtcagctaatctggatctgatggccatatgggttagggtgtatgttgtgccaccacggttttttactactaaaaatgctactgccattgccaggaagatttgtgggatagtgagtattgatcgtatgtggagcaatgggttccttgtggcggagtacatctgattcagagttgagataaatttgagaaggtcgttactagtgggactgtttctaccgatggaggaaggagtcagtttatggtgttatttcaaatatgaaaatctcccaagagtgtgtttcaaatgcaatattatcggccatgaagaaatgcagtgtgcgaggcgacaaaagcagattactaatgagtttgaccacattgtccttatgtatggaccatggatgagatatggcactagatggaaacattattttgaacgtgtagagatggaggacacgactagggaaatgggaaacttaatcttgatgcggcggtggaagttgatgaggctaggattggggaccagagtgtggaacctgatcatgggttagttggcacataagttcacgtaaaaggcatcgagaagcaggacaatgcagttcggccaacccaacctccgatggtcgaaacggttaggagtatcagtgattttgatgaaagtagtactgtagagaatgatgacgtggagggtctgatttcagaatcgtgctaaaaaatggacgcggtgactgtacaaagaatggtacgaatagcagtagtggagggcaagaggttgtttaggtggcccccactgattcgcaaattggatacttggcgatgattttccaaggggttattaatttggattcaaaatcttcttacaaattcaaaaaacaaaagctgaagggccttgttagaaaggatatcaatgggctgggttttgctattgggcccacgcttgaagggcatgggcctagcaagaaaaggagacatggagagacttcttttgaaggcaacaactgggctaatacggggatgcatgagttagttggcccaattaagaaaatgttctccagatttatcaatgataacggtgataaactgggaaaggagtacgaagtaaaagaaggttgtccagtggggaatttcgataaggggtaattctcgaaggaaagctgagaagctaggcgagatctttggagataatgaagatgctgtccatggagactccatccaagattttgttcaggccgaggaggcgagccgtatcatgctctccaactctatatgttagtcctttcgtgaaactgccaagggctcaaaaaacctcaggcagtgagggcattgcaaacgttgattcgtaatgtcaatccaaatgtggttttcctcatggagaccaaaaagagtaaggagaatatggaggggatttggcaaagattggattttaatgcgggagttgcaacgtcgacgctgggtgctgcgggtggtgtggctcttttttggaaaattgggtggaacattcaggttctctctctgtgtatcgataagattatagtgcgctttggtgaggacatgaatttcaaatcttgggtaggatgttttgtgtatgggcctcccaaaagaaatgaaagggatagttttggggggtcgatgattgaaatggtgaatggcctcgtggacgaatgggtggttatgggggatgttaattccattcttaaccagaatgaaaaattgggaggtaggccagtatgtgaaagtgaaggtcgagggcttcaaaattttgtgtttgactgtggagcgattgatctaaagggtatgggtgcgatgtttacatggtctaatgggcaggattggcatagtctggttcgagaaaaggaggataggttcctttgctcttccaactggcttactcttttccctaaagcaggctccaagattatttccattaggcactctgatcacgcgactcttgttttggatacggtgatggatggtgccccattcaaagctcctttttgatacattgatgcatggaataaggatgaaggttgcaaagctattatccatcaggcctggaacattgatatctctgggtaatatagcttcatcctttgctccagacttcgatcgatgacagaggccttgaggaaatggaatagggattgctttggccactgtaatagaaagcttaaattgttggagcgattattagtcgaggtccagcattgtgctccttctttagagaatgatcaaactgaaagtgggatcttgcttgagatggaggaagtggaagcatgtcaagaagatatttagaagcaaaaatcaagagaattatggctgaagaatggagaccgcaactct

SEQ ID NO: 184694 - DNA, 3862 bp, Cannabis indica
aaaatgccaacattgacagagattttaggtttttgtttgtgttttaagtgttaactagctaaatatctgtccaaaatatgcacacagcttggctcaggctacaaataggatggcattgggagaaaatacagcaagaactaaaatgaccaattgaccaggaagatatattagataagaattaattacctgcaacaaggaagtaggaatttggataaaaccctgtaaaaacagatcaactttttccagagtgcttggtggaactggcgtaatgacatatagcacacctttcaaagtgtcaatacctctcacaatccctggttaacaaaaaccaaagaacagcataaagtcttaattaagaatgctgccaatatattgtataatgcttccacaccaaaaacaacacatatgccataataaacacactagttagttatccttaaccaatacaaaacaaacaaaaaaacagattcctgcagagagagaagcttgttactaggaactgaaaaacctacttggaacaatatgactttaagcataaaaagaggaagaagataaatcagctacttaacattctgaaagtagagtttactatttttgtgatacaaatacaggacaatattagtattcaaagggaagagctaacaatacatcaggtgtattagcacgcttatcaatccttaagcaacaaggcaaaattactccacattcacaacgattgttgcacaaatccactaggttgatctagtggtgaggaggagggtgggtcgggaaatgggggagaccaacgttcgaaccttggatctctagattgttcttagagccattaagcaccaagtgtgccaatgatgaaaaacaaggtctgttgtgaaacttcactttcagatcttttggtcaagtaagaaaatcatggccaattagttgaatcttaagcggcataacaaatgtatgagatttcatgccaccagtaaattaaaaattaggaataaatacttcttaatttcaatgaatacttctaatgagtcgttaaaagaacaacatacatctgtcatttagtatagacaattaacaatccattgaattcagtgagaattgtagaagtaacctaccaagacccacacaccaaggtaaactttcagactcttcaaagctaacagccaacccgactatagttgcattcaaactgtaaaagatttcagtaggtgggacctgcaatgataagaacaaaaattaaaagtcttctcctggttgtgaaattaacttagaagcagtgatacagaccatcaatttaaaaaatgcattacaaagaaacttgatcaactaacttaaccaacctggctgtagagatgtctaatcttaatgcttgatattggaacttcataaggaggttgtgaagccagtgcatttgcaagttctttgatggtagagatgttcagattacttgcaaagcactgcctgaaatatgccataattcgtaaatcacgcataagatgtgcatccttctgaattagaaccctaggccacaagagagataagatagtatgaggaaagggccttgaaagaaactctctatgttctcgggacattaaataacattagtcataaaataaaagtgacaacttttctagacaagtttagatttaattgactttaaataccaatcttgaagatttgaaaatactgcaattaagattttagactaccacatgtatagaaactttgttgatgtgagtcttctaaacaaaacttaaacaaattaaattcactttgattcaacttcatacttgagaaaacaggtatattcacataaattgaattagagctcagaaattgaagaagtaaaatcaatcaatattaaaaattacttaactaaaatatgtgaatctccaatagggtattgcagtcatgtaaattgaattggaactcagaagttgaggtagtaacatcaatcaatctttaaaattactaaactaaaatatgcgaatctccaatagggtattacagtaactaaaagtaatgacaaaaacagtaagctgcttttaattataaaggtcgaagagttttgagcattttaaacttacgatctattatatgaatcctgacgagcagcatttatctcaattagattcaccatctcttcactatggtagtctaaccaaaatgccccacctggtagattcttattcttagtggatatgtttattttcacaacatgggtgggagcaatgtacttcaacatatccaccaaaatttcataaccaacacctgcgtatgagaagaacatgaaattagtcacattgcagagcatagaaagggatttcaccagagctttgactcaagatggctcaagtggaacccaagtaggtcatagttaacttgaagtgatgcaaaatcagataaatggaagatacctttcacccagcctggtgtattaacaaccaaaggcaactcactcttagtagtcttttccttgttggctgtggagtactcctttctatagtaatcgtatagggcagatatgtaactcaaatatccctttggatccctttttgaggaagtatcaccgaagaaaaaggatctaacaatggatagaatgtgatcattagattcaattcaagatgcacttttcaaataaatccccacacaagtgaaaataagaacattgccagtaaaaaaacttgaactggtgagaagactttgatatcttgtacctctccggagtcttgagacaaggaattgtcaaatctgttttaaataaagaaaatcacaaatcataatcctaactaacgagaccagcactctcaacagatatacaattacataatgttaacaagattttaattcaaacagacacttcaattttatttattattcttttttacctggagttaatttgtcaactacagtgagagaaagaaacccaggagtagtaaactcagactggccaacatctgtatccaaataagctacttttttatacctgcaaagaaactgaaaatagccttagcatataaacaataataagaattacaatctcacaattgattggactaagactacactcaagcatgaagcccaaattcaacaataaagccactaaatttcatattttggtacccttctcaatgtaaaaaataaacagatatttgaaaaggcaagtagaactccaatacaggcataatatatatacatagctatactaccaagcagatcaaagtttcaatccagtcgaaaagaattcatgaaaaacttcggaagaacatatatatttaggaatgaagagtagataggatggaaaaagacctcttgagaagaacgttgaggaggtggcgagaaaaggtggtctttccagagtttttggcgccgcagatgaaagcaacaggcggaggcgaagtgattgagtcgtaggctatggactcggcggcgtcggaccattcttgaggtatgtaaatgtccggcgaaggctgttcaggttctgctaccaacgccatggctatagctctctctctctgctccaattcaatgtaagattttaaggtgttagcggcgatatataaatatagagtatacaagtatatacacacaatggccgtgtatataacatattaaatgtgtgattattcatttggttgacactgtgtcactcaggtaacattttttttttctgacaaaaaattaaataaaataacaataattaattataattatttgttttcgaagggaaaagaaaacaaaattaaaaaagaaaattttttatctttctcaatactaaaacatgttcaataatttgattaagaaaaatgaataatacatgtggtcatacgagtggcattattttgaatgaaacaaacaaaaataaaaaatt

SEQ ID NO: 184695 - DNA, 1249 bp, Cannabis indica
tataatatatatatgtaatatattcaagagaagaggcataataatttgctatatatataaatattcttactggatcacacgtgtatatatattttcatatatagctcaattttaagtagagctttgtatattggaatcaaatccaatacctaagtgaagatctaaggatttacagccctgttttattggagcagtattagacaaaggggaaggtttgaagattacagaagtagtagtcatttctggtggtgcagcagcatgagcatgtgtggttaaagtgaacttattaaatgatgatgatgatgaagacgaagaagatgtagtgttatcttgttggaaatggacattactgcaaggtggtaaagaataccatttagacaactgatgagacgctgttgctgcttggtggaagtgagaattgtccgagtcgaaagggttgaaactaatttgctgagattcatcatagagtgtgaactctgaagcatatgagtttgaatcaaaaacaatggagtagtattatgatgatgatgatatgaaaaggcagctgggttgttttggaaaggttgaagatagtagttgatgctggccttcctggcttgaagttgcaaccttttcttcttcattctctcctttttatgagcattttgatggcctcctaatgcctgagaattagcgaattcttttaggcaatattgacactcgaactttttattatcctctgcctgctggtgatcatttgtattcgtgcttttcaattctttcgatgaaatcttgctgttgttgttgttgttgttgttatctgttccatatgaggctgagtttgaggaatttacactttcatctacttctgctgctgatgagccttttataattacactgtctccatcattcttgtacggattcagctcaaacccaaacaatttgagtttcttctcaattgaagatccagctgagtagccatgatgatcatgttctgatattccatcacatgatgaaggatgaatgtgagttgagggaccctttgccatgtctggaactgtagtagtggctagctatctagctatttaggaaggggagttatattaatagagaggaagatatatgtaaatgtacctatgagttatttgcttctcttgcttttatactagactacatatttggtttacaaccatgcattgcatctaacaagaatagtttttataatataaaaaacggcataagcgtactcaatggtcaaatagaaaaaaaa

SEQ ID NO: 184696 - DNA, 2411 bp, Cannabis indica
gatgaaatcttgctgttgttgttgttgttgttgttatctgttccatatgaggctgagtttgaggaatttacactttcatctacttctgctgctgatgagccttttataattacactgtctccatcattcttgtacggattcagctcaaacccaaacaatttgagtttcttctcaattgaagatccagctgagtagccatgatgatcatgttctgatattccatcacatgatgaaggatgaatgtgagttgagggaccctttgccatgtctggaactgtagtagtggctagctatctagctatttaggaaggggagttatattaatagagaggaagatatatgtaaatgtacctatgagttatttgcttctcttgcttttatactagactacatatttggtttacaaccatgcattgcatctaacaagaatagtttttataatataaaaaacggcataagcgtactcaatggtcaattagaaaaaaaaaaaaaaaaaagaaaagtacagatcagagaagccgtctcgtgaaattaatattgctttatataaaaaagaagaaattaaaaataaacatacactttatttttcaatgttgcagtagatacacttcaaacttttccaatcaaagaggattcagtgtgttataataaacggggaattttaaggtctataagcactttaaaacatataaaaatacaagtatgacaccgctttggcataatatttcatgtgtatatatattattatatattaaagagggataatatgaaagttatataatagtaactatataataacaaaagtcaaagaaagatatggggatgtaatcacctggaaggaaggggttttttttaactttgaaacaaatctctactgtacttaaatgcttatctaatattattttacaagaaaaccaataagttagtggattcatgtattgtcctctaccaaagcctatcatgtaatatatacttaaatatatataattactataaatataattagttattcacagctgttttggtgcctagtcccatccactacagtagagcacaccaataatgtttataaaattctaagttctctgtagagaagtgattattcagcacttaatgaagcttctttgtaattatctctcaacccacaaaacaaataaatatatatttaatttttaattaaatatatatatttatatgtttgaccatgtttttgtgaatgcactttagaatagtaaggagaggagagtagttgttgataaacaaaggaatataggaaataggtagtgggtagtgatgtaagcatatatactaagaagggtcttcaatgagatcttgggcatatctttttagagcaggaatagcttataaattatatcacccaaaagcatatgttttcaggtgcatcaagtcataatctaattttattatagtaataaactaaaaagcattttggtttggacagttgttatatgattggaccccactttttgttgctttggggacattttagaaacttattagattgtgtttttattccttcgtctctacctagatctcccatgggtggacttcttctaccaatggatctctcatgctaatcaattcccacttctttttcagttttattcaaattgctttcttgcttttgggagaagaattccaagtatgcatgctgtcatcaagcatttcaatatcataacatgtggaagaaaatgaggccataagcagagaagcattattggattatgtataaactatgatatgatgtggtggctcagtggtgggttggttttggattgattgatttcgtgagttaatctttttattgttttcctttttcattttatccattggtttttgataaagaggatcaaactatagagtactagtggtccctcccatctggccatctcctctcccataatagaatttttaaaaaccatgttcccgtccactatctttgatctcatctttcttctcccatctccagtaatctcttgagagaatttcaattactttattataccaaaaaagaattgccaaacttgactcttaaagaaagaagcaaatcagaggagatattttacttgtgaaaaagccactcctacactgttttttagtttgatgaaagaaaggaaagaagtaggtatgggaatttttcccatgatatataccaacatttatgccgcatctgctgctgacagaacaaactagtccacatgccacttacatgcatgcatatttgttcctggactgttactgtactgtatcacagcatagttttcaatgaaacaggcaaaacaaaaaaatcatgcaaaccttgcaatgtatcaaagtctaacttttaacttgttatccatcctcgaaaggtataatatttaaataatttttttttatttacaaatcacacc

SEQ ID NO: 184697 - DNA, 805 bp, Cannabis indica
tcttggtatgctaaacacaaaaacctcacttgtttaaggaatcattggtgcattaattgtggaggagtggtgaaattcctttaagtggccgaggcaattggggtgtgtgaggactaaggaggctttgggctagatcaagcaagcagcgaggatgggtgaatgtggtgtaggaaattattggctcagaattagggaatatttctttagtttttgttaaacgatatgcaaataaaatagcttattatcttgttcgagctatttcttttatacgtgttgtttgagcaaactctaattcgtctgaatttgttggtgtaatgttggatgatattatggtttgatggagtttattttttattcaaaataaataaataaacaaatgtgtagcatcaaaaagctcatggattggaggctatagtaacttttttacaagtgatcaaatatttgagaatataattcttctatttttcttccttgtggtgttttgggattacacaatgactctcaacaggagaaataaagaaaccaagctttacataccaaatcaaaacaaaagaaatcaagagcaattattccaaaatcagttaggtcattgatttttgaatattaatatagtaaactctcatcacccaccagtattctaaattttttacagttatttttttttctacaaagttttgtgctttatatataagtccataatttagggttgttgatccgattcaatccgcactttttaataaaacaacattcaattcgcactatatgcggattttatatttttggattccaatctaattcgcataac

SEQ ID NO: 184698 - DNA, 1142 bp, Cannabis indica
tttttttttttttgcatgattatgggattaatgttatcaaaaaacgattataatgagtaagtgagaaatgtaaaacacattttaataattaagttcctttaattatataataacacttttgatgtaaattaataatttttcagaaatacgatttgacatgtttcgttgttaaagtttaatacgatgttatcttcaaacaattttctctcttgggatttgagagtccatatagaaatattaatctctatctctaccgtattttaaagtatattgtacatatagtagattttaattgagatttttagtatattttttggattttataattaagaaataatgaatcttgataacaggattattgtcaaaatttcccattaggaaattatctaataagattttaaatgtatcaaaatattagcatggataagattaaacttgaatagtttctgaaactgtttattattttgctgttaagattaaacttgaataatatgtgtttgtttttgatgcccttgttattataatgatgagtatcaatgtgggaaatgtgggacataattttcagcataattttcttaaacattactcattctttcatattcttgaatagttgaatcacatttgaactttcaaatgaagtaatactatttgtcttgtgatcccaagtaatactgagcttcaaccacccacatgattctagctagtctaatataaaattacaatgtaaggtaccaaactaccaaataccaatatcaattctgagctagaaaaatgcttacaaagcttggtttgcactaaaagtgttcactaaataaatttgactcagatgaacctcttttttttacttctgcacatgagaagtgtctccctcatatgcatgacatacaccccaaaataaaaagaaaactattaataaaaaaacacaacatttatctttactaatcatgaaattaatgtaaaaaaataaattaattaatgaaattaatgtcaaagtataaaggagagaaaatagagctttgtattttcataaatgaattatgagagtgaacagactgtcattacctggactccttttgagctgtttttttctcattaaattatatacatacatgtcttcttttgaaaaatattatttgcctttt

SEQ ID NO: 184699 - DNA, 2746 bp, Cannabis indica
aaattgcttttcttgtagtgtcttttatgattaatagaatcttacatggttacttgcaatctcaaagggagcttagacaatgtgacctaatgtctcctctcctctttttattggtatggaatatttctccagaattatgactaaaattgggaagctatcgaatttcaattatcacccgagatgccaaagtttgagcttcacacatctttgttttgcagatgacttattacttttctgtaaaggagatatcaagttagccacttttttattaagaggcttcaagttgttttctgactcttctggtctcaaacctaaccatgagaagtcagcgatttatggagcatgtatggactctattactcttgataatagaattgttgatatgtctggttttcaaaagagtacccttactttcaagtatattgggataaaaatttgtgctaaaagaatctctaagaataattgtgagaatcttgttaaaaagatgactagccgaatctgaattttggagttctagaaagttatctataatttcttattggtcctaaataattattttgctaaaagttgtgattacaaaaaattatctaggtgtgctgagtttatttgtgaaagggggttgattcttgtaacaatccttttgatgtctcttggagagatacttgaaaacaagaagaaatggtgatttggggtttaaaggcattgctctttgaaattttagtgcaattggaaagcatgttagggcaatcaccacacaaaaagataatgtgtgagttaaattagtaaatgaagtctatcaaggaccaacattagtgggagcaatatatatatatatatatatatattaatttatatatatttatacaaacatatagatttaaaatgtaagtgagagttgagatgttaatgttttcatatataaataccattaatttatcaaactttttttagaagcgtgcgagactctctctctctttccatgggtaggaggaagaaagagtttctgaagctcaacattcagaccattgggacggtgactccggagccggagcaagagctctcttcaatccagaaagttgctgagatacagagtcaggcggaggtttttcatgacactcaatcggagctgggtggtgacctgggtgccctgaatgatgaagatctcctgcgatctgagaagaagacctgggcagaggaaagaggtgaacagggcgatttgattgttgaagatctcatacgttctgataagaagacctgggcagaggaaatagagtcgacagaattccaatcttcagcaaaagaaatctggagtaaattcaaaacaaatcaggttagaaccccctcgactaagcttgaatttactgaaccaataaaacttggggaccaattgattgcgaatatagatttggaagaggtcgaagttgaagcggcctactggaagaactcgattgtctgtgttgttctcggagccaacccaccatttcgggtttttgagggcttcttgaaaaggatatggggaaatctgggtattgacagaattgtgcgaatgaactctggatatactttggttaacttccgagatgaggctactagagacattgttctggaaacaggggtcatccattttgacaaaaaaccggttgtcatcagaccgtggaccactgatattgattctttgaatttggttaagtcagtcccaatatggattcgattaaatggactaggccttcaatattggggtaagaacactctaagtgctcttgtaagtactgtgggtaaaccaattatgatagacaaagtcacgagtgaaagatcgatgataaaatttgctcgggtgcttgtggatatgcctatacaagataaacccccttcaagcattagtttcttcaatgagaggaaacaactcactgaacaacaaattgaatatgaatggcttccaacctcttgtgcagcttgtgggttacttggtcacaacattagcacttgtgctaaagataaagggctggtttgggtgaaaaagaataaaacagttcaagaaaagaagggaaaagaggtaaacaaaatatctaatgatcataattttgctctgcctacagagaagactttagagaaagagggaaaaatggctaagactatacagggggatataaaagaaggatcaacattggctgaatgtgaaggtcaatggattacaccccgaagaaaaggtaacaaaaaacagacagcgggtaatggagaaacaactgagatgcagaaagccacatcaagcaacacttatgaggtcctccaagaacctttggatgagattgatccgttaaacaactctatgctggatggagtggtgtaacataatgtgttggaatgttcgtggattaaataaagtcaataaacaaaaatccattttggatgtttgtcggttgaataaggtgggtattgtagcgttgttagaaacgaagatacgagggggaaaaataaaaaaatgattagtaataactttcccaactgggatcactatacaagtccgattgtagagggtcgcatccttcttctttggcaaagaaagtttgttcagattgaagtgatagatgaagatgatcagttgctccatagtaaagttaaaattcatggtcttgatacggggtttattttcacagcaatctatggcaagaattccattagtgagaggaagcttttatgggataagttggctggttttgggatggtaaatcacccttggctcataatg

SEQ ID NO: 184700 - DNA, 4110 bp, Cannabis indica
aagagcgggaaagttaactgtttgttggttgggctttaattgcattggatagccacaggcccattgtcctggtagattctcaattctcatataaccaaacgctatgtcgttttattgacacccaagagcatctcctaccaaattacacaaatcatcttaaaaaatttatttttttatttttcttttaactacgtaagatttagtattgttttccacaaaaattactctaatatgggcaactaccacatactaattttaattaaattttataattatatacatcctctcaaaaaattaatagatgataaaataattttatttaaaaaaaataaataaataatatcacggtgatttcattatcttttgaataatgatgcttataaaattagtttgaaatgttggtcaaaatacacaagtagcaaaaataatttcataaataacgaaaaaaatttattgtctttaaattggtgtgtcctccctgtctcctctaattgtttccagacacatcatttatacctattttacatgtattaatttaatttagagtttgttaaagaatttattatatgtttaataggtataaataatgtactggagaccatgcaacttgtcgattgtatccaacttcatgagttcatgtctattttatttatttcctttaaaaaaaatcttcttgttttataaaagattttttactctggaatctggatcctttttccaaacaatcaaattaacaaaaaagaattgatgttgaaaaacaaaagagatcaaaaataaacatgtaatatccaagaagcctttgaaactgggcatgtcttccaccaaaaaaaaaaagatgtttccaataaacgatagcaagacaagactgtttacacagatattcaagttaagaactagaaagttcatacgggattataaaatgttgagtttatcaagggttcaattttttgtaatgagattatatataactacaaactataagaagttataagagaaccttgttgtcagtgcctataattatacagcaccattaactcaaacaataatcactatacgaacaagctttcttgttctctaaactttctcctatgtttcttacaaaaagaaaagaaagaaaaatgggacatggcattgaatgaatctgaccattttatatatacaaaattataaacaagtgtaaaaatctttacatatggagacttcttactcacaaagaactataagatgatgaccttcgatgtgacttgtgagttccataacgagccctcttcaaagcttctgcatatttcaccaactcagatctatcagtggaattatccgagtgcttatcaattcgatctttagctgtaaaatctaaatcaacttccccacccaaaacaaagctcttgtacacataagaggaacccccgtcactctttctttgcaccctttcgatgtccacaccttgttctttcttcagagtactttttaatttgtgcaaatccaaagaatgtctacataaattcagagttggagttctatatctatgatggttctccgcagctccataagctcttgttaaagcatttgaatcgctctcttctgcagattcaattttatctgttgatgaaacatgattattatgatgactactgtctttccccattacaagtttcctgagcttattgaaaattttcttcttctttgaaaggctggttttggctgcagctgaattatcaaaaggagattcatctaactcactggagtctgtaaaggaagcttgggaggatgaccattggtcagaatcaaaatcaataaggttgatagtcttttcccctactccctcagtttttgcatagtccaatattagctgtttggctttcttctcagatttcggacttaatgttttgctgaggtcctttgccactgttttaccagctgcaggctgataatttcgcagctcatatcttaaacaagcattaacccatcgaagataaactaactcctcaatatcagtacacctatctgctttgagttgctcaatttcctgctgcaatttattgtttctttgtctcaatctctcactctcttctttcaatgcatcggtctgcaacaaaatacatcataacaaagatttagaatgcattaccagaagaattataataaggtaataatgatgaaatatgattaataaagtcagtaaattacctcaggatcttccagaacagagtttgcaaggatctgagtggactccaacctcagagacagttcagaattttctagccgcaatgacaagttagacttcctcagctcttcagcttcatcctccaattcttttagccttttcaggtgcaattgagcatcagcatcactcgaaaaagagttgtattcctcctcttgcatcttcgcaactcttcgctgaagttttaatatctgttccttgttctgttcagcttcatatctgagtttcttcttcagcatcttgatttttgctctcgcatcctcaagttctgctattactttagcttgaccagccacctgcttctctagtctttggttttctgcttgtaatgattcaatcttaagattaaaaagcttagcctccatgttgtttatctttaaccgattttggagctccatgacagtggtttcctgctctttaaggccataatactcgagcaactgaacttcaagattcttctccctctctctaagtattctaaccatattttgaagatggctgatctcttgctcatattcatccttctctaaagtaataaaagcttttggagtttctagctctgaactagtactattaacatcaccatttggagaaaacccagctgtgggagtagcagaattaaaatctttggcaatttcataaaattgtggcaggacaaacccatctctgtctccactaaatttactacaagagatttcagccggagatttctgcatgtaagcctcctcctggtaaaaaaacaggcacacataaacatcatgcttcactgtaaaaataaactgagcaggaagctgtgattaacttcatggtttcattaatcaacatggaaaactcaataattgacatagctaaatttgcatcacatgccaatttgggaattcttatataagaaaacaaaaattttcaaaaagctgatcttaaacttttaacaagctgattataaactaaggggcagtaacaaaatagtaaagcaagaatcatcaccatctttggctggtatcaacaagagacaaggatattgaaatataattctaaggaaattaattaatttaatcataaagtaacaagtacataccttttctagacaactctgcaccttaagtttgaaaagcaagatctcatgccctatagtttcaatttaattgaatttatataaattaacgaataaataaaacttacatatttctctgatgcaacagcaacaagtccataagaattgggtattgtcatcctcgaatgaatctcatctcgtcgagcttttcctaatgatataatttcgttaccataatcaaatatgcatgcttataaaaataataaaaatagcaaaaagattctataaaaatttatacattaaaaagaatatatgaattaaaaaaagaaaacaggaaaaagtagagtgaaaattttcaaacctaaggagcgtggcgtgggtggaggcaaggctggcttgatccttctagttctaaggcgagaataaataaaaccagcaaatgagagagccaaagccatcccaaatttcaacataagaggcctcatatcgcctctctctttcaatttcatgatttaatacttttattcttagccaaactgattactgattattactccacataacgagtatacttcatcttcttcatcatcttccatctttgtaaccagaaacacagaagaatcagattatatccagaaaacaaaaggcatataaatagcatttaaaaaaatatagaaaaatttgaacaacccatcattgattcaagtcaaaagcatacccaaaataaaaaagttatcaatgagatgaacccattaacaagaaaaatggcataacaacagataccctgctcggttaatattccatagaaccggtgatataagttgttctcatgaaggag

SEQ ID NO: 184701 - DNA, 2189 bp, Cannabis indica
ctcaacatgtttttaccaatattagatatttatatatataatctttattcttaatcacttgtagtttgctagagcagtagtagccaaaagttttcatacgtactcactctcaaaggatcaaaccatacactaacaaaccatatatttagctcctcataatacaaattacaattataattctcacggccatgaacgttttcacataataaaaactacaaataaaaaatacatcaatcgatctctaaatagtaaccatcaccatatacccatatatagaatcaaatatatatatatatatatatatcaaagataaaaccattgatcggacggtccaaaactggtggggtaaattaatagtaagtaattaaataaagaataagaaggattatatataaatatagtaatattattataaggtcacaacagaagggcacgtggtgggcgattcccttgctagttatttaaactactggcgactttcctgtaataccgttgagttccaacctcctctcaagccacagcctgtacatagctgtccaatcccttctccccatgtgaccccacactgcacaaaccccatagatatagatagatgtatagatatagtttatatctattaattattattcatattaactactattatttattattgggatctgtaaatgatcaatgttcttgtcgttccccattctcgtttctttgttccatttccctaactctctctctctctctctatactatttctcttcttcctagctttcactatatatctatatcttttccttattataacaccctttctcaccagttttctaatctttgtcattgcttcttcttcttcgtcttcttctcgaaactataagctactacacaaaaatacatatacattacatttttctgggaagaccatcgatcgtgctgtaaatttcttattatagcttcgggtttctgtctattatagtaataatggcacagttaccacctaaaattccaaacatgacattacccaattggcccgacgtcgtttcacacgggaagctttcatcattagctacgaataatattcataataataataataacccatcatgggttgatgaattcctcgatttctctacagccaggcgaggttcccacaggagatcggtaagtgattccatcactttcctcgaagcgccaatgctggacgagtgccgcggcggcggaggagccggctccgtagttgcgccgccgcaaggaggagcgacgcttcccgggagcggtggtcacggagagttcgatagatttgatgacgaacagtttatgtcgatgttcaacgacgaaatggcttcgatggcggttgccgggcccaacgtgtcgtcttcgaacccttctacaccatccgatcataacagcatcaacgacgagaaggaaatgcaggtggatcggagtagtagtaagcaacagcagcacgttaagaatgagtcggaagaagtggatagccaatgcaactccgattcaaaccccaaccccaatgggacaacgacaacaaacgctgcaaacgacagaataattgatcccaaaagggtcaagaggtactctatactctatactaccaattattattacaattttttaattaatcatttaacttagttatttataatataaattaaatgatctatttttattattataatatctctttttttttttgcattactagaatcttggcgaacagacaatctgcacagagatcacgggtcagaaagctacagtacatctcagagcttgaacgcagtgttacttccttgcaagtatgtttaattaagtattattatcatgaccattaataattataattttaattatataaaattaacatcatatatattaacttgcgagcaaaattatacttttgttccgttcaaacatgttattaatttgtcgatcgagatttgagtgtatattcataatttgcatgataatgtaggctgaagtttcagtgctttcaccgcgagttgcgtttttggatcatcaacgcttgcttcttaatgttgacaacagtgctcttaagcaaagaatcgcggctttggctcaggataagattttcaaagatggttagtactgcttattataattccttaattaattataattaatttttaattaggattcatggtcatcactatcttattaattattca

SEQ ID NO: 184702 - DNA, 5252 bp, Cannabis indica
tactctaaattactccatgatataaatataaaaggcgaagactgtagaacataaacgacagccgaaggtgaaatcgaagcatttcagtggaagcataggaacttcccctcgccgccgcaagggccggagatatttgccgttgccggactagtaggttaatctatataaattaagtcggtggatctttttggattgcattcatatattccttacgaacattatagaattggtcggtatcttaaatagttgcagaattagggttagccacaatccttcatttttgttttttttgtgattaaaacaagataatctttctgttttgattgttcttcgtcaatggctatcttggacgagggtctgaagaagcttgagtatttgtccctggtctccaaagtctgctcggagcttgagactcacttagggtttggggacaaagttcttgctgagtttattactgagttgggccgaaattgtgaaactgaggaagaatttgatgctaaattgaaggaaaatggtgccataatgccagattattttgtccgtacattgttaactatcattcacgcaattcttcctccgaagtcgtctgataagggtttaaaggaagataatggttctgatggtaataagggcaagtttcaagccttggccatagctgatgacagggatagagtgaaagagcttcagaaggagattgaaatggaagcccgagagaggcatagaggagaacacggtgaggagcaagaggaagatagacgcagcggtaaagataaaggcagaggcagaggcagagatcgagattatgatagagatagagatagagacagaggcggaggcagagatcgagatcatgatagagatagagatagagacagagacagaggcagagatggagatcgcgaacatcatcgggatagggacagagacaacagagacagacgcagggataaatataatggggatggaaggggtaggggcaaggaagatgatgatggtgatgataggggaaggcatagggatcgtcatgagaagcacaggagagacggttacgaagataatgcagattttagggagcttggtgatgataggcgaggcagtaaggattcaaggaacaggcaattccaatctgatgagcctgaactttataaggtttataagggaagggtgtcgagagtgatggaaactgggtttttgttcaattgagcgacttgaggggtaaggagggtttggttcatgtctcacaaattgcaagtaggcgaattgctaatgccaaggaagttgtgaaaagggatcaagaggtatatgttaaggtgatttcgatttcaggtcagaagttgagcctttcaatgagggatgttgatcaggatacagggaatgatttgctccccttgaagaagagcctggaggatgatgcttttagaacaaatccgtcagggtctaaggaggggcctgtgactaggactggtctttctgggattaggattgtggaagagaatgaaattgtaacaactcgtcgacccttgaagagaatgagctctccggagaaatgggaagctaagcaattgatagcctctggtgttttgggtgttaatgagtatcctatgtacgatgaagaaggaggagatggaatgctgtatcaagaagagggtggggaggaagagctagagattgagctgaatgaggatgaaccagaatttttgcaaggacaaagtaggtattctgttgatatgtcacctgtgaaaattttttaagaatcccgaaggatcactgagtcgtgcagctgcacttcaatctgcactcattaaggagcgaagagaagacgagagcagcagcaacgaactatgctagattctattcccaaggatttgaatcgtccttgggaagatccaatgccagagactggtgaaaggcatcttgcgcaagagcttcggggtgttggcttgtcagcatatgatatgcctgagtggaagaaggacgcttttgggaaaaccatcagttttgggcagagatcgaagctctctattcaagaacaaaggcaaagcctgccaatctacaagctaaaaaaggaattggttcaagcagttcatgataatcaagttttggttgtgattggtgagactggctctggcaaaacaacccaggttacacaatatcttgctgaagctggttacacaactaggggtaaaattgggtgcactcaaccccgtagggtggctgcaatgtctgtggccaaaagggttgctgaagagtttggttgtcggttgggtgaggaagttgggtatgcaattcgtttcgaagattgtactggaccagagactgtcatcaagtacatgactgatggtatgcttctaagggagattttgattgacgagaatctttctcagtactcagtgatcatgcttgatgaagctcacgagaggacaattcatactgatgttctttttggattactaaagcaacttgtgcagcgcaggccagaccttcgtctgattgtcacctctgccactctggatgctgagaaattttcaggatatttctttaactgtaacatcttcaccatccctggtcgaacttttcctgtagagatactatacaccaaacaaccagagagtgattacctagatgcttctcttatcacagtgttacaaattcacttgacggaaccagaaggtgatattcttctgtttttgaccggacaagaggagattgactttgcttgccagtctctttatgagagaatgaaaggtttaggtaaaaatgttccggaattgattattctacctgtgtatagtgcccttccaagtgaaatgcaatcaaggatatttgatcctgctccgccagggaagaggaaagtggttgttgctactaacattgctgaggcttcattgaccattgatggtatatactatgttattgatcctggatttgcaaagcaaaatgtgtacaatccaaagcaagggttggattcactgatcataacaccaatttcacaagcctcagccaagcagcgagctggtcgtgctggtcgtacaggccctggaaaatgttaccgcctttacactgaaagtgcataccgtaatgagatgtctcctacttcaattcctgaaattcagaggataaatcttggatcaactacacttaatatgaaagcaatgggtataaatgatcttttatcttttgattttatggatccacctgcacctcaagctctcatttctgccatggagcagttatacagtttaggagcactggatgaagaggggcttcttaccaaattgggaaggaaaatggctgagtttcctcttgagccaccattatctaagatgttattggccagtgtggaccttggatgtagtgatgagattttgacaatcattgccatgattcagacaggaaacatcttttacaggcctcgtgaaaaacaagcccaagcagatcagaagagggccaagttttttcaaccagaaggagatcacctgaccttacttgctgtctatgaggcttggaaagctaagaacttttctgggccgtggtgttttgagaattttgttcagtctcgatccttgaggagagcacaggatgtcaggaaacaactccttaccatcatggacaagtaagatttttccattcttaatctttttgtttatgtatgaaatttccttttctgttcttgtttttctttttttcttacctatgcaatttatttcattgttccaagaataacatttttaaattgcgttttcaagttgttttactcatcaaccatgcacactgtttgctctgcataactgaaaggaattgcagatattaggctgctatagttaagtgaaatgattcatatggttgatgctagagtgatgaatttattactacaattggaataggtgtggcaaagattgtgcatttattttttaattgaagcatgtcccttttactatcattcactgatctgatggagaatatcttaacgaattaagattgttttatttgtgctcagttgccatatttatcccttattggtggtttgaaggttcttttgttgggttaaccttaacctttcaagtcaaatcattttacagaaattctaccgttggttttctgttctctgttcatatgagttcttatagagtagtttttttttgtttaattatggtagcagtgccccttgttgtattgccttggtctgcatcttttaatgaactaaattggtgattctttgtttcaggtataaattggacgttgttagtgcaggaaagaatttcacaaagatcagaaaagcaataacagcaggatttttctttcacgcggctagaaaggatccacaggagggttacagaactcttgttgagaatcaacctgtgtacatacacccaagcagtgctctttttcagcgacaaccggactgggtaatctaccatgagcttgttatgactacaaaagagtacatgcgtgaagtcacagttatagatcccaaatggcttgttgaattggctccaagattcttcaaagtagccgatcctacgaagatgagtaagcgcaaacgtcaagaacgtattgagccgctctacgacagataccacgagcctaactcatggcgattaagtaaaaggcgtgcttgattcttgtttcataattcatatgctaactgttcacctattaccttgtttccttgtttcttatttgcttttgataattgtgaacttgaatgaatgccatctgaagctggatgtatgagattttggtttaatagcaaataccaagtgtaagcattatttgcataggtagtgttaaaagaaatgttgtaaatgtaagtaacccaccattttcatgaggttgtttactagttttgaaattttctaatagttaaatcctcacggtcattattttttttccctttctctaaagtaattgagtgctcaaactgtacaagtgaactttactcagttgtgaatacattatatagtttacacacgtcaaagctaaatgtagaaaggattaattttttcacttataaaccatataacttattatttactcaattagttattaaattcgaaagtctagtttttttttttttctaagtaattcagtatataactctttatcaggtttatgtttttgacaacgaaattattaaactacgtgtacaccagtaggaaaataataataatggttcgtttggtatgtcgtattacatcgtattaaattgtattttatgtaatatttttatataaaactatgtagtattaact

SEQ ID NO: 184703 - DNA, 1900 bp, Cannabis indica
tcgacctcatttcaggagaggagcttaagagattggagacagaaaagggtatcataatacggtttgttattggacacaggtaggttagctcgagattgcaattgactggcaaattttgtttgcaacttcagaaactaactgaagtgtttttttgtctccagtgcatctccgggtggtgttttggaccgtgccattgacgctgaagaaactcaacataaggactttttgcgactggtatcttgcagacttactttaatcagatttacttgctattgctgaaataatttgataattagttcacctgtggcctgtgcttgtatctttttcactggcgtagtataaatttgcttttgatttggtacattgtcaaaaataagttaatttgctaaatttccttttaagactaaaacattttatacatggtctaatttcattttatcaaaatcatggtcattttagtttttatttattcttttattcaagttacaatcgcgaagcttatacgtttgcttttgatattttggtcatctgcagaaccatgtggaaggatatcatgaattatcctccaaaacacaaatctatttctcgacagctgttgctaaatgggatgctgacttctttatcaaagttgacgatgatgttcacataaatcttggttagtgtatgcactttaatgtaaatggtctatctctggtataagaaagaaaattttgtctgcagtttcagtggcattattaaatagttgttggtgtttggcaggtatggttggttctactttgatgcgccatagatcaaaatctcgtgtttatattggttgtatgaagtctggtcctgtcctggcacagaagtgagcaatgaaatgttttcaattttctcttgttgtcattctcattcatctttagtacatattaatttctctctttctctctcagaggtgtccggtaccacgaaccagaatattggaaatttggtgaagatggaaacaaatactttagacatgccacaggccaaatttatgttctctccaaagatttagccacttacatatcagtaaataagtaagtcttttggtaattcatgtatatttctgtcaaaaagaaaataactgctgacaattgatgttttccaccacaggcacatacttcatagatatgctaatgaagatgtttctctgggttcatggtttattggtcttgatgtcgagcacattgatgatagaagcttttgctgcgggactcctccaggtaaatctttctcttaacatatatctatagttaatatcatcatgaagctttgctttcttgggtacctactattagaattccatattgactgttgatatatacttgatccacttaataatatgagggatatcctcccctaacaagccggttttgttaggctgagttaagcctaataactttcctaatatggtacctaattgaaactcttctagataattgcttaaaagtccttgatcttcattttaagcttccaacaaaatctataattcctttgtgggaagaccagaatcccggctacaattttcacaaatagtttggactttcgctttaagtcattgttgtttaaagaggttaattaattcttttgaaaaccaatggatggcattggtgtatccattacaaactagactgaaaactaaaatgtacttgtattttgttacacgcaacgctttgctcatctctatgaaaacacataaatgttgtggatttttaaacttttgatcactggatacagattgtgagtggaaagcgcaggcgggaaatgcctgtgctgcatcgttcgactggacctgcagcggcatttgcaaatctgtggagagaatggacgaagtgcaccagcggtgtggggagggtgatgatgctatatggcacactag

SEQ ID NO: 184704 - DNA, 1910 bp, Cannabis indica
aatttaaaagaacgattgaagggatttcaaaagagcttgagcggatacgttccaaccctcaatgggatgaccgtaccaaagatcaagccaaaacacttcagcatcatctagacaaattgctccatcaggaagagctttattagaaacaacgatcgagggtaaactggttaaaatagggagatcaaaacacaaaaaaaaaaaatcataagtttccttctcaaagaaaatcttttaaccagatcaaggagctcagggatgctgagggaaacattctctcctctgaagaagacatccttaagaaaatagagaattacttcaacaatcttttctcttcctcaaaccattcttctgaggatatctccagagctcttaataaagcctcacttatggaagtgttcacagaagacgaaatccaaatttaactgggaacacacttgtcacgccttattcttttgcaatgatgtcaggatgtattggagtacgcaattttactcaattcttaaagattctactcatataaattcttttgacattattgtttttcatatatcaaatctatttattaaggaagaagtggagtcgtttgtttgtttgtcttggctaatttggcatgataggaactcaatcacagtaaaaggctttccaacatccgccaaaatctattagattctttccactccttgattcaagaatttaaagaagcaaagtcattggattcaaggatggactctcctcacccaggaagcagtctcgaggtggaaaattggatccccccttcccctggcctccccaaactgaatacaaatgttgccattaatgtcagttcaaacaagtcagggtttgcaggagtcctcaaaaatagcaatggagataccatagctgctattgtaatcccttgcaatgggataggcggtctttacattcaagaattgaaggtgttaatattatccctccagtggtttatcgaagaacaattctcggtcaatttcattaaaacggattgcaaattaatcatagatgcattgaaaaaggaacaatatcataatattacattcggggatcccctttctcagttcaagtctcaactctcctcaatgtcgaatgttctatacgccacaaccgtcgaactgctaacacagcggctcacgacatggcaaagaagactttaaacttaactaaatttttgttttggattggtgatgaggcttgttctcttaattgtctctcttagctttgcttacctccttaccctaaaaaaactatgaagtgaataagaaattgattgtctaactttagttttctttgctttcttttccttgcgttgaatgaattagaacctttgctagataatatatagaacaagtttattaattaatttttttgaggtattcataatttatgttccacatacttagatgaatatcaatcttatataattaaaaacttatttattttttattaattacaatacactctattgtttttaataaaataaaatgtttaacaatctagaaaagaaaaataaaaatgttaatgaagtggttgaatgttgtttttgaaatgttttgaagagtatttaggttagaaaaatctcaaattttgactacctaaatttgatgtggaagcaagcaatgaagcaagcaagactagagtaattgaatgagaaaattacaattgtaccctctcaatatcacttttccaatttccaagatgttctcgtttatggtgccacttaaaaaccggtgatcaaaggtttgtaatatccaattgacacagaccaaagtgacccaatacaggacacgtgtacgtcacacaacagtggaacaaggactgaaactctttcacttcatatatcattgtttctgtttgcttacatgaaatcctaactgctccctttgaaaatatatata

SEQ ID NO: 184705 - DNA, 1484 bp, Cannabis indica
ctttcgaatcactcagcgttcatcaagtatatgaacaaggttagtagattgttctgaaccatcttttgcttattgtgcttagaaaatttcaatcgaaccacactatatctgtaatctttaagatttgtggatcgagtttatatgtgtatgatttataagttgtcatccataggcaagtaccccaccccaagaatgtcaacttgatatactatgccctgaaattcattgttcactaatattatatatttcttgggaataagcatagagaactataactaataagcaattacatagctgtatacagattatgctatatactcagcgtgtgttaattgttatcattgataatatttatatcattacattaataacatgattatatggtcaattaccaaataattttattttatttttgtatgaagtaaataaagaataataagagctcattatatcgacccatctgaatagttgatggattgcttaatttgattggtagccacactccacactacctataatctttatgatttattttacatactcgcccatgttaattgtaatcattcaataaatttatagcattacttttaataacatgttgatatgatcaaaaccacgagtgtatttgaaattttatcaaaaaaaaaaagtaatgtcactactcttatcacattcaactttagagctaatgaagatcaacacatactgtataatcacgattttcattgataaacgatataaaaaaaaacctcataattctttttaatcagatacatatatagcattcatcaatgtggtaccactttccacctttgcccatttcgaaagggtacctaactgcaaaaacatcaacagagatgtcaaagaaaaccaagttataattatgttttgtgacattaggggtcaaatttagacgattataatgtatatacctttaacattttctttcaatagacattttagttcctttattgtaaatattgtttctttcttaatgcttgatggagtcaccgaaacaagtggttgttcatgtccataaaatttcatgcttccatctgaattcaattgtctactgctgagcgatgacaatacactcttcttataatcttttctgaaagctatatttttgttccaatgggacataaaattttcaccctaatgaccaaaaattgtaaagagtattacattgtttttcttgattcttttggtgtataaaactataatgttaagtgaaaaagtatagaaggcatatagctttgctcaaaaggaaacggttttggtaatagcaacaattctggattcataaaaagtttgccactttattaattaattgttactgacataagtgaggcacaaatgcatttttaagttgttccaaagaaatttcttcatatgtaagtggacattatacctctttattatactgttttctgaggttaaagatggtttgacatgcttccttctttctctgatttgtatcttcc

SEQ ID NO: 184706 - DNA, 4495 bp, Cannabis indica
caatatctgaagtaaaatgttttatgaaaccaaaatagacattacatttacaaatctcagaataaatgaaacttatgcaatcaccttttgcatcaaactaaaatttctgcaaatctttgtcaggaaaggagcacagcatccaattagattcttatcatcaaaactaccagaaacaatttctttttcagctctttcagatagtgtatcaagtactgcatcttcagaggccgcaaggccaagctctgcactaattccattttcctgaatacaaaacattaaaaaaataaagtcttatataacaagagaaagttgacaaatggttccagatacagcaataacacagtaatgaaaaagtataaatgaatcaaggttccttgacgatgagagataaaagattccatgtcacctttgaagcatcaccaggagttgtgccattaacttgctctgactgattttcaggttccttctcttttcctgctttctgtttctggaccttccgaatacaagattcaatatataccagttggttcatagcaacatgacttacaataaataggtatcgactaagctttgctgcttgaattgtggtaagcacagtaacattgccaccatctatctcattctgcaaatcttcaccaccatcacattcaaacacagaattgagagattttttcaccaactctgcagacaaagtttctggggttggatgaattgtatatattgtagcaattgctctgtcagcagcagaataccatatgttttctggtagcgaaaacccagtaattaagctttgtaaagcagtaaatactctggtcccattactagacaacaacaacttcttgtcctcttgcgataatctctgaagagcaatgcaagcagttctagcaagcaaaggatccactttagcccaacgaccaaacccaatatcaataatgtcttgtaaatgagagctgagaacctcaggatatgactttgcagccatgcaaatgacagataatgcaccacgactttgttctgcagtggttccactaacattaaaacaaaagaaatcccataaagctgacatctgcccaaaaaaaaaaatacaatcccttagttatgagcattcattgagagtttattgggcatgaagtacatatgactttctcaaatatataatgcttttctttaagagcaagtgagtatacaaactgaacagaataacatgtttcacagcctgattctagctggctctcaataaagtctatatacttgaaagtaaatttctactcccagaaatcatcccaatattttacattcctatttctgaagtatttgtttgtactgcatcattcatttcactcgcatcaacataaatgtttcgtaatcaatttcttgtttgcttcagataataataatttttggaacgttaaaacaaactatactttgtaacgtaagttttaagctatcataaattcataactattcttgaaagaaattgataagataaaaatttctcaagcttttggttactatgcaagtacatttaaaaggcagttcaactcaaacaattcaaataaataatgcaaaatgctagtcaagaaatgaaaaaagtgacataccgcagcagtagttatgtcacctttggataccaacaaaccaactatagattccagagctgctagatctccaatatttgattcgattgcaaggttcaagagactcttagcagtatccacgggattttttctaatataaattgttataaaggcattctccacagcttcgtagatggatttgtcctgggaaaaaacctaccacgacaaacaaaactaaaattgaaaaaaaaataaaagccttaaatcttctcaagttttgtaccaaaaaccagaaaatattatattatattaaaatgaagaattggaacaataaaattgtattcgtttctaatataaatcggaggaaaatatttaccacttagtacttaccaaaggcaacatctttcgtagacaagcttctgaaccatcaatttgaaattgtctgcatctcattaataagagaattgtgttctccacgtcagtagcagaagatgatgccatcaattggacaagggttggcatcgtggcagctatacacttggaaaacctcaaaccagactcaagggatgcaactaaggccctggtttgttccacgttcccaacatctggcacagtggtatccttctgaataatattttcttctgtattgggcaagcaactatcagttaagctatccttctgctcctgggtccctctgtcagcaccatcatcaacctcaccatcttcattgcagttttcactttcagatggaaacacatccggaacactctccgaagaaacttctggttcaagttctttcaacttcttcctgtactgttctaaagtagcttcaaaggatgctattcgaagttgcggaccaaatgggttgtgctgcaacatcatgataagtaaatttagtgctgactttctgactattgcactcttatcctccaaccttccggcagcaacttcagcaacctcattccacaagccaattgaaacagaatgttcttcgcagagctcaccccaaacttgaagaacccgactcctagtatatgctgaaacatctcggcaccgctcaagtaatatctccagcatagcttgtttggttcggagacgaacagatttagtattcaattcaccctcaacatcattatatgccttagcaaccagcttccccaagaccccaacaagagcatttcttatcttgtaagattctcctccaaaatgcgggaccaggactccaatgttggtagagagcaactttggcattcgatctgcaagttccaccataagacggccaacattttcagcaccaactgtgtctttcacgtaatctttcggattagccctgcctatatctctaatgagagaactgcccaagctcccatcagcgtacttcttctcagcattggcaactgcatcaacaatatgagtaacaacaaaatcgtatttgtgtactaggtgcatgattgaagcacatgactgtgccaagtattgatatttagtagcacaggccccaattatacgacagagagcgtcttttgattcagtgtctttcaatattgcagcattctcaaacagagaaaaagcattcctaaaagaaggcaaaaataatttcagcttgaattaaacaccaagaaaatgggttcataatcatacaactaattcgtcaacttactttgcaatgaaagaaacatagctttcatcgagatttggtgaaccaaagagcaacgaaaggttgatctctaacgaatttgcaatcaagttgagtatgcgacccctttgtaattcccaattccaagagtttacaagaagtttctttctggaattagcaatgacctgagtgacataggccaaacataaaattaatagtaaaataatggtcattgaagacttgaaagggctgcccatgtatgcaaaatatatacgtgtgtgtacagagcttatacctttgaattattattagatagatagaatgcttgatgacttatagaaccaatacctttgaattattattagagctactctttgactcctcagcagcaatcacactgaacaggaaaaacgtgtagattttaaaagcattacgatgtgacacaactcgatcaagaattggagaatcaccatcttgatcttgcgaaagccgtgagattgaatcaacattagggagaagaacactgagattggatcgaagactctctacaaggttgaatttacaagatggggcgagacctgagtaacccttgatcaatgagtagacactatcaaacacatcttgctcttcaatacaaaagagctccttatctgataggtcaaacgaaacacctgaaaaaaaaatggtatattacaatcttgagtagtataatcatctggtaaagaaattgagtcacaatacaaattataagttttcaaggcttgaaacatgcaatttgcaaaaaaaaaaaaaccagctaaatatgaaacacattccttaactgaaatcaaagaacactgggaaagtgcactaagttcaatctcccacctaaactagttgcaagcatatactacccatttccaagcttaaatctcgtttcttttcaaaatttcactgacaaacataagaaaattagggttctcctacgtcccatcatccaacactaggacactttaaagtgaagaaagcaaacatttgtcctattttcggtactttcctaacctagctgcattttctaggtaacgaaagaggtaattgtcataaaaatgctacagaattttgcaaataaaaaagagataagaaaagtccgacctttgacgaactcttcgagttcggatgaacgaaaagtagttatgtcaatgggattctgagcgcagaggcggttatcttcattctcttcttccaaatctccaagaactctggggaagacgaaggggggagccatgagagagagagagagaga

SEQ ID NO: 184707 - DNA, 4166 bp, Cannabis indica
gtgaaagaaagcagaaaaaacactgaaaaccaaaatcatgaaatgtcacacctgatttatgcaagcaccaacaagaagccccccattacttccaccttctatacacaactttttaggttgtgaataaccagtagatatgaggtattcagctgcagaaatgaaatcatcaaagcaattctgtttctttgcaagtgagcctgctttatgccattcctctccatattctccaccaccacgaatgtttgctatgcagaaaacagcacccagatgccgtgaaagtacgatacgacttacactgaatgagggggttatattaatattaaatccaccatatccatataacaagcaagggtgtgatccatccaaaacaatatcctttctcgcaacaatgaacattggtattttagtaccatctttgctgggaaaaaaaacctggaaacataaataaaaagaacaaaacaaaattaaaaacaaaaataataatacataaaaaaaataaagacttcatatattaactgaagaagtttatcagaagtctaggccacaagaattacctgatcaacatggaaatctgaccgatcaaacccaggaacagcaatttcacgaaataccttaatttctggggtttccgagcctaacttgcattgatatattataccaggagaaagaaaacttgtaaacccaaagaaaactatattgtcttcacgtctggcagatatcccatggactgtgccaatgtcaatgggaagttgatggattaaggaacctgaattgaggtccctcacctgcagaacatactttacatcgctcaagtaacttacaatcatttggttaccattaacagcacatgcagattcaagaacatctttgtcagattcttgaagaacatctgtccaaactgttggttccttcagatctactctgactagcttatatttaggagcatctttattggtcagaaaagtaaacgatgtgtcatcatttgcaatggcttgatactgcgcatcaaaattatcaataaccttaacaaatggtagcatgtcatttttctccctaaaaccttctagtccattaggtagtgcagatatgtcacagtagtaaaatttgttgactgggtcacaaccctcgctaatatccaaaagaacgtactgcaataattgacagaaattagtttatagttcacactatttcatctatgctaaaatcaatttattgtgcacatatgcatggcatcttaaaataaatctcataaatcaatacttcactaacaaaatattcagattactaaaacatttaggctatgtttggaagttggattttggtagggaaagaaaaagataaagaaaatagtagggaaaaaagtgtagaaaatagaaaaaatcaacttcttgttttggtggaaagaaaaattgtacagaaaaataattgattcaacaaaatttcccatcccatacataatttttttttattattttagcatataattacctaaaaaagataagtacagtactacactagagtgcagataggtcatagaacaactaataattcaagcctgaaagacaatagctttacaataaaatatagtgatgagtacatatcaacaattcagaaacaaacaatgatttcaatcatcacaataatggacaaaaaaagaaatagtatagcgtatagcaaatatgctccatccacatcaacataaagagaatgtacatgagttagacaaagctactcctacctttccatcatccgtaacacttgctccaaataaatatttaggattctcagaatccttccagcataaaatatctttggattggtccgtacccaaaagatgataatacatctcatgataaagattagaattggtctccgtcccagcatctatatctccttccctgaagaataaacaacattacaaatttacaattgattcaattaaccgttagaacctcaaaattgtacgttgaagtaaaaaaattgcatgtcacacataagaaaccattggaatattttctgccacataaggagcaaagaacctgcaatatccataagacattttccaaggagacactatcattaaaaaacccaaggcttcctaattttttgatgacaaaacttcggaaacttcgggtttttttttgcttgaacaaaattccagacaatacattcaagtattcaacaatgtgaaatggaaaatataactttaaaaagtaaacatgattaaaaaggcataacataccattgagtgattgtagatgtaagttttgagagtccccattttcttagtttttagttgagaattgctattttttcaattaataattgagctacatacttttttatgcccgaacactacactaactgaagtcatttatttattataagtgatttgtaaaatattcagcattattgtctttagcaacacttctgttttagtacaacaatattctcagcctttggattcataaatttgaaattgaacctatgttttttaaaagaaaaacttacatttaaaagtataaatatagaaaacgaaaatatggaaactcaatttttatgaccacttttaaatttgactaagcttttcttatggaaatcaggaaacgttattttttcatagatacgcgtctatttcaaatttagtagtttaaaactcaacaaataaataattatgtttactaattttattaactggtttcagaaaaacttcccagataggttttaaacgtgcatttcattgtaggcacaaaatgcaataggattcatactttatctattctgtagtaccagagaaggactaacaaatatctaacagcttactttggaggtgggtaacggctgtagaagaaacctttgctatcatgagtccaactaatgccagaaaatttgacctggataacagtttgcacaaatgttcagttccattatcatatgaatatcagcaagtgcttatcattatccaattcaattcaaactaaacgacgccaaaaaaaactcacccaggataaagtatcagtttcgactctcttatcctcgatactcataactttaatggtcacccaatcgctgccacttgtacttagcccgtaggccaagtacttgccattcttacttacggagagtgaactcaaagcgacagtcccatcttcgctaagtgaattaggatccagcaatatctctggttccccatctaaactgtcctaatattagacaaagaacaagaaaataagacagagcaccattgcataaaactattttaagtattcatcaattcaaatctggccagagtcacaaatagatactaacctgtacatataagacgtcttgggcttgaagaccggtgttgtggaagtagaagaccttattccctcgtctgaaaggtggatcataacgcggatgatcaaacagcttagtgattttctcgctaagcttctccctcgtatcacaaaccttaagcaccgattgcgtcagttcaacttgtttattaacaaactctttcgtttcttcagagtcaggatcttcaagcctgaacaacaaaatcaattctactaatccgaattccatctaaaatgaaatcgtaaacacaacagaaaagaacagaacagaaaatgtaaaagatcaaagtcaaccaaacgaacacgaccaatcatttcattgattacatagtatttccaagcattctttacatctacattaaaaaaggcagagagttcagcaattaccagcgataaggatcggcaatcttaacgccatggtagtcatcgacgacggagtcgtctctacgaccagtggggtagtgcaagggttcgtccaagatagagagagagcccattttagggtttgagaaagaggaacgaagcgatttgaatgaaaggaaatgcggtttggttgaggaagagcagtaataataatgatgtggtgtagaaggaagaagtgggtttaataatagagaaggattaaggtttgaaaaaggggattttgtttttaaaatggcgtgggtgtggcgagagtatgagaacattgtacggcccccaatggcttccacactctgtatttgtccacctctaaactttgggctaactcatggatgttgtcattcttctttactatgtcgccaccatgctcttccccctctcttttaaaaaaaatctttttctttttct

SEQ ID NO: 184708 - DNA, 6776 bp, Cannabis indica
aaatagaattagtctaagtttgaccatacttatttcattaattttctattttttaattgaaagggtgaaaatattttcaatagagcatgtattataaaaatatttttactttaaatttttaatttagaattaaaatttaaaaaaatttaaaaaaaaaaaacactttccaaaactttttaaatattttttttcataattaatattttagactccgacccaacttaaattttagaatccgtactctagccccgacccaccacggtcccgaccccagattcggacttagacctgacttaaataagattataaagtaaaatttataaaatacaaatttgttttctatttttaaagttaaaaaaatatttttgtttttttaaaaaataaaattttaaaaatgcaaaatttacttttatttttgtgattaaaaaaataaaaattttatgaaatgtcctttaattttttcttccaaatatttctttcataaaaaaaaaatagctagtttttgaaggaattaaagtgccaataacttttaaagggcggtgtctttaaaaaagcagcaagtaacccaatgttgtactttggcacttgttgtataatcttaattggttatttttaattttaaactatatacaaatataaatattcatctagattataaaggttcaaccattacttggtcatattcaaactttgctattgcttaatttatataatttttgcttattaaatggaatatgaatttgggagtttttttccttttttggtcaacttgataaatgaatattattattgttattttttgctgaaataaattaatagaattgttagtattttgtattgctggaatattatgggaacatatgccttattcatatacatctaaggtcaaggaaaaaaaaagacctttagttgataagattattgttattttctttttttaaggagataattattttttaagaaaacaaaaaatcagtgtttttttttttctgatataaagggaggagggattccaattgtgacattttcgtgtaaaattattaagctaggtctataatcacactaaaactcaatttttaaggacttaaataagaatttattaaccactgaaaacactttaaaaatgaaaaattatctccaacaaaatctgcatattaaaaaaatgcataaacaacttgacataacataacatataccttagccatttccatcaatacaaactccttagcaaacaaatattacatagttttttttttcttgttttcttttcttttttcttagagaccaaattaattaattatcgtattgaattagtaatgatttaagtacttttgcattaatatataaaagaaaaaggataaggccttttatgctagctagcactcaaattccactctaatttttatttctctaccaatatttttaagcctcactgacaaatattttttgctctatttctcgagtgcatgcatgcacttcttaaaatcttggcttataatagacaattttctaatgttttactaatttattccctaatatatattacttgaagtggatcttgaagagaaagaaaaagataatagctacttaatattgtataaattattgatgtaattaagtataaaattttatataaattaattaaataattttttatcactaattaattgtaaagtaacaccaatactagactctacttagctagtaccatatttctatcaatcatcctgagtatatatatatatatataaactgtaaacaaggaagaaaagctattaacagcattgaaggcccaagttcattcaacaaaggcgtcccaagtcttggacaccagaagaagtactattaggactatctcagaatttccaataataataataataataataataataataaagcttttgatgagttataagcactgaaacttcttacaagagaataccaatctttattaaaaataaatgagaatatatggagttatatttcaaaatgcatatgaacttgtgatacttattaaataaataaaaaataaaaataaagttcctacttgtgaatagttttataatataatgtggtcttgttcaaaatgtttaatattgtgagtttcaaataataatttcattttattgtacatttgaaatgttatgtatttcttcaaaaatattattacatgaataaccaaaatacaaataacaattactaaccttacaatattaaagttacggatattgttataattgttaaaattgttactagaatttgagtcgggaacttcataaactcaatatttaccttaaatatgtaagttactaactgaggaaagatcaactttgtcctgaaaacttgtccagagacctttttctactcaaggaatctgttatcacattggctttccctggggtgataaaaaaaacctcacaatcataatcattaattaaccctaataccactttctgcctcatattcaaatctttagtacaagatcactgtaacaagttctaaatcatgtgatgggttacatcgatcatactcctctaattgacgagaagtataagcaatgattatgttggcttgcatcagaacacaccccaaaccctttttggaggcatcacaatgaactacaaacttttcttgatctaataaaaaaagccaacactggagttgtaattagtttcttcttcaacacttggatacttgttttacactaatcaatccacacaaccagctgactttttgtggttaattctgtttaaaatgtggagatcttagagaatcctacccagctaaaccaaaaaagcttcttacttccataaattcttcggtctttgcaaaaccctaactgattcaatctttccttaatccatcataatcatgtctttactgataatgtaacctagaaaatatactcgtgataattaatattcacacttttgaacttaacataaagcttatgttctcttagttgatgtaagattattcataattgttgtctgtgctccacttctgattaatagtatacaaggatagcattaataaatactataaaacaaatataaaagaaatccttgtacactcgattcatgaggtccctgaaagttgtcggagcattgattaatccaaaagacataagaaaaaattcataatggtcatatctaatgtgaaatttcatttttgaaacatctacctcttgggttctcagttgatgatagcccgagcaaaggttaaacttgtaaaatattgtctttccttgtagccgacaaaacaaatcgccaattctaggcagtagatacttgttcttgatcatcagcttcttcaattcacgatagtcaatacatgtacaaaatgtttcatctttttttaacaaactaggcaaaaactccccatggaaaaacactaggctgtgcatcctctgaagttgtaacttcaattctttaagctctgctggagccatgcgataaggtacttcataaactggctctagtcctggtgccaaatcaatgataaagtctatctcttgctatggtggcaaaccaggtagttcttcgggaaatacatctacaaactctttcactacctcgatgtcctctagcccaattatttcgagtctgctagtgtccatcacaactgctaagaatcatatgcatccatcttacgataggtctctaactttccataatgagataaatgggattcgggaatccctaaactgatcccacaaagatgaaaggttcctcaccctcgggacaaaaaggcaccatcttccttttacaattaatattgattgcatgcttagattaaaaatccattccgagaatgatatcaaaaaattttatgactagctcaacaaaatcaacacttaactctttattgtccactctgggatagacctaatccaccttttagagataactaatttcttgctaggcaatagagttcaaaccctaactaattgttgtcacaaggtctacccaacttatcatttattatgtcaccactgacaagctagcctcaacaccggcctaagcaatagtaaaaacacgagctgaagtgggttttacttctttcttttgcctttttttttaatcaaatagggtcaatcccttttatggtgtcccataatactatactgaaaaacaagccatgtctttacaactcatccaggtgatactttttgaaagctgggtatatagaataagtgtatctgtcttcagggccaccttgctgaccatcctgacattgtttttcctagaacctcttattctaagtcccccaccatctgaacataattggtggcatcatacatggtgatcatcaggttatgtctagtcttggcgttgaatcccgcaagatacttttatcccttactaaagtctgttgcacttaattctcgaggccaacttggaaattctatcgaattgagtggtattctttgtcaattacattgacttctccttagttgactaaacaaactttttccatgttgatactgctacatctctgattacgataccctctccctgtgatgcaacatgtcttaccagtcactcagtcactttcgatgattttcataacactagaaattctaatcatagtgtctaattcactaatatgatccttcttgatatctgcttttgattaaactttaagtgatactaaaactaatggaatctaacatctatactaatctacctctccatcttatccttgggtctgattcatgttgttgcaaatctttgttcccaatttatcaaagcatgtggtggatctatattggtaacaaaaaatttttgttcttggtctggaacatacattataatttggttgtattcagaatatgcatccataaaggtcattagctcggtcctgttgtcgcgttgactaactgatcgatccttggcaatggaaagtaatcttttggacatgctttgttcaggtcggagaagtctatgtaggttttccatgttttatttggccttagaacaagaacaagattcaagatccatgtgggataaaatgtgaatgaagttattggctaacaacctgtcaacctctccctttaaagcattttgtcactcaggatctaaaggacgtcttttttggtgttttggtgggtaagagatatctatgttgagatggtgacaaatcacatttgggtcgatcccggccctatttgaatggctctaagaaaatttttcttagtttgccttcaaaaatgtgattaattgttattttagttcttcccctaaaccctttccaattttaacacacttggttgggtcgtttagatctaaattcacttcttctaactcttcaattggcttgagtttatcgtgttcatcttgaatcctgagatccaagtcttccatcttgcatatctcattttcttctattatggttaccatcaactagtgggttgcccttctgttctttaattctacaccataacattgttggttgtcaactggtcgcatttcactgtcccaactctagaatgagttgggaatttcaaggacatatgctttattgggcttactggccccgttctagttagtgatggatgacctattagtatattatatactgaaaggatatccaccatgaggaattcttggatttgggtgactaataaagaggttctcccatggtaagtgggagttcaatggtccccagacttgtaacattgtccccaatgaagccacataaatttaccatacatggccttaatttcacatcttctagccccatcttctttcatgtttctttgtaaagaatatttactaaacccctgttgttaatgagaaccctttttattcttttatttgcgagctaaactgtgatgaccaggggatctgtgtgtagaatctgcatatgcacttcatcttcgtcaatgaagattatcgatggctcctcgagttttgcacgtttaaagggttcaggagcaaaaactgactcttgattttcaacctggttaatgtaccttgggcactattgcaggttccagtgatatgtggccctaaaataactataatatcctcgcctttaactgggggtggttttacatcatggttttggctctggctcttgggttgattttgttcattcccccttttcctcacatactgcttgaaataacctcgagaaatgagtccttcaatctcatctttcaattggcgacattcattggttgtatgtctaatatccttgtggaattggtaatatttatttggatctcgcttgctccttcagttcttcattggttcgtgccttcagaaagcgacccaattctaatttgatgagaaagatattttcataagtttcattcaattctgtataaacataatatattggaacatatttgtgtttcttttattttttcttatcctttgatgaatcttttaattgtttttctttttccatttgattcattccctctgctcgcatttcccaccttccctgttacagtactcacatcagcggtacttgagctgggtttatctcctgagcttgacttgagcatcttcatttcattgtgtgcttcttcttttttgcacaaagattaacgccctgtcattgaattcatttattgacctgactgggcgaccctgcaaatcatccacaactctcctcatgcggtagaaaagtcagtagttataccagtctggagtgctattaactaaatactgtcattcaggtttctcactttcgttgttgttatgctaaaacaactcagataagcctttaatgactctcctggcttttttttaaaaaaaaaa

SEQ ID NO: 184709 - DNA, 4288 bp, Cannabis indica
gtctaggataacctatgaatatacaagctcgagcccttggtgaaaagtttatttagggattgtgaacgtgtgaggcataggctaagtcatccaaagttccttaagttgagtggtactggggaggtagggggcgggggggggtgtggtgtgcatcaattcataggaggtttttctcatgtaaaagaatagatggtgtcctatttattaagtatgttgctgtctttaccatatgtccccaatatagtaagggtaagttggattgaaaagctaaggcacgggccactgtgagtatatgttggtgtttgcgttccactacaacattttattgtggtcggccaacacaagagtggtgattgagaactcctttgcttgcatagaagctggtgagagtgagttcttttgcattatctgttctaacagatttaatgtctgttttataatgaactttgatgtaagtaaattttttttgaatgatcataggtgcatcagatttttcttttagtaggtacaaccaagtataccgtgagtgatcatcaactattgtcaaaaaatacttgtatccttcgattgaaggtaaggggtatggaccccaaatatctaagtgaatgagatcaaaagttgcagcagcaaaattgttattcgaaataaagggtagctttttttgttttgataagtgacaagtgaggcaattgaaagtatgtgcaagagatttagagaactttaattgtttatttattttgtttgtaatgattacagatgggtgtccaaggcgtgtatgccaaggattttcaatattgacattacagatagctggtttacagttggttttgtttattaatggagcttctttctgtatgtagtatagctgcccttgctttctagttatccaagtcatcgatgtcagtgaaaggtcctggacataacaaatgttaggagtgaaaattaaagtgagagatgtgttatttaataatgcactgacagagaggagattgaatttgaatgctggaactaaggctgtgcaaaaattttcctaaaccgcccaacccaaataacccgcctaaaccaaaccgacaaaaatcgataaaaaatacaaaccgacataactcgacaaaattctaaaccgcccaatcaattaattgggcaggttacaaattgacccaaaccgcccaacccgatttgacccgatttttcactttttttttttattattatatatattatataatatataaatataataatatataatatatattaaaaaaaagtcccaaatcctaaaattctttctcagcctcttaaaaaaattctttctcacatatattgtgtatttatgtggttaatttttattttagttgaaacttgaaaaagaaacctcttaattcggtttgggcgggttaacccgaccaaaccgcccaaaccgtcggtcgggttaagattattttttttttttaaattgggcaggttgtatgcagaattttacaaaccgatctttacgttgggttagaaaatatgtagtataaaccgactaaaccgaccgatgtacagtcctagctggaacatagagaacattatagagtgttatgttggaatttaagattatggtgcctgatttttcaatgttcacagaagtgccattgggtagagtaacatgtttattagttaacatattggtaatagaagagaaacatgtaatatggcaacaaacatggtgagtagcacaactatctagaatccaagaagtaggagaaagaggatcaatgttaccagtgatgttgttgactgctggttggtctgatgtagaagcatcagtagtaggttgcaactgttgggtcagcattgaaattagttgctgacattgtgcttgtgtcaactgggaatctgttgttgaaacttggtgagtttggggacgagatgtggaaccagaatcttgttttttgtgaatttgattggtggagtcagatgttcttggttttccatatccaggtagaaaaccatggaggaaatagcatttgtccttgtaatgccctggcttttggcaatgggtacaatgaggacgaggcctttttcttggatgtttgatttgcagcaggatcaatgctgagtgtggatgttgtggctgcagcagcagcaatgtggggaatgttgcaattacccaaagttctttgtctttcttggtggatcaccatggaattgactttgttcaatgattggcatggatcaataagcaaaatttggtctcgaatggcatgataagactcatgcagacctttaagaaattgcaagacttgatcatgatttatgtgatcttggttttgggcagcagcagcacaaacacatggtattcttggtctgagttgattaatctcatcccatatagtcgtgagtttagtgaagtaggcactaacagattcatcaccttgatgaagataaagaagagattcatttagttcaaagattctagggccattaccttgattgaatcggttgttgagcacaatccacatctctgctgctgtgtccagatacatgatgctagttttgatttctggggaaattgagtgaatgatccacgacataaccatctgatttcatctgttccaggagttgtacaggggatcttgtggaggaggttggggtaaagatccatcaagaaatgaagtttgtttctggcgccaatggagagtttgaagttgcgctgccatggctggaaattgcggtctgttagaacaggggtagccattaccaatccaggatgattagcattgttgggaaaatatggggatctcacgtcttcgtatgcaggacgattatgaagaggaggtcgagaatcgatcgcagtggatcgggaatctggaactgggtttgcagttcgatctgtgttgtcagtggaggttagtggtggggggaactggatcggcatcgaccatgggaggaagatcattggtggtagccgaagtagttgtcctaattctcgccattgatgattacttgtatgtgcaagattaagtttcttgaagcttcaatgagttgcatctgataccatattagctttgaagagctgaaattgatttttcattaattggaaaagtaatacaatatgttcataatggcaaaatgactgcttatatatagcatgggaaagtcggtggatataactaaccaactgaatataactaacactaataaccgtataactaacatgaactaactaagcctctaagaatcctttaaatgcaaagttcgaaatgttttattatccgaactagaatttgtaatttaaatgtaaatatcttcctcaaaagaaggatagtcatgcgttaggctagactattataaattaacataacttaagtatgtaaaggagatacaactatgattcctgccacagtgagaaaaccctagagaaaaaggatttgcttctctgaaagcatcttcctcataatgaatggtttgcttctttaaaagcatctgcatcattgtaaaagactgcttcacttaaaagcatatgccattgtaatcactcaagggaacataaagttttgggaacataactctgacctgttcttgaacattgaacacacaataaaactagaagtggactagctcattactgttgaaaggggataaaccactataaactcctctgtctctttttattctaaaagtttactgagctgatttactagacaaccttgagggttttttttaatcgttatgttttacgatattcttaagtcaattaacgaaaaactgcgtcaataattgtgttctcatattttttctttttattttcttgttttcttattgttttatagtgtttagtaaaattttaatttaaaaaatttataaatttgtatttttttttggagtgaaaatatatatatattaaaattatgcccaaaaaataataatttgtgcgaaaattcctttattaaattggtcaaactgtaatatatatgtatgagtcaaacccaagaagtgtccttttgacaattgtcatttttacatttttagtgatcaatctaatggaaagcagtgttacatgcattaatatatgttaggccaaattaaaaatatgcatataccttgattttgtgctatttggcgtgttgtctcagctatccctttctgcatttgtatatacagtagaaaaaaaagtaaactaaatataaaggtataatcttattttatttctaaatataaaggttaatttatttggtataagctatctttgtttatatgacaaatgatagtggcaagtaaagcaccattataatctcttctttgg

SEQ ID NO: 184710 - DNA, 2897 bp, Cannabis indica
tgtgcagtactatcagaaccagagtgatacttctcatgcctcccttcacatcagatctggccacccatcctctccggtacttactactactctcttttctcatacttttctaaactggtttttgaagacaatccatttctagttttacccatataatcatatttgcatttaattcttttaattgggtttttttttttatttaattctcaaattgtttagttgcagtgaactaaatagtgcactttatggtgtagaaaatttagacttggatatattaaggaccttctcaatttctgttttgttttatttaattaagcctattgaaattgtttgattcaaaaacttcaattcaatttaccatgatttggttggcaaaatttaggaggcatgattttggtatatgtaaaagtttgggagcaaatggtacagggactgttgagaattctgaggttatatcttaaaactaattggtgataagtggagtaggtcatattcttatgattcaacactctactatttattccatgtgagacaatatccacactattctccctcaagatggtggctattttttggctcaccaatatggacatggtcactatctgtatagatacagattagataggattatttgtccgcaagtgatatagctctgttttcatgttgagaatgttgacgtatattaaaactaattggtgacaagtactattaggcatcctttagtaaaattcaacagaattggatgatagtccttgacttcaaaaatttcaatagtttttaggtaacttttaagggcctgaaaagtttatggaaaaaaaaattctaagaagcatttaattaattatattgtgtttcttgctgtttagatttcatttggacttattgtagtaggattgtgcaacttttaagggcctgaaatgcagacttggaaaatagattatgtactttttcaagttctgtttttattaaaagggtcaatagaacatgatattggattgtatttctatgttttgtgtacacttgaatagattatacaaggacattctcaatttttgatctttttggtaaagggtctttagaattcatgatacgattctttcttgctattgagtttacattttgacgtgctatattagcagcacatactttttaactcacaatatttggtattgtattttggtacaagattgatttcatattaggaagctggattcactgtcagctaccaactggaggagcattgaacataacaagtctctcaacctatctaaaatcatcaacagactcaccaaacttcttcatggacatcattcgtagcagccctacatccctagtcctcatcctcgatattccacctcgaagggaccttgccctctatccagattacctcaaaaagtactatgaagacaccaacttggaagctcaaagacaagtacttgagaaagtccctgaattcaagccttacttttctccatctctttacatcagagcattcgtgtctcctactgtgatcacagccagaatcgaatctgattcagtggaaagaatggaggagattatacaagaccatgttggtgttgttgctaagcaagtgcttgaaacttggctggatacatgtgctgttgttgagaatggagatgaagttgatgagaatgagagagagtaccttcaaaagagggatttgttggtgaggagcaaaacaattgagatcgacttggcttcgagtttgcctcgtttgtttggacctgaaaccgcagaccgaatcattaccactatacaaaagtattcctctgcatcatcctcgtgatgatatatgaaatctaatatgtagtacaatacaaggttatacatccatagcttttgaagtgtatttgtattgtgagtatgtatataacatgtgtgtaaatctttatctgacattgttttccgactaacacaacattacaacccgcaacaacaaatagcaactagcaaagcttaagccattggcagaggacgtcctaaattacaattgaaaaataggattctcttctacagtctagctagcttccattttctttcataggtacaggaattggatatttatatatacatgaaaacggatcataattttgaatggagcatatgttgtccacgtacctaagctatatgtatatgttgtattgtattgtataatattatattgaattatattatgctttactacgtttagttattttttttttaagaaattactatgtttagtattaaattgtatgaacatataaatattctatattttgatataaataaaaatttaatataagattacataaaaatatgatataaaactcaatttaatgtagtactatataatatagtaccatctaatatggccaactaaatgaaacctaagtgagttgaaaaaaaactgattttcaccttttgatgcaactttactagttttgagggtagttataaatgcactcaatgggaaggagtcccgttgggtcattagtaattatggctcattttgtaacaatcactcttcttatttttttagttgtattttctctaatataagcaggatttgtaattttgttgtccataatgtggctaagtgggccttttcccacaagttggttggtgatattctgctatccaccatccctttgaacattttatataatgaccgcgaggtttagcttgttgtttaatcaaatacgctttcattcaataaaaaaataaagaggaagagcaatagcttcttgagaagctaagaacaaaaaagaagtcatccaaacaagtcataaatgttacactcttaatttaatatgactaattacgacatggccattaatttaatattggagcacaatattacaaaatttatgctaaataatataattatttttttt

SEQ ID NO: 184711 - DNA, 6214 bp, Cannabis indica
ttttttttttaaatttttgttgaattagcctttttttaatctctgtttctttgatttcagtttaatccctcttctaccggagaactccagcgaacagattgtttaagatctctcagagagatagcaattcctctagctgagagacctgctaggggtgatttaactggagaagtatgtcattgggcagatggttatcacctaaatgtcaggctgtatgaaaaactacttctcagtgtctttgatgtactagatgagggaaaactgacagaggtgagtactcttgctcttggcatgataacatcatatcaagttgaacacttttttatgacgttaaatcaccatcggacagagaaagatccagttgaaaactatgtttattagattcttgaattttcttgatttttgcaaattattataaggcgctaaacgttttcttgaagcaagggatcctctataattcaatttttattttatgtttattttttacgtgtagttttttctatcatgctttaaaaaattctctgagaagtgaaaagtttaaattagcttgataccttctaagaccctgtcttattgtttccaggaagtagaagagattcttgaacttttgaagtcaacctggcgtgttttaggcatcacagagaccattcatcacacctgctatgcttgggtattatttcgtcaggtaagattcagttggagttggcttttcttttgtactaatagctccttatgtgtgatatctttccatatcgtatacgtgaacttaatggtgagactcttgatttgaggctgaatacaaactatcatgctaaattattgatgtcataatcaataacccccacaacaactgctggaactgacattgtgctttgtagaacttaacacttgtggcctctatctaccttatagccgatattctttaggtgtttttttgtcagtaaaatgcttgatgttattgtctaaaatgatatttgctattcatattttactattatctttattttccctttgttcatgaattttggttatttatgtcaacagtatgttattacaaatgaccaagggatcctaaagcaagcaattgagcagttgaagaaaataccactgaaggaacaacggggtgcacaagagaggtcacacctgaaaagtttgtatgctaagattgaaggtgaacatggttctcgagatgtttctttcttacagtccttcttatcacccatccagaaatgggctgataagcacctaggagattaccatcttcattatgctgaggtatatttttaaaagttttttttttaagttttatgttgtcacctagaaattccccccaaacctacacttaaaaagaccaaacgaaagtttgaaatttgagcagcctatgacactacagcagttgctatgtatgttctttatgtactgggaaggctccgcctagggttattgttgtcaagtacaattaggcttcacatgtttaacattgatcactgttttctttttgcttctgggtaattctttatagttctgcagctcatttttgtactccaaaaccctgtaggactcggccatgatggagaatatggtagcagttgcaatgatttctcggaggctacttttggaagatcctgaagtatgcataatgatttattaacaaatttgttgctttattgtatttgtagcctttgtagctttctcaaatgattattttgtgaaagtaatctcacaaaaccagctcaaaattatgaagcatcgtcttgaaacttttcaaaaaagccagcacaattttcgaacatggcaactcaaaattttgaagtttcttcatgaaacactatgctcgtcaaattatacttgctctcagaatttttcttaaaagctatgtaaattcttattcttagcaacatttgtaatttttgttttgaacaggcaatgaaacagttcacatccacgacagatagagatcagatagaattgtatatatcatcatcaattaagaatgcatttgcaagggtaggtctctaacttattatgaaatcataatattttctcgcttaggcaattttttaacttagtgagatgttaatgttagtttggtcttgacagttgagggaaagaccatatttttacacttattgccagtgggtttgtcttgaggttgagagttccttgtgggttgactaaaaaagtacaaagaatattgggttgttattttcaggctttgttagtttcattacaggatggatggaacaaaacgtttctttaaattttttgtttctactttccctacaggggattttgtataatttgcaagggaagggagagtggttaaaataaaggggtgatgacttgcctgcctagtaattgagagcaaatatgtttcattttattcataatttggcaaaggtagaacacactcaagaaatcaagtgatacttgtcatagccataacgtagttagtctcatgctaggattggtagaaaatcaatttgtcatttaactcttcataacaggtattgcagattgttgataaattggaaacaaagcatgagcatcctttggcattgcttgcagaagaaagcaagaaacttatgaaaaaagattcaaccatgttcttgccaatattatctcagaggcacccacaagcacttgttgtctctgcttcgcttgtccacaggctttatggaaacaagttggttagtgtatctcaatttaagatcagatgccatttcccttggtttcttcactttactatgagactagcatcttgattgaaacacttatttcagaaaccttttcttgatggtgctgaacatctgactgaggatatagtatctgtatttccagcagctgatagctttgagcagtttactattgcactcattaagtcttcttgtgaagaggaaattggagatgctttgtgcaaaagattatctctatatcaggtattacccttggatcttttatttgttgtcagcctagttaaaatctccattactcctcacaacttagaatttttttactcttctccgtgaggaaataacaaagttagatgttttagttagctagctaaaaagaaaggtaaaagatttggttcagcacttgatatttatcaaaagaacggtttcctgctgccctagaaattgtttcatttgagatattgtaaattctccggactcctgatatatttgtttccttcacactcccattccataaaagccacatgttgcatactctaacatcttcatctctatgccattagttggttatcggacctgtagatcctaatgaaatgtggcaactaggagtctaggaccaaacttcttggtgtaggaaaagcttggaaatggttataggcttgacaactgttgtaaccagacagggatataatggttcctcatcttatgaatggctcagatatacttggatgcatatgctaataaaagatattatgtcatctgacagaatctacaggtcataggaggagatatctttttatgctatacaaaatacttctaaaaatgctgtacttcatcatgtttttcatacagttcttatagtttgaaaagttaatggctcattagtcttttttgtttttgtacttttatattattaagatattattagcagacttggtgcttctataaagtaaataacagggaggtcccaggtgcaaatctgagatctcaaccagttaccccaaccctccctcatctttgataatcacaattggcacaattgttaatttgtcaatccacatttgatgaataaagaattatcacgtagagagttgttatatgctttgatattacatgtgctcgataatcatctgaattttcactacattgttttttatattcagaaatcatatgtatgcctgactggggcatgcacaaagttttgccagttatggtttacttctatgatcactgagcctaaatcgtgtgaaactattagttctatacttagggatggataaattgtagccaaacatgttagttgcgttttgtaatttcattcttgttatcatctatagtccatacttcacaatttaatttttgaacaaacttttcagattgaatccatatctggaacattggtactgcgttgggtcaatgcgcaacttggaagaatcttaggttgggtggagcgtgcaattacacaggaggtaaaggaaaaacaattttgctgttttgtttgtttgtggttttaattttggcacttttgtgctattcaactcaatctcttcgctcatatgtgtttttttgaaacataacttgaagtcaataattaaattaagtttctttgagattaatttctagcagcttacttctatgttggttaagttatttggtactaaataactgcaaagatcacttgatgggatatttatgtcaatggatatggaaatcctttttcttaacaattaatgccagggcagctattctgctttagggatattccacgactcttcgattgtggttgtgaaagctggcatagctttgtttattctgtgatgttttcaaaaactaatgagattttctttttgaaaggaatgatttatggtgaagggtgctttggtagcttgggatatttgttctaagcttagttgtattgaggggcaggctgtgaaaatttggaatgctgttaaaaggattggttaagtatgtaagaagggcctctgttgaaaattcatggaaacttaaacttgttttgaataattcttttgacttttaccttctttttttcattagaatgacttttccttttgttatcgagttctcaattaatgtaatgctttcttattactaagaaaaagattgaaatgtaaggtcatgccatactaatatatgtttttttaacagcggtgggacccaatatcacctcagcagaggcatgggagctcaatcgttgaagtatatagaatcgttgaggaggtacaagcctttttattgtaaattgtgtgtgtttcttaaactacccttagttattttgattattgttaagatctttaatagtaaacataatcaatttttacctagtcttcttctttcctctgcttgggttgggggttacatgtgagtgggatgggatttaagtcccttaaatatatattcagtgaaaaaacaatggtatttgattgctcttaaaatataaagactgcttgaaaccaaagcttcaacaattcaggtactgaacattgaaactgataattggtatgaagttaatgtctgcaacgtaggtactaagagttgttttaaatgaggatgtttattttataaggaaataacttatgatttcttctttatctaataaaaaaaaatggttgttgctcaaacaaatggtttttaattttagaactagcatttttggagctttcagtatctcataattgtagctaatgttatagtatttgtatctgttcaaaattcactgttgctattgtttatataaatattgttaaaattcaatttcttttctctgaggcagactgttgatcaatttttcgctttgaaagttccaatgagatcttccgaattgagcagtttatttcgtggcattgataatgcatttcaagtatatgcaaatcatgttgttgacaagttaggtgagcacatacgcttaattaatccattcattttttttttcattgtgaagcagttttgattttcattcatgttagagttgtatgttttttttttcactggttttcttagcaaaatataaacgctgctacttctacgcctttgaaaataggaactactttcttaacagttcttatttctattattcatctattgtcttcccaaacaatgtgtttaatcaattttttctatctattataatctaccaattttttgtctgcatataccttgaataattaattgttgatgcaggtagcaaagacgatttaattcctcccgtaccaattctcacacgatacaggaaggaggctggaataaaggcttttgtaaagaaggaactctttgaccctaggcttcctgatgagagaaggtccactgaaatcagtgtccgaacaactcccacactatgcattcagttaaacacactatatgtgagtccaatccagtccttatctagaatcattttccttcatttattttttggtgggcaaaggaatttagctataatgattctttttaagtatcctctctcacatttacatctaactaaacataagtatcatcatcaaatgcat

SEQ ID NO: 184712 - DNA, 1390 bp, Cannabis indica
taaattctactattattaaacactagtagtgctcagtatttttttataagtatcattttatgattagttaacgattttttttaaaatttattttcttaagttatatgtaacccgttacttaattacaccaataacggtttgacactaaaaaaaaggtgctagataccgatagtgcactttagcaattctcaatacattaatatattttactattttttttttcatatggggctgcaaaatataaagagaaaatattgtatatctattttattttacctgctttaatttttatttttatttttatattcttcaaaatatatttacttttatagatgatattcttattatactctttaagttattttgtgctacttaatgtgagagtatattacacaattaactcacaaaaataagtaagttttaattatatataatataaatgtattaatagataaaaaaaagaaatattcataatttattccacaattaaaaggggttttgatttaaaaacttatctaaagtacaatcctatttaaggagtgttactattaatttctactttaatcttctatttttatttttattgtaattgctcaagcttaaatatattcttatctaaaataagcaactgagatgagagggtgggcttttgtgtctctgtctgtgtccatcatcagtatctgtcgacagttttcaccaattggttatgaaataatgataataataataatgatgacagaagaaactttcactagtttttgtattcatatgggtcacaactggttttagtgaacaacatgttatgtcacagggagcacatgtatatatattgcccaaaccaataagaatttattgctttgtttttgttggttaaaataaatagataaagactgctcacacagaaagagtaaaggaatatgtgtgaactaaactgagttttgattaaattaaactctctaattgaattgtttgtttttgttcttcttttgattttaggatttgaagaattaattaagagaaaaattgatataattttgtgtttaattaattaaattaaatgcaacgtgtgaaaaaggtaacgtgggctttgggaatttgaattgtgaagtgattgggtggtcaaaagggactttgatatctcagacagtggatgtctagctaagctttactactttaacaataaattctctcatcaaacacagctaatttttaataaaataaataaattaaactaaataccaagttgaataatgctttccaaataaaattgttagattttcagaaatcactttagggtttggaaaatgaaataaaagaatatctgaataaaatcttttgtaacataaaaatgcataaatttgaaattttaactatgtttagtaaggtgaaa

SEQ ID NO: 184713 - DNA, 2125 bp, Cannabis indica
caggcactgcctacaaaactgtaatcacccaaactaaacacatcgaattcctcaactcaaagccttcacttcgcaacaagtaaatttcatactactgttattagttcaattcaatatcagaattcaaatcccccattcatggaaatatgtttaatcacgcaatttgatttagtctcacttttcgtggatagtacttctttggtgttaaagggtacattaacttataagctcgagcactaatctcaaagcagccacatgcaatgtattaatttgtttataaatgacaattctttaacttgtaatcttggtcaaattacttttaatcgtgtcatattcatctcactctcattgggcttctcacttttctcgaattagaatttatgtgatcatcacaagagataacccaaaaaaaatagtaccctatatctttgataatagtacccaaaaaaacaagatttatcattcattaatagcaattagcaaataatactaagaaagagcatactgaagcatactttcattaacaatgatagctgatttgtcccacaccattatcctacaaccatgtcacctacataatccaataggctgaaaataaagaaatgcatactggagcataatttctcataaaaacgagtctgctccaaccgcatgagaatcaaagatcgtgaacttgaagtagaggttagccgttctcattcaggttctggtgagccacctggaaccagctgcattgtgcacaaaaatgttaggttagctttcgataagaactcactgcaaagctcaccgaaaacaagtccaagctaagaatatttggtttggaaacctcataaccacaggaatcaatcaggctatactaatagataatatgctttcaccaagcaaacaaaagattcagttttactcacaattgcaatgttgttcccattcagcaaaatctgatcaagcttggttatccgtcttccttcggcagtgatctcgctgtgatttcaataaagaagaactacacaagttagaatattatattttcttatacttgatctcccttgaacactacaatctttgggaggtagaaacctcaagcaaataggtaagtagtttcacatggggaatcaaaatctccatgggagcaaaccttaggcctgcccactaaacctaatgctcatgggttgccgatgaattctattcattacataaagacaaacataaaaacatgtaagaccagataaaaaaaactaccaagtgtatgtggagaacacaggatgtcatgaacaataacaatcaacccatggtagtgtgaaaatatgtagacgcatgacttaatggcaatggcaaagaagacaaacgagatagatgtacttttcccaaaatggttgtaagaagttaaaataaactattaggcagaacagttagataacacagaagcacagaaagttagggttaggtgatatcaagcaactttcagtctacatatttcctaacattgatatcatccttgggcatattatactcgtacagaatgtttagttatatcactttattaggtagttctcacacagaatgagatattataataacagatgtatgcaattcggaatgatctaaaaaaaagtgatattaagatttgtccacccacagaaaagtgatatagaatcatttttcagtatcagagaaaactgaacatttccttctttttaatttttcatataccattggaaaactctaataaattgctaattaaaccccatgaaaaatcaaacccaaaatctgatgagagtaaaccatgagcttaccaccaaacttacaagttatacgacagaaattataatagattataagatgtacagctgtacacaaaagcatattgtggtaatatgtcatgttcttgggctactctacttcaagtcatgtttcattagtagtatgatagatgactagccaacactctcaactctctactctctttatttttctttcaaatttctgtttaccagctatagcccatttaccagtaagatgcaaattttacatttacttaaacaaacataaagactgaatgcctaatttttcattataaaatttaattgaaaactatatgaaatgtaaagtaattgaatataaacag

SEQ ID NO: 184714 - DNA, 3366 bp, Cannabis indica
tcgtgctatgcttggaaggtctggctcttcgctggttccgcagggaaaatagacagcaaaaatttgcacttgggaagaactcaaatcgttgctgctaagacaattcttaccagttcatcaaggttctgtccatgatcgttttctaaacttgcaacaacttcgacaatacaagaatacattggcttcctcgcttggaacgattgatggatcactgaaggaatcagcatctatgaacaggttagtcatggaaatacaaaacactaatatccttagtgggcctcttcagattcatgggttacccatgagttcaaagggcacttatgtgcaaagcccaacaataataaacaaagagaagtacgtgccttcatcttcttcattgcacgacacaaccaatgggtattattaaccaaagcaaaaaatcaagagaaaaaaataaaggagttaacttcgaatgtgatgatacctaagctcgtgggcatcgttgtacagctctagagttgaaagtgattcgaatctaggagaagatgtgggaagcagagtagtcggccatcgaggaaaccttaggaattccaaccgatgaggtagtggaggcgcaaatggtacaggtttttttaaacacaatggacatacttctcctaaagccatgatattattagggaacatcaatgatacggaggtttggtggacagtagggcacccacaacttcatctcaacaaaaattgtgaacaaattggctctgccaatagtttcaacagtttcaacagaatcttacggggtacagaagggaaccaagaaagctgggtatggaaccgaaaattgtaaggcaattcaattaacagtccaagagctcgttattattgatgtttttctccctcttcccttagacaatacgaatattattcttggggtacaatggctggagactctcggtcacccaatggaaggaatatagaatgaagttaaatgttggtggcaaatcaatcacattaaaaggagacccatccttgcaacgatcttgagtctcgattaaatttgtgattcaagcacttcaacacaaaggagagggcgtttaggtcgagttaacaatacctttgtttttccagaacgaatggtgaaaagtctctcaatctcaagcctgttacagaagtattcaatggtgtttgagacacccgcaactcttccaccaacaagaaatcacgaccatgctattatccttcaaccagggacctcacttgaaagtgtgccatcttataaatacgcccacgtacagaaagatgagattgaaaaattaatgggtcagatgttagcggcaggaatcattcaatctagtacaaccctgcccaatttttcacgtaaaaaagtaagatggtagctggagattttggcactaaggtgattccaaagattgatttgaaatcttcttatcatcaaattcgggttaaggcagaggatcttcacaagatagcttttaggactcgtgagggacacggagtttttagtgtccctgccacttttcaaactgccatgaacaagattttccaaccacatctccatgactttgtgttggtactctttgatgacatattagtgtatagtccaaatgtcgaaactcgtgtagaacacctctccatagtgccccaaatcctttttcagaatcaattctatgccaacctcaagaagtgtcgttttgggccgtcgaagatttagtactagggccatattatttcggggtagggagaataggtggacccaccaaagatcctggcgatgcttgattggactcaattgactactatttgtgcttttcgtggattcttaggtctcacgaggtactatcataagtttatggttggatatggtagtattgctcatccaattacgaatcaattgaagaagaatcaattttgttggtccaatgaggccacaacaacctttcatcgtttgcaggaagcgatgactactgttcctgtctttgctcttctcgacttgctgagatgcaaatttgtggtcaagacggaccaaaaaactctaaagtaccttcttgaacagtgagtcttaacttcagacacgcaaaaataggtgatcaagctattcgggtatgattttaagattcaatattgacccgacaaaggtaatcgggttgcaaatgctctaactcggatgccttcggtggagtgtactatacttactacaaaattctttttttttttgaatcgggtaattattataataaattttgtagaatctaagaatatgttagcattgttcatattccaatggcttaaaattgatctaataataagaaaataaaagatttttcttaaaattcactacaaaatctttgcaggatttagatgttgtgaccaaagaaaatcagtcaagacagttttttagctcgtaatctcactaatttggagagaggacttctcttttgagcatgggaagttgttatataaaggcagattagttttatttgcacccttaaacttgattccttagtttctaaaggaatatcattggtcttctattggggatcactcaagcgagacttgcacttatcaagccagaaatgtttagttgattggaatgaagaagtattctgccatgtctctagttggtcttctacaactgcccaaccaagtttgaaatgatttgactattgacttcattaaagggtgtaatgtcccaggaattatagttataattaaataggcatattttatgaaatataaaattatgtgtgttagaagattaatggataagattacgatcttactacgataattaatgagttagatttattaatcaaaatataaaaaataagtgtaatttattaactacaaagatattctagaatatatatacatgacatacacatgctataagtgaattaaaatatatttagatccaacaactgtcaaaactcaatggattggccagagatatcacaacaatattttatgagtggtaatagtaatgagaagttttattacggggtattttaactaattcagtgttaaattggatggagcattaaggtaacctaactccttcgtctttttaaagtttctgtatgaatagttttgttttgaatttgaatttagggttagattctatggagttaatttgagtattagaatttctactgtttgtttaggagggtttggggttttgaactcaaagctcacccaacaatggtaaatttgacttttggtgattttggatgccttcaaagtgtggaatatgtttagattatcgcatactattgttttagtaagtttgataacatttgattaaggtgggagttacctttaagggcctggagttgtgtagtttcgaacacttttctgcccaaaatggttttg

SEQ ID NO: 184715 - DNA, 3530 bp, Cannabis indica
aaattagaggttattcttgaatacaggattcttaaatagaggttgtactataacatgtacttaggtatacatagacaatgattcttgacatttaaaagcatttaactattggaagggtaaatagcataataaatgtgagaattggataaaattgatttgtgaaattaagtgtcacaaagtatatcagtctatagtatgttctgtcctactatttttgtatataatacaaccgattagtaagtgcgctatattatgttgtaattaacttatgatgatcaggatgacaattcaacaaaactgtcatcacgatcatgatgaccctccctcgatcgttgtatgatcttattttttaagtttaaaaaaaaaaattttcgttcttaaaaaagtaaactatattttatttaataatgtcataaatatttcggttatatatgggaaaggatgagatttatttttgtaatatgattgggttgtaattataagttgtgaactgtgactaaacggtttctgttcccgaaagatttggcaccaatatctcattcttaaaacggaaacacaagaaagaaaagaaatacattattaatacaaagagaagaaaccgatagaaaaaaaaaaaaaaaacaaacaattttgatttaattagttgataacataatccaaattccatataatcatcaatgaaaagagtaattaaacgcacaaatccttaacctttaccttaattaaacgtacaaacaaacaaacgaaactccataaaataataatgacatatttttccacaccatattgaatgtgttcctggatcaagtgcttattcattttcaatggccaaagctgatgccatggctgccgcagctgccgccaccaccaccagcgacagcccattgacgctcacaactacatctccttcctcccctaccacccctgatggatccacaaagagtgatcagaagaagaagaaggtatgcattattttttttttttttgacgtttctcgtgtaattataataatatgatttatatataggggaaattttaattttgtgttaaattataaaaaaaaaaatatgggttttcgttgggattgattagcttttctttcttttttttcggatgaataaagtctataatccctaggcttttcggttcaaagagaaataatggagaaagcctagatgcagaggcactactggatgatcttggtatttttttatcctttgtgaattttattatttatttattttagatcgtgacaaaatgattacatcaagaaatgtttctttggtgcatactttgctctctggaattttcatccctagtaatatgtgcacaatataaaaaattttaaaattctgcaataaatatattaattacaccaataacaatattataatacttaaatattagcgttaaccatttctgataaaactattatgttacacaatcaatagctcagttttgatcatatatgttatatatggccacgtaggtcgataaataataataagtcttctccttatcccttcttgtgttttggtagcttacctaacaagaatctgtgttgatttttccccctccataaatataatctgcataatttcaaagcagagaaattaatgagattatgaaatgtgttcacatagaccgatcgtacagggctaatcatttggtgaaaaaaaaaatgtcaccttagctagactttgggacaaccaaataaaatatattacggtatatatctataatatgtgatggtataatttattttaatttctcagaaagacatgagaggacttcgggcaatatcgaaggcttaaacttgtcctactttgaacgtaattattctatgacgccaccaacagagatgaaagaattgcggtacataatatatatatatatatatatatatttatacataaggaattaaattttttactgaataaaacaaattaataatctaattttacgttaaaatgggtggtttcaggatgtttgtggcaacctggaatgttggaggcaaaactccgaacaatggtctcaaccttgaagattttttacaagtagaaggcgcatcagacatttatgttttagggtaataaaaataatgtgatttttttttgtttgaagtatcaaattttatatgaaagtaacatctttgttattattaattttgtttttcaaggtttcaagaaattgttcccctaagtgctggaaacgttcttgtgatagaagacagtgagccagcagccaaatggctaagccttataaaccaagctctcaataaaccgaaccatgactcggtgtattcagactcagggacaaatatcaactccaaaatagtgttgaacaacatgaataataagtactcaaataataagcctaataacagtaataccggtcttcacttcttccaaaagccttcactaaaagttcttagtaagagtttgagagccgatagtagacttctcaagtcttgcaactgccccgaagatggggagttttcgttatcgccagaaagacagccacggaggaggctgaggaaacggctgttccacgatgatcatcgtgatcgtgtgagtactaaatcggaatcagaatctgggccttgcccaagttatggaagctgcgtcgatgaattctttgccattgctgagattccatcttctcctctctcatcttcgccagcaaataaaagttatagactaatagcaagtaagcaaatggttgggcttttcttatcggtgtgggctcgaagtgacttaatcccacacattgcccacctcagaatttcctctgttggaagaggaatcatgggttgcctcggaaacaaggtacattacatgactatttgaaaacctatgaaaaattcaaagaatgctcttaaaacatgaccacatttaaaatatattttcagggatgtatatcgataagcatgtcagtgcaccaaacaagcttttgcttcatttgtagtcacttagcttcgggagagaaggagggagatgagattaaaagaaatgctgatgtgagcgagattcttaaaagcacacagtttccaaagatttgcaggaagccaaataaccgggcccctgagaaaataattgatcacgagtacgtatgcgcatcttaatttgtttcaatattttaacttttttggttaatttattaatttcaatattcgtagtagtatctatacacattacacatgtacatatatatattcaatttcgttatgtatattattaattaatatgttattatcttcacaataaacttcatgtagccgaataatttggcttggagatttgaattatcgtgtatctttgagctatgacgaagctagggttttgttggaagataatgactgggatagactcttggagaaagatcaggtttgttattttcgtttacataaatccatacatccaatcgatttgttgtgacatatatatattctcctcctttcggaaacgaaatataacaccaaaatttgtttgaaattcttgaggaaatatttatttgtgagattaattacg

SEQ ID NO: 184716 - DNA, 4405 bp, Cannabis indica
aaaaaaataaaaaaaaattggcattccacacactctctctaccatttgtttctctctctaaaggaatggaacccaatgaaaaccaactcagctacttccagcacctccaccaccaccaccaacaccaacagcagcaacaacaacaacaacagagccccagctccggcgccggccctgcggccgccgcatctccgaccaacggccttttgcccaatacccactcgggcggcggcgatgggacccacatggtctacccgtctcactccgtcccctccgctgtgacgtcgccgctggagccggccaagcggaagagaggccgacccaggaagtatggcactcccgaacaagccttggctgccaagaaggccgctacgacgtcgtctcactcgtcttccaaggagaggaaggaccaagccgccgcttcctcgccttcctattccgcctcgtctaagaaatcccagttcggtgctcttggtgggtttctctattttcgcaaaatttggctgatttatggttcgaaattgagtatttcgatactgtgtttgtttgttttttttttttgttgtatccttaattgcatggagtttgtttctttttttggtgcattgtcttcgcccccttcggtatttggcctttttttctcgcaacattgtgtggattttctttgttcatttaggtgggtatttgagaattttcaacttttgttttcccttgttgaacttcttatgttctcgagagtttggtggtggtgttcccaatttctggaatataagtattggtttttggtgcaatcttttactgctgtgctaatcaacccctaaacctattccaattccaatgtaataggtttttgcatgtgaatgtatgttgtgttgaggtaggcagtctaagatttttcagtactgtgttttggtattaaataatgattacttaaatagtttgaattacagcccatgttacttgtatgaaacgttttatatgaggaacatttttctgctttgaaatggattttcaacgctgtcttctttttctatactgtgtgaaatattaattttctaataaaaacttgtctggaatattctttagactattaaagattgactcggttgttttattttacttaggtaacactcttacagatctataaataattatcttttttggaggctaagatgctatttttgtttgacttaacttctaaaacgagaaaaatgtcagataactcacatagaaaaaagttcatacaagtaagaatttttttagtgaattgttaaattgcttctacactaacatatagattcaaaacctcgtctacttccagtttatatgtcgaaacattaattgataacacaacttatttgatataagatttttttccccttttttataatttttgaatcctcgttcttttatcagcttaccagatttattctcctatttttttttttctttgatgcaggcaatgcaggacaaggttttactccacatgttatcaacgtagctgctggcgaggtatgcttgcatccagccattatggattctataatgttcattttagatgtttgacagttacatgaaacaaaaaagatatacatcatgtttttttattgctgaacttttttaagcaaaatagtgaaacgtaacctttagtggcagtcttttagagttataaattcttaaattattatatcattaagaatatctatcacgtgttggggtctgaatgatccaatgataaaccaaatttcaagactctggaaaaggaaacagattagaacatgtagatgttcatggtttttacatctttatttttaacaccaggtttcaaactcgctgaaacctttcagataaatatgttatatgtatttgtcaccaggcatgcttttgttctttttcatgtaattgtgcaattaaaaccatttcatttagttcttattcatctacacttgtatgtacataactacagttgtatgtacataacttttctgtggattatctctgaaggtgaagctgatttcagttaacaacttttgcatgagttctttaattattgacatttgttttaatgttacaaatttcgacattttcatgtgaactttttgctccaggactgcctatttcttatctggtaacttgtagtagatttttggttagttgataatgaagactaactttgtagttttggttacttaactgcacttgtttttttaaccccaaaattggcttcggtgtaaatagcattgctgctagcatttctagtttaagaattcgacattgcggagaatatacagaatttattggtttgcctagtcattaaagacaagtacaataattattttatttcttctttcactaaatccccttagagagatgacagtattttttgtgaaaaacctaaatggcttgttcagatgttgtttctcttcgggctcgtttggtacgttgtattaggtcgtattgtcttgtgttgtattatatcgaactagattatatattatatttttatataatactatgttaaattttaatttatactaaaatattatctatttaaattttcataaaagtcaaaaccacatatagttttacataaaaatattacatgaaatgcaatttaatataatactatacaatacaatgtaatattgcgtaccaaacgagtctttcttgtattgtgttatctttatctgttaacccactcacctgtattgtgttatctttatctgttaacccgctcacctgatagttggatgcatttagtaggatgtgggccagaaaattatgatgttcatgcaacagagcaagcgtgaaatatgtattctctctgcgtccggcacaatttcaaatgcatcccttcgccagccagctacttccggaggcagcattacatatgaggtgaattatacaaatatttttgttaaaatgatcagtacaagtgaagtatagctatcaatttgaatgcccctcttttatcatagcataacaagtctcaatgagaatgaatttggcaaatatttcctctatctgggaaaaaatggagaaatttgataatgttatcaatgctggttagctaagagcagaggattgcagctaatgttcaccatgttaacataataatttcatgctgtaaaattagggacggtttgacattatttctttctccgggtcttatgtacgtaccgagcttggaggcaggagtggtggattcagtgtgtgtctatccagtacagatggacaaatcattggaggcggtgttggaggaccacttaaggctgcagggcccgtacaggtacctttttaattttttttccttagttggagtagataatggttatattattgtaattatcacaaaatgataacaaagttttagatattaggcacattatgtagggctcaagtgggacatgaagtattagattattctatgttcttcttgcatgtgtgtgtgtgttgtaagagaaagaagataaagataaagatatagatatgctttcgagtgttgtttcaatgccccaaaagtgtttgtttacattgtgaacaggatttggatattgaaaagtaacagtaaccaaaaaataagtgcaagtttctgttccttctttttatcttgggtgtcaatgttacagtttttgaatatgtgttacaggttattgtgggtacatttttgattgatagcaagaaggatgtcagtggtggtgtgaaaggtgatgcatctactatgaagttgccatcaccagttggtgtgacgtctccctctaatgtaggcttccgctcacctgttgaccctagtggaagaaatccagtcaggggaaatgatgatcagcaagcaattgggggtagtcatttcatgcttcaccggggcatgcatgtgacatcttcaaggcccacagagtggagagctggtccggatgctcgaagtactgctggttatgaattgacaggtaacaacagaccaataaagggtcatttttcgtttttcacaaaaaaaaaaaaaaaaacagaacaaactttggtatgttagacactctgttaaaatcacttacctcgattggtaaaacaaacattggtttggttgtgacttgacttacacacgtgaccagtaagagataatctgaaatgacttatttgtttactttgcaggcagaggtggtcttgcagcacatcaatctccagaaaatggggactatgatcaaattcctgattaagcattttccttgggaatttaaaaagcaatgaatgttttgtcgtagaaagatgtataatattttaccagcactcttttgttaggcaatgctgttaatagttttgcaccatacattagagagggagagagaaagagaatcatcacaccctgaagagtccttaaattatttccctttgctccttttttgtttttttctat

SEQ ID NO: 184717 - DNA, 2632 bp, Cannabis indica
aaaaaaaataattttacggcataaaatatttaagtttaactctcagttgcagataaatattttaagtttaaattttttggcgatagtaatacctaaattataattctgaaaacttttgtaagtgcctagatataagtgttaagtaaattgtcacgtggcaattcttgataggtccaagtcatcattaaatttttaatctttttaaaaaaaaaataatttaaatataccaataaaaaaatgacacgtggataataacttaacatgctaggtacctacagagttccagaaatgtaacttagatattattactgtcaaaaattaaacttaggtatttatttgcaactgtgaattaaacttaagtatttatgccacaaattactcatcttaaaataatttagttttataacttaatgttatcttgtttttaatttatttatggcaaaactaacttaactatatcatttgtgacacttaacctctcaaattgatttttagtagtaaaatccttcaaatctcacttctattatgctatttacccattagtgaattgttgataaatgccaaaaaagattgtctatatgtcgacaagtggacacctattatggtttgattggcccacctaatttttaatatttaaataaaattaaaatagtttaacgtttttacaaaatcattaaaaagtaaaaaattacaaaactttttgtcatcttttttttcttcccttttctcttttatttttctttcttattatttggaaccttctattcatcttctccttctttcgttcttctttgcagaaccccaatatccttccatctcgttctctctcccttctgtttctgcaggtacgtcgcccctcttagttgctctcttgcagtggcttgcacccatcgtcgcatgagactcactttgtcgatggaggtagtgggttggatatgggttctctttgttggtgaagccacaattagatatggaaaatatgtattttttgttgtagatcagtttatagaatgcacatttctatatagggatattagcgacaaaattacttgaactatacaatttgtgacacttaaccacataaatcgatttttgacggcaaaacctaccaaactcacattttgttttgatctttacaattctgtccacaaggctttcttaagagccaagtagaacatgccacaatgcacaaaatttacgcatggtacgtttttaatggttcacataacatttattgtttaaatattataagaaaataattttaaaattttaaaaaaataaaacaatgataaaaaaaatatcttcttcttctaattgtggaaccctaaattcaacctttcctttctctctcttcactcccttcctctctctctgctctcttgcttgacgacatggaaagaccgaaaatcagccattgttgatgtcgatggtcccagaggaccctgaaacccaattctttgattttgaaacccaagaactcgaccccctctctcctcctcaccatctttccctcgctccctctcttccattttccaagtgcaataatggccaggccagataatcgtccatgatcgtaggtggtccaacaagaccatgggatcgtgttgccttgacaagtcgctttcgtttgaaaccttttgactcgacaatttcgcgtcttccctcaactaggttcagcttggtagtgtcatggttcggttcttgttgattcagcaagtcaagtcagggtgttgtctgagctcgttgcgctttattgcttttcgggttcaaaccaatggttgagcttctcttcaaatttgtcgttgaaacctagaagccctattctggtttcttactcagtctacactttctgaattagcttcaacgtggattagccaatggaagcttttctcgtgcacaattgcataaatgaagaacttgcaaacatggaatcaactcgagaggcacgagtggggtgacgtgtttgatatcttaaaaagaagggaaatggaaaagaaatcgttatggttggtgggttgaaatcttgattctctttgaactcgtcgtgttcgactatattgattttgagattggatttggagaatttggagtgggacgaagcggatcggatgccattgaatatgtttaggtgctttcagaagtcgagtaagttcaaggtgttttgtggaggtgatagtgtttgcttttcaatgaaaagggtcaaaagaatggccttgtgggattactgcttcgactcgcgatcgtaccctgaacaccaacccccaccccaatcctcaccctaacctcgaacctcgactttgacctcagccccgaccatgagctcgagttggacctcaaagccgattgtagatcttgacctgagactagaccctaaccttgagcatgacccaagacccaaaccccgaccatgacccaataatactgaaacccaaagtggaaccctgccccaaataaatatatatgatgtgtgagaaagtagaagaagaaaaaatattgacatgaaacatttgtttttcttttttctttcaattttttagtgttatgattatcattattattgtaactttgttgtttgaaaacattgtcaaatgttcttacttattcttaaaaaaaagttttttttttagttata

SEQ ID NO: 184718 - DNA, 2933 bp, Cannabis indica
tttttttttttttggttcattcatcaccaaattatatataatatgaagaaaataggtagtatatcttagaagcatcttctagtatttttttatttgtttcggcatataattttattattagattattagtttaatttttttttttttataattatgtatattgtaattatttaaaattatctataaatttttatagatttgtaaataatttataatgtcaagaataactacataagtaatgccaccaccaatataagtgaatgaaagggacgagtcttaataggctgaagaagttcttattgcttttgcaagaaaaaaagataagagaatgatgaggaacgaaaatgagatacccatcatcaccaaaatctaaagttgaagctagaatcgaagtgcggtggaagggtttccattgtcttcgtcaatgctaaaggcctaaaaaacttttgttgttgggcttcaaagaaaattaaaattcaagagagagagaatcgattccggaaaaatgccctaattctctaaccactaaaaccaaaattaaataatggattaagaaactcttttaaagattgagcgttggcaatttcagaggaaaatctttgcttcttcgtcttcatatcttcaacttatctctcctctctcctcgtcaacgcccaaaaaaaaattaaaaaactctcttatatgccaaaatagataaaggatctactaaaatgttcctttagggagtgtacagtaaatttactccataatatataaatataaaaatataagaaaaaaaaagtaagttaatacacattacaaaaggagtattttggtacacctcctatctgtttcgtcatcacttcgtgtggagagagctccaaagaaccaattgcaagttactccaccaaaaggtctattttttttatttttttcaataatcgtgtgtatgttgtagttattaggaccatctataaatttttattaaaaaatctaatactatatatagtacatgttatactttaattttgcaaaaatagtaataacggtgataacatttcacctatacgcacctaggtggtaaaaccatggtcgagatacacctaggtggtggcacagcgtcaactccccttcaccaaggtcgagatactcattatcaagacatcacctcaaaccaaggccgagaatcacactccaacaacctcacctcggcacaaggtcgagaacatcactttggctcaaggctgagatcagcacctctgtcttgtctgaaaggcatcaccacagccttctaacttcaccacctcgacctaaacttcaccacttggaccagagtttatcacctcataccaaagctcatcacctcagaccaaagctcatcatctcagatcgaagctcatcacctcgtaccaaagcttaccatcccatatcaaagctcatcaccttgtaccatcttggcccaagccgagacacacattagtgcctcatcttgaccctagccgagatcaccacttcaagacatcatctcggccttacacagaatcatcatctcgaatctagctgagatgctcttcacttcagcacatgctcctcacgactactcaacattatggtctcgacatgtgcttttcatcaacatgcatgtattcctcatgacaagaacaagccaacacatgttaattaaagatatcttcgatagaatatcattttttagatattaatataattttgttatcattttatattttatacttaacccgattatggttaagatgaggtgcaccttgcgttaagagagattttaaatctataatatatataaacctatataaagggagtgaagtcgcttataaaggggactccaattttgattctcatgaaatcattctcttgagctccaactttctcattttaaaaactcacttgaggattcaactttcggagaacataattctagagaactcttttcaaatattgagatcaataacactccaaatagacaagtttattaaccactataaaaacctcatgttcatcttcattaattaaatttcttttaacaagcatgtttgctttgattaacaattacttatattcatcttgcttgtttacaatttttgtagatccgttgatatgaaaaatcgtgtcaagagtactgaaaagaaaatttaaatatttactaaaaaaaaaaaaaatcacgcacgcagtaaaatatttaaattttattagacactctaaacttgatttttctaaaaaaatttataagggtagattgaaataattatataacaaacatgaaaaaaaaaattcaaaaaattcttctaaatacaaaaacaataatatataaatgtaccgaaacaactattttagtgtactataaaattttcgaaaataataataataataatttgtaattgatgacatttttcattgcaacagaaacatacagtgacattttatcttaactaagaatgtttcttcttcttgttttttcccacaacatgtagctttctctctggtgagagacaatgattcaaaatcttttaggaggtgcagggagttgatgataagatgggtttgtttttttttactcgtttttgaaatatgaaaataggatatatatgagcatatatatacatatatatatttctatcttacaaaaatcttttgaccaataaaatagctgaaatccagtaagttgatatttgttttctatcacaatatattttgcaccgattatttataaaattcaaagtttcaagtggccatcaggtaatgacaatatatacataaatagatataattagtgaattaatcatctatatcttataataaaatgaaaaaaagatcatgagattgatgagatggttaattacgacgataataaattaatgcctgcagtttgcaaggatatgagtgaaggaccacgccagagttctctggctggagttgtt

SEQ ID NO: 184719 - DNA, 5527 bp, Cannabis indica
aacatacatataataaaaaatcagcaataataaattaagaagagtacaacataaaaagatcgtataagggcgccaccctttgcataaaaattttagtatttcacatgcgcatgaaacattatttaaaataatttatttttaataatttatagtgccaaaatcttaaaataagttgtttgaagcatgctatatatacacgtgaaataagttattttaagtttaattaaagtaccttaaattattaaaaaaattaaaaacttgtgagaattcttgaataactattgtagtagccgaaattcgtgtcagtaacaagaagatcgtaggcatccatggctcgtatgggctgggcccgaactatgcatctcgggtcgtaatccatgtccaatcacctagtccgagcctcaagtagctcactagagtagcggtcttctctaaagtaacagaagcataagactagtacctctccaagtgacacgttgggagaaagcgtctaaccttcagatgacctagaagatagtgctcttccctttgaaaagtggaggaagaccgcttttctaggaatgaaccacgtttgggaaatgaatcgctatcccaagacgtacaggtcctcactcggattgagcaagaggacgactctttggactatcaaaactatagacaaatactctatcgttctctatgatctgacttttactttctcactctggtgaacaagattcgacagttatctatattaacagagagagtactcatttagttttaatattttcgctttactttgtaattacaagctcgtttactgactaaactgttagagtgtcttcagtcgacactaccaggtccgatcctgagcttaggcgggctaggcatatacctagagctcacctagcctaggagtctaaaaaaacaaatttttccttctaaaagtacactatttttttttttattgaattgaaaatattacatttttttttctaaataatggctcaatattctaaaattttatgattatcatttgtctaatttgttcaatagaatatcaatgcctactacattcatttcgatcattgtcaattttaccctctacaattataatgtatacccttatacttctccacatgcaaaagttgagagtgagagacttccacaataaaattcccttagcttttgaatttttcataattttatttaaggtgaaaagactaaaagagcacatgcaataagttaaagagaattacaagtatatgtctctttttagttattgatgaaatcaatataagtcaaattgtttttagtgggagacaacttatcttataccacacatctaaaaaaactcttgaaaatgacatttcttatgtttgatttgataagtcattttagcttatagtgctatatggacctgtccttataattttactatttattatttattatttatttatcaattttttgtcttcttttcagtttgaactgaaaatacgtactctagtttatattatgaaataatactataattaaactctttttcatctatacatatcatacaaatattaattaacaattggattacccaattttgcatgtcttttgtcctatctttattcaaacaaagttttatatatatttatggaatattatcacaatatcgtattcagaaattcaatattaattacatatcatagtttagtactattgtaataactagatagttaaattatatgaattagtagataattaataatttaattattaattgtgattgtatatttttttagtagaaaattaaaacttattatcaaaaatagacgatataaaaataatttcttaattatagaaatatattaaaattctaagtgcattatatatgttatatgtgaatttttataaatttcatgtttcatgttcggtaacagtaaaatacaacgatctagttactagaatcatttagatatgataaaatatcttagaattagtagagcaagttagttaaacatttagaatatcggaattattttagattattgtgttggactattttacttctatgtaattaaattaattcatatttaagacatttttagtggcattgtgtatattaatccacacattatttgattactaattcttttttttttcccaagtttcggtcctaagcaacaccaagtaaactagaattttaatttccttcaatttcaaacctgaaaccagagattttcaactagaaatttataggttaagaaagtttcagctcaaggtaagctcttactacttttctccttgatttttaagtgaaaaagtcagattttgtcatgcaaattgaatgtttgttttcttttgggtttaagttgtttggggattgttttcataggtgattttgttgtggctgttgtggagtttgagctaggtttgaattttaacgctcaaatttagctcaacaatggtggatttagcttcaggatcttgatgatatttttactggttgtattatgttgtttatgtcataattaggtgttctggagttttgtacgaagtttgaggtagttttgagttaaaaattagatttttgagaaatctacagcaaaaaacagctcagaaatggtctattggtttcctggcagtgtcctagaaaaatggcctacagtttttaaagaatcgacctaccgtttttttggagaatttttaaagcctcatttttggtgtttcctcaataattagggtatttttatgctatttatcgatagagaaacttttagttttaagttaaagtctccaaaaagtgatatagcaggccacttatcatttttgcgtaaattgtgacttagggccttaaatcgtcaagcaacaatttccactcagggttaccgacatacttgcattcagaatcaaggtaaaattagtataaagatatatatgcatacatggttatcatacatatttttatgttagagtaccgagaatatcggctagagtaccgagcacatcagttggagtatcaagaaaggatcgtgattggttatatgtttatttttatatttttcttactgagtctatctactcaaatattatttacatgtacaggtaagagctacgactgaaccagaatgagactagagttggatgaagattgtacatatcaagacaatgtggagtattttaggttttcaggacagtttacgctcacattttgttagtcactagtaaatattttgaaagtagttgtaaactcttaaacgggatcccaaaattatgtatttgtatatatttatttaaattatttaagtttgtttaagaaagttttaattaattacgtttttaaataaactctttgtttagcaaatgagtgcccagtaattagaaaatattgtagtgtgcctaaactagtaagatgttacaattatcatgtactatacaagtatatgtttaagagttaatattattttggaccctgtattttgtaaaatttattgattggatcttatattttgttaaatgacaaaaaagatcttgtattttctaaaagaatacaaatatgactctgagattaatttttcgacaaacttaaaaataattttttagcacgaacaaatgtataatgtaaccagttttctcataacacatctatattttactatttactattttgaaaaatataaaatttatcattacaaaatagatggttcgatcaataatttttacaaaacacaaggtctaaaataatatttatcttatatttaatttgagcaaaaatatactaactttaattggtgaaagtagtttttgctaaaacaaatattattaaaataatgttatatgttgaaatctatgtaaaaaaaagtaattaatcttatatatatgttacaaaataataataaataaaatttctcttaatattttgcaaagaaattaaataaacctacaatattgttaatattatattgggagcaatgtacttactattaagctagcgtaaattgcaataattcatatgaaaaaaaaatctaatgctaaaaggaaaaattacattctaatcaaggattgcattgaaaaaaactttgtgtataattggttatatatatttatatatatgcccaattatcaagctatagttttacatttttatcatcacttgatgtctacaccaaataacctaaactttttctcctccacacttctagatgcctcaacttctttgtatttgaactcatgatgatgagtagtactaatggctatggcttcatgatcaaatttatcctcatgatgatgatgataattcaaatctaaatccaaatcaagatccaaatcaaccttcatcacttcaatattattactattattagtaccactattgttcaaacaactttggctttcaataaccccattattatgagttacatcaattaagcaaaaaatttggccattttcatcccttgttccatgaacattgcacttatgacatgtatagaatgttataacatcattggctttcaaattattttccttcacgaaacgattccaacctcttgtgaagacgaaactctggctactcctccaataacaataccgaaatctccatgacctcatttgcttgtcgtagaaaactagctcaatatcttcaatcccgctttcggtgatagtttccacaatattgttattatgtgtggtattatggcaactattggtgtcattgttggtcatattcaaattagggttattatttgtgttgttgttgttatctaactcactaatgtaaggaaaatatttcactgcatattttttagggataacaagtctattgagcttaccaacatcacttggtgtcaactccttttgaaagagttgtctacacaaaaattgtgcatctccatgaaccctaatttgttggttgaaatgatgatgaggatgatgaaaatgatgacgatcatgatgattagtagtacttacactattattctccacaaattcctttttttgagatcgatttctcaaaaattcttcgaatttcgattgataagaaccatccttgatcatgttgagaattgcttccatagtgtattggctttgaaaatcaggctcgtggagagtaacgttagtccacggaaagttcctatgtgtgtccccatttcgaagtctgatggcagcgctatcatacgccatggcagctgccttctcagacttaaaagttccaagccaaatcctctgatggttggcgtagatttgtgcaccccagtgaccattctgttgtggcacaacacctttaaatttcgccgagggtgaactaatattaatcataacatgattactattatcgctaatgtcacaaacattagtcgtttgatcaacataatcgcgatgattatgttgatcatgatcatgctttgctctcttatagtaattactattattactttgatgaataccataattggtgtttttggcacttgaaatcatgctagatgattcatcttgatccatttttattccaatgaaacaaaaataaaaaaaagaatgagatgagattagattagag

SEQ ID NO: 184720 - DNA, 2638 bp, Cannabis indica
ctctacaaatgatggcacaacaagatctgaaatgtgttcaaatccggagtacgaagcttggataatcaacaaccagcttcttatgggctggctctatggctcaatgactgaagccattgcctctgaagtcatgggttgcacctcagccttcgatctatggcgtgcactcgaaaccctctatggtgcgtactcaaaagccaaggtggataacacccgcacctggttacagacaactcacaaagaaagcatgacgatggccgcctatcttcgtcagatgcgcacttgggcagacactctcgccatagcaggtgaatcttaccctgtgtctcatcttgtcactaatgttctaaatggtcttggtccagaatacctcaccattgttgtccaacttgaggcccgtggagcctcactcacctggttagagctacaagatgttttgctgagcttcgacagccgcttagaacgcctgaatactcacagttccaaatcaaaacttctaaaggatgcaatagctccctctgccaatcttgctgataagactaccaaccattctaatccacaaaaaaggcaaaacaatcaaccctctcatggccacgacacaggtcatggtggatatcgtggaggaagcaatagatctcgtggtagaggtggaagaatctctaacaacaatggtcgtcccacttgccaagtgtgtggtaaatatggtcattcggctgccgtttgctacaatcgctatgatgagtcgttcatgggaagtgatcctcgcaacaaacaaggctcacaaacgggtcaaggctcaggtaatcatactgcctttgtgactgctccagaggttattgaccatgaagcttggtttgcagatagtggagcgagtaaccacctcacttctgacccaaaccaactgcttcagcgcactccgtatggtggtaaggagagattaactattgcagatggtacctctctttcaatagctcatactggttgttgttctttaccatctttctcacagaaacccttgattttaaaagatttactacatgttcctcaaatagcaaagaacttaatcagtgtatctaaactcacagctgataacgatgtactgatggagtttcatctgatttttgttgtgttaaggacaagaaaacagggaaggtgctactccgaggaactcttaaagatggtctttatcaactccagccaccattctccaaatttgtgtcatctctccaatcttctcaagtgtctcagtgccatgttagtatgtctagtgtagctcaaaacagtgtaaaccagcctgtggctgatgagtctttaaattccacaaagggggtttggcatagacgcttaggccacccctcgtctagtgttttaaagcatgttcttgcttcagctagtgtaagagttccaattaatgaacaaatctctttttgtgatgcatgccaaatggggaaatcccatgctcttccatttaaagtttccactagcagagcatcaaaagttcttgaacttatccacaccgacctatggggccctaccccagtccaatccaatactaattacaagtattatatacacttcctagatgactacagtcgttacacatggttttttccactaaaaaataaatctgacgcactagatgccttcacccaatttaaatctctagcagagaatcaatttgactcaaaaattaaagctttgcgttctgactggggaggtgagtacacttcctttggtcaaattgtccaagaaagtggcattgtttttcaacattcttgccccattatctcagctcaaaatgggcgagctgagcgtaaacatcgacacattgtcgacatgggcctcaccctaatggcacaagcaggtatccctttgaaatattgggtagatgctttcatcacatcagtctatttgattaatagacttcctacccctattctgaaattcaaatctccatatgaagttttattccatcgcaaacccggctatcatttttaaaaacctttggcgccgcatgctttccatgcttacgttcctatcaagctcacaaattcagcttccgttccctcaagtgcgtcaatctggggtatagtgaaatgtttaagggctataaatgtcttagctcaacaggtcgtgtttacatctcccgccatgtcacctataatgaaaatgattttccgtttaagcatggcttcttgaacacttacagccctgaacaatcaacacctgtttcttggcttcatttaccacttcctcacaactctgcaggtgtatctcttcccaccgagccacttgtccctcacggagtagcaccacctggtcctgccacttcttctcactcttctgatgaggtaatttccccacacttgtctcttgattctgctcctaatgatacatcttgccacagtcctacagattctgctacaccctctactgtctcacccgaacctccaccagctccctctcaacctagtcatcccatgataacaaggtccaaggctggtatcttcaagccaaaggtgtttacaggtcaatcccaatggacttctctctttgctgaacctcgtatagtagcagaagcccttgcgattgaggggtggaatcaagccatgggctccgaaatcatggctcttaaagc

SEQ ID NO: 184721 - DNA, 4443 bp, Cannabis indica
aatagtataattacacaatgtgtaacttatcatcaagcgcctgtagctcagtggatagagcgtctgtttcctaagcagaaagtcgtaggttcgacccctacctggcgcgcattagtaagtatattttcagaatttttgtttatctaacaagttagttaacctggttagattttttattctaaaaaaatttatttattttttaaagtctccaccatctactaatttagttaccaacacacaggtttcataattcatacccaacaggaaaaattgtactaagatttgagtggccatgatttacgctagttcaagtaattaacatcctttggaactcaatctaaaacacctttggttataactcactcgcagagtgtactacaataacaaaacaaaaacccagctatactttatagccttttttcttttccttcttccattttggtttcttctggttgagaagatgcatagtagaaactctacacacaatcttctaatcttcgaatgtgctcatgaatccgccaagaaacccggccccattacaatctccacatagcatctcccttttccccctgcaaggaattacagttacaaaaatggtaagaacattgggagctcagaggacctcagtggtaaaagcaacaattgccatctgaccgggcagtgaaatgatagaaaaacgagactccgattgaaattacagtcttttaactgtttgagaattgtatctcagattatataaatatgaattttaagttgttctcctgctatattgagatcatgaccaacatgattaaaaatggtattgtagaaacatattttgtcaagtataaacaccaaaatcaaagcacaagaacattcaacataggtacctgcaaagccaacataatccacctgccttaaattgtccattaaagtggtccactgaattaactccctcacctttgcattgagaacagcttacagcacctgttggttttaaaaaaaaaaaaaaacagatgagaaatatatatattacctgagaatttagctattcggataaccaaaaaagaaaaacatgtgacaatataacacttgcagagtaactagctcatagtaataaatatcagttaaataatacaattgaaatcagtaccccctagttgtgatgaaggccataataaaatgtgcccaaaagacaaattttacctaggaattttgataatttttattctatagtatcactttaacaaacattaacaacacctgaaattttaaaccatcataataattcgaagcatatgtatgggcgagttaaagttagttgagtacttcactaaccatttccttcacatttagtacacacaatgctatttactttggtggttggcttggtggattggtttttttctgcagcctgtaaaacaagatgaaagtgagttcaagggaagaattatcacaaggaaaataataggaatttcttatcaattaggtaagaacagtaacccatagaaggaaatatagctgatatactgatattggaaagtagtcgagagacccagctctctcccaaaagctaatgctcactttaaccaaacaaatctctccccctccccttcactactcactcatatatatagcacaaatcccccctttccaattacccaattaccctctttatttatcctaatgcctatcagaaaataacaatgaagataagaaaaccattgtacattagtgagttcctggcaaacatgatctctttttacctgtttgtaatttgtaggcactcaagtcttcttcctatgcttacatataatttatgtttcaaagcaacagtttttcttacattctcaatgaatggctacttcttaattcttttaactcaacattgttatgacttttgcaaaatggtctctccttagccaccaaaattatcagcctgaattgcctaaacaaaattctacctgaaaggtaacattggtattttcttagcccaattggccagaaagcttttagcttccttggatgcctaggggaaacaatttcagcaaaaaagggactcaatttctcattatctggataagataaattggtttgtttcaatttctcacctttacttctaatgactgaaactttgaccctttcgaatgctgaaatacttcactggcccggagaaccttcccaggaaccgaatttccaacaaacaagtctgtgaaagaatattcagatcaatatataaacacacatcatcaattaaaaccatattagaaaaatctagacagagagacctggcttgtttgagggcttcaaggaacaaacatgagtgaagcaaactgagcttgccattgaatttgtatccttttctctctgtatatttggcaagtggtgagggaagtgatgacggttgtgactattgaactatattaatatacgagtagaacaggataaggcccttttgaaactcactttgagaccatcaaattaatgtcattacccaaatgtcctctagtgaaaagtccattttatcccagcatggggatattttggccagacagaccattgttcctcacaaaaacccaaaactattatattaatacgcttaaatatatatttattatatcaaaaagaaaaggaaatggcgagtaccctcttgtcatctccttgctttctctctttgccaagtaagtcttgacactttttgttttgggtcttcaattttatcagcttctttagttgttctataatcaagggcaattggcttttttttggtgaaaataagtttattttatgtgtccataattgggtgaaaggtctagatgattttgagttaagtggcgtttaacatatgtcaagtaatgcaagtataattttattgtaatttttaatgattgttagtatttttcagataaatgtgtataatgaattgattatgaggttttccaagttgaaacagatggaaaagtgggtgcagggaacttcagaagctcattctatggaaagctaatgtgtactcatcaatttgcagtaggaaaaaaaattcagagtagatgttatggcaactctgttgtggtggcctcagtggttcaaaactttacccttttatagttgaaactttattgtattttatgaatcttgggcgtgctttagtttgttaatgttaaaatgtttaaatcggctgtgctatgtattattttgcatacttatggcctattttgggagatatagttaatttttcagagcaacttttttggtgttcatttcatgtttggcagcttggacggaagaagaccaacaccagagagactgtaattcctgacccggattaccgaattccgattgtcctactaggttggtgccaaggtttccccttcttactctatctatgcatagttatgttaagtgaaatcctggctgtattgtatatctgtttccaatcaaatttaaccatgaaaattagcaaaatgcttgaaacatgagacttacccaattgaaatatcacctaaatacatctcatatactttattagatatactgatgatgatgatgctcctgatgaaaaaatatcgcatgcattacttattttaggatttgggtatgaaattaatgatcatggagtaaagtgaaaatattgaatcgttgaaaacttgtatggagagcagataattattttagaattaaatatacaaagagaaacgattgggaatactatgttccaattcttagtgataaaacaatcttttgctaagtaaattaagctactaattaactgcatcctttgctcggtgtggtctctcatttactataatgttggattttggtattgttatgaattatattctaagtttttgtaatggaatggattgctaaagttgtatttgagtaaaagagatgttattttaatgctaaagacctatatttgagtaaaacatatactttactagatagatattttctgtttcatagttcacccaattatgaacttcagaatcagcaggttatgacattggtttaaataccaaatatgtaagtactgtcattagttcttttctgtacaattgagccatttatacataatctataacagcatatgttgattggaacaggtctagctggtgggttagcttattctaataatctgttaccagctgcacctgttggtctccttggtgcactcttactgttccaggtacaagaaaccaatgactaatataacattactgatttcagcaaacatgtctcatgatatatgatgattgttaatgtctttcttgtatgaagttttaatgttaaaaaactatggtgaagttagataaattaatctagcaaagacttcaattatattcttctgcctaatctgttttcattttatttgtatttgttgcatgctctagaaaatggtgaatgaattgtatattgtattttatataatagtatatatttgtatacaaagttagaagactaaat

SEQ ID NO: 184722 - DNA, 5470 bp, Cannabis indica
aatttttcactacttatttacatttgcattgaaatgttcttggaaaagtgctcatattttctaaaatattttagtttggtttctgaatttagttgggggttggaattttttgaattctagtcaccttggtaattaattatattttattctttaagaaataatttctaaaattattgtaagttttattggtataaaatttcaatatgataatttcttatttagtgtgaaaaacatttgtagtggtaaatggttatatttcttttttgtgtaaaaaaaatatgaggagacaaaggagaagagagttgtatataaaaatcaaccttgttaaaaccattaaagaaaatgttgttaaaaaattatgaccacagaactttgtcccacatcgattataaaatatccagtagtaagtacataaggcctttcattagtttctcatctttattttagctgagtcttcttcttcatcctctctaatctctatataacaatgggtatatcaccttccaaacgagtcaagactcagctttccaactcgcccgagttcaactcagcatgcgactcggcctactcacactgcgtctcactcacccagcaagctttcccaggtgtctttctctaccaactcaacaccgcagctgaaaaaatccatcaaatcctcaccgtcgatcaaccccaccagatcatcctgaagtgggtttcttctcctccaactcgttctcaggttgactcagccctccgagtcgtgagtcgtctccccaacaaggatttgggctacgatgagcacacacttgggccgaaccggttcaaggaatgggccgtggagctttatgggaatgcgattgtgggtaatgcgaataaagccgtgctccgccgtgttccgattggagttgccggaatcgttggcgttggggttgtaactcggtcagggaaagacttggttgggacggcggttggagtatacgcgctgggcattgccacttctatttatttgggtttatgtaataaatagatagatgagagagttttttttgttctttatttaaagtcaattatgtatgtaagaaacctttgaatggtttgttaataaaataaaatgaatctcttagctatgtttgaggaggatctaatctatcccaatcgttatcagtttctaatttacatttttattattaatggtatgccaaaatatataataattaatttagttgaattttatttggtagtatttttattatatgtttaatttttatttaatttttgtaactaatcatgtcaatttaatttggaatcgtgttataagaattgccactatatgaatgcaaaccaccaattttttttttgtgcaaagtgtactaatatgatccgtaaccatactgtaaattttcactttgtgctatttatgtatagtatttgtgtcataatatatatataatttttttagaaaatatttgtgtcttaatatttaagtaagaatattttattttactaactaaacacaaacttgaatattacagtacacaaaacactttagagctatattcatatgaagcaggcatttggagtccactatctatgaatatgagatgctactacaattccatgcttcaaattcaaaatgcttcatcaaccatgtaaaggtgttgagattataaggaagtctataaatggtttttgtggtggctgtggatgcctcttgtgctttagagggggggatacaggctcttatagctggggttcaggccgccacacaacttcggtttggttcttgcaccagtgtttgtttcaaacttttttccctcttagatttagtttcgatttcagttgcttgattaaccgttcttgcaacaaaactgcccatggtcttgctaaatggggagtatctaactcttgtaatggttttgggaggtgaacccccatatggtcaccaagattatttgaggtttattcagccaaaaaaaaaaaccatgtaaagactaaggttttccaagtttaataaggtgggtaggctaaatgtagtgatacaattaaaccctcttattctttctccgaaacaacacaacaatctataccatactaccatttgtttttgtaaatttagtctgtccaacccaatgccaatgacagtattgatgcaacctgatatgatgaacttcatcttcttggcaaactgaaatatacagactattgtaatcaacttggtgttgatcctgctcaaaatctcacttgttaatcaattaagagtgtgcatgtgaattattttactaaacagaggtttcttagttttatttattttgtggacttttaatctagaacaaaaatttatcttgtttttgtttttgtgtactattgttgtgtttttgtgtcataaatttatgattaatattctattgttacaaattcagttgatgctatgttgtagaaaaaatattctactgttctacaattcagttgatgaaatattatggagaagtctaattttaacttttattaatacagattacatgttaaatactgaagcataagttttgaaaaaaaaaatattcaaaaatattaatcccataacacacaatatagatgttgaggatagaatcaaagctataagaaattaaataaacttaacttccttacaccattaatatatactttcttacaagaacaataataaaaccagcttaattaatctaaaagggtcacattaagacattaagcatccatagaaaagttgagccaaaatggtcaattcttcaacacctaaaaataaaggaaaaactaataataaccaaatagacttgctagctagctagctagttcaaagcttgtaatgagtcttcacaaacaaacagaaaatgaatcactaaagaaaacaaatagcataagttcaaagctttcttcagaaataccaaaagtactttctggaagcaaagtaaccttatgaacctcaccccataaatctacaccatctccttcatttcttctactcacttcgatttccccaccacataacttgacaactccatctgtagaagaactctcgtaactcacatctcccacataaaaacaacctctctttcaaattgaccaattcggtagaacacacgtattggggcattgcttccatcacacctctgacctctttccatctcctctctctatcatcataccattcgattctccctctattaccacgagagcgataagcaatcccatcaaccttgcaatccgttccaccatttacataatatggctgattatgtttagagacctcccacatcttggtcttcgggttgagttgaaactctgcctcaccaaacttgactaagattataccgttcacaacttctactgttgcagaaatcgcgcgtattccatcaagtggacttggaatgtgctcccaatgtcctatcaccggatcaaacacttctacccatgattcctccgtccaccctccaatcacataaatcttctcgtctactacggctacagaagcatgcatgcgtggtattccaatgcttgggccttgctcccatgtgtgagagcggcagtcaagtatccatacgtcggacgaagggatgacaacattgtagtcattagagttgtttccaccaatgacgtagatattgtggcccacaacagcttcaacagagccctccaatttatgtgggttcggtgggagtcgggcaaaccgaagaaggccattgcaaatggggtcggctgagacgattggctttcgatagatggcaaaccagttctcagtacctagggacatggaggagaccttcaaatagagcaagttttcggtgaggttgaggatagatcttgttgtgtatagctgaggcgatgaaagggctaatctgatggatttggatacagctgagaggaccaagtggtactgtcttggtacgcgggctagaatgttcaatgccagatcgtttgggaggcttgggatgatgacatccggtagtggcggaggtataactgctgacattggatatgaagctcaagtttcctagggttgtattctattgtggccctgttctcttcttctactacagagttcacatatgccaacctacacaaaataatttcttattagcttagaattaatatagaaaattagaaatcactgataaatcaaatcagctacacttgtgggattggtgataaatctcatgcctgcccaaccccaatatataccccatatttttgagattctcttacccaatactcgttaaaacatctagtcatattcttccatccctataactctcccccaaataagtgtattcacatccaattagctcagaattgttatagaaattagaattacaaaatcacttggataaattaaaacagctacacttatggggttggtgataaatctcatgcctgccaaacccaacaccccaaacttttgagatcctcttactcaatactcataaaaacatccaatcatattcttctctataaaccaatcaatacctccctagtccctccccaataagtgtcttcatatccaagtagatacttacagcaaccatgataaaatagtgaaaaaaagacaagatttaatggcacttcatcaaacaggtaatagacattattctttaacagttaaaaaagcacaagatttaatttttattttcacccagaaataatatggaagcaaaaatttcagaaacaaaatttagggttttgatttctagaatttcagaaataacttacatgccccaataactaaagaatcaatacaataattggggtataaaagagtgaaaaatcgagaagaaagaaaatcaaacctttgccactgagaatgagattgagatttaaggtggttcaaaaatcatggtgattggaatagtgagagtgagcttgagcgttacaactaaactaattttagtaattttcgaaaacgtgacattcttatagagaaagaggaagatcacatagtataagcaaaaaacagtggtcacttttaacccaaaatgctctaaaaagtgtaaagtaaaaacgtaagtagctctatttatactcaggtcactattaacccaacaaaagaacaaagttaaatgctctaaatagtgtacagtaaaaacgtaagtagctctatttattctcaggtaaaatcaacttttactttaaatcactgcttttaacatcactgtaaatacgtgcgtgtcatgctagttaggcttacattattcgtgttttttaaaatatgggccgtgtcatgttgaatcaataaaaaattaaatcgtgtcgagccgtaccataaaataatatgtgtcttgccgtgtcgtgcaataattttatatggtaaaccgatacggtctgcaagtccggccgatccgtttttttaaataaaccaacttattttttttatatgagttcaaatccatgctctatatttttgtatttttattataattaatgaactaaatgctaaaatatgtatatattttatattttt

SEQ ID NO: 184723 - DNA, 10597 bp, Cannabis indica
aaaatttacatattttattatacggctattttttcttttacatatggtaagtaacaatatgaaccttattttcagcattgcaaactatttagaattttttaaaaaatttacaagtaatcctaaatagttaaagatcattatgaaaaataaaaaaatctaccagaacaaccctttaaataataagttttctatacttttggtgcctatataattatatacgtataggggaatttgtcttttataacataaattaacaccaaaattaaaataaaacttgacactttacaccatctcaaatatatacatattcttctgttatctattttctctcttcatcaaacccaaaataataccatttgagcaattttcaaaattatttctaaaatgatgaacaaatttctatgaagcaagagccttaccacaagtatgttgtagaaataggtagagaaagtcaaaattttcaaggttttaagttttttgtcgctgaaaagaaatgggtatgtgaatttatattaaacttgttatttatgaacttttgctcaatgtgtccacaatacacatagattttgtttatctatagaagaaacaagttaagaatccggacacaaatgatgcctttttataagctttatttgctatatgttcttttgtaatgtttatctactataagtatgcaatgcaatgaaatcaaaatatcccaaaaaatgggaaattttagagctgacagttacaaattgaagtagacccacctggccagaaggttatagagcaataatatgtgcagatgaaatgaaaatgcatttgacaaatgaatgacttctgccttggtttggggatgaaacatgtgtactgtaacacattctgtgtaagaaccactcaccaacaaaataaccctttcttcttggctaagttaagttgcatggagaatgaatgaatcaattggaaatcaattctcacatttggttctccattccaaccttcattccgtttccaaagttgtttagcaaggtctcgatctgtttaatctctttcggaattgaccccgttagtacctggattcaacaagtttgttgtgaattaccaaatgaaataaatttccccatagttaaaattagtggaaattcagaattgtctcagttatcgaaagaaaaaaactataaaagactatttaaatatttttcttttagaacaagcatgtgtctacctcatatcctgattctgtgatgagaacctcatcctcaattcttatcccaatgccttgatgcctgcatttcataacaaacccttaatgcattaacttccatcgtcccttggaacattcaaagccaagtgtagagtatatataaggtcctcataaagattgatctaccacatagcacctaacactggatctaattttacagttaagattttctaaaaattgaaaaccgtaaacaaacatggtaaactttcagattcccattcccactcctccctataccgcaataccaaacagcccctcaagaaaattagaaaacagatgtataagcctatagaacagatcttgttcaagtaaaggtcggaaatttacagttaggattactttggtgagagatgattattcaatattagaaatcaacttttgataacatccatagtaagacgggtaagccaagataatcatgacagtattggacctatttgagattgagtgagacattttcctttgttcatttgtagttgaagtgcttacaatgatacatcatgacagacctgagtccaatctcataaagtaaaaatgattaagctaaaaatacctttctgaaccaccaaaataagatggaatatagactcccggttcaattgttatcacctgggcaataataataaaattttgtcaaagtaaaaacacaacgccgcagctaagtacgttcaacataaacattcagcattcaggtaagtaaagatattggcataccataaaaccatggagacagtatgccgcagaggaaaatagatacaaactagaaacattttgaaaaagtagtgttcagtgataacaaagaacacttacaacacccggtttcaagggacggtcatagctgatattagaacaatcatgaacatccatccctaaatagtggcctagacaacaaggaaaaacaaatcatcaccaatcataatttccagtagtttgacctaaatggtaattaaatcaatgagctctatgaaaatggccatagtttcaagcataacactcatagcattagtcatacaggaacaaacatatgtcaagggatatgaaaagagaacctatagaagttgggttcagcatatgatatgaactgcttgcttctctttgcaagattccaatctccttgagtcctttgcgcagtttttcaacctgtgcaagcaatggacacaatttcaacaattatctagttcgatagacagagagatagacaactaagagagagagatgataaagcgaggaaaacacaatcacagccaccatccattgccactcttaccctcacaaaatataaaataaaagagggcatgtaccgaatagttgtgtatttgtcgaatactagcacccggtttgcaaagcttcaggcattccttgtttgtttgcaaaataaggtcataaagttcttcctgaaaaggaaaaagaaagaatgaataaaaaaaaaacagagagggaaaccatatctgtgaagtgtacagaagaagccaaagaattaaaaaaatttaaaaattgtaccagtgcattcaacattaatgaaggggaacaacagatacacatacatattactttatggagaatgagattaaaaaaacaaacagagtgccaaagaaatgtcaagttgtacatacttgaggagaggtaaagctaccacagggtggccaagtacgagtaagatcactgacataaccatgcaactcacacccaacatccatcaaaacaagatccccatctttgatctgcacgacattatagcacttagcagtgtttgaaaagtggacaatttgtctagctaagtagatttgaaaccaaaaatagtaaatgacaatttgtatggactcactttctgatcatttcgagaataatgtataacacttgcattaggtccaccaccaacaacagggttaaacctgatcgtgtggaaaaggaaaatgacaatcttgcatgaaactacagttattggcattataaacaatattccatataatcattgcccaccaggtctaccacaaacacttctaattacaaaataagatgggcatggctagaatttaagtaacatttgtgggatccgactatatacaaatacttacgccattctttgagcacctcttatcctgcattcgtattcaaattttgctgataggatactctcacaaggatacatcttagagtgaagcattgtctgcaggagagcctatccaagcccagtataattattaagtataaatgaatgaaggaataattcgagtaatatttagaaataatttatgagaacacgattccacatgagcctgattaggaaaaggtattgtaaatagtacctggcaagcaattgatgcagattccctcattaacttaagttctgcaggtgattttatcagccgtaactcatgggtgatacatgccacatctttaacccttccagtgtctgcagctttttggaaaggctccaaattcatatatgctggtatggctgtatggacattgtggaacaatgtggacgatccctttatcatatctggcagtatctgcagtcagtaatagaaagtgagataagtataaatgcatgagaaaggcttactataagtggtcagaagatagcttgattttgaaaaggttacttcacagtcgaaagcatataattaataatattgctcgctttaaattaagcacctgcatgatgcttatcagatcactgcaatgatcaacttagaaaataaagcttttctgccttttgacacaatcttgagtaatggtcaatggaggaactcataagagaatcacaacagctaaatttgcgaaagtgacaactttatgtattctgatattagagtcgagtgtcaatttattttagctaaagtggcattgaaacatgggaagaggggctgcgctaagattttaaagaatctgcttacctctcttaatttgcgcattggatatgctttttcagccttgaatgtttccaaggcatcatcaacaccagcaactttcccttgccatataatatcctaaagaaaaggaaaaaagacccttaaacttagtgcttcatttgtgtacaatatgcattttgcatgcactacaaaaaaccaatatagttctatacatgaggaattgcatcaggcatgaacatgcagaatccacactcgtggcctaaaatagctaagccaccaggttgctggcagccagtcatatatagataatcagcttcttgtcgaaaattgtaaggcaccacatcagtcatcatcttcacaggggcagctgcaatgatggccaaactcttctctggaagaagctccagaaactttttccttcttgaaacatattcttcagagctaatgcctggtgttacctccccttctttgagtaactgaaaaggaaacaggatcagatcatccttataccagaacaatatccttagctagttgattctgtgtttgtgtgcaatgcatatgtatgtatgtatgtatgtatgtatgtatagtgaaagttgtttgtagtactaacctgtgggtgcgatgcaggagttggttgtccaatatcaataacattcttggtagaaaaagtgcgacagtagatgatagactgaataaaaatgaaaaaagtaaaatcaataaataggaaaacacccaaaatgtgatcaaaaccggagtttcaaagctaacatttatgctattattcatgtcatgttcatgaaagaggtgcattttcgtgtacttatttggggggaaaaaaactcccccttaagacttactttccaattattctttactcatagtaacctaatcaagaaaaattcagaaataaactttgtgaaagaccagaccacactttcagaactagcactcgcattgacccgaagctaaagttagttgataaagaatcttcttcaagaatatatcaactattttatttctttcatgaaaatctacaaagaaaggattacagcaagtacgaaatttataatcaactaaataaatacagaagcccagcagcatacaaattaaaatccctacttatattatataagcatcaatttatacatacatacatacacacacacatatatatgcatcaatttagcaaagaaacgcatcataatacccagacaaatattaaaccatcctggtcctcttcgtcaacacaattcatcaaagaagagaaaatctaactgcgttcgaatattgaaacagcatacccattcgtaattcaatccgtaaatcaaaaattttaaaatatattccagaagctatatgaattgagtagaagtacctgttttagagaagctccctgtgataattttcttaaggcaatctgcattttgatgcaagaacatacacaaatctacttccagtgttgtggttgagttttagggtttaagatattaagagaagaccataaacccttttcttattacttattagttattagagcttggcttagctcctcttttaagcttttcttttgtctaataattactagttagttgcttaaggcaacggttttcttttgtctaactttaagactaaacgattttatgattatgtaagttatattgtttttataattttagaaaattttgaatagtttattatactgaaaataagatttaaatattgtattgtacatgttactgtgtttttttaagacgtgtgataaacattcatttaaactttatattcgacatgataaaattattcagaattttttaaaaatttataagtgatcctaaataactacaacgcacgtgatcataaaaaaaataagactaaaaaatactcataaatactaaaacagataagaatgtatcgaaacatcaatttaaaagagtgtaccacatatttttctattactttttacttcttttatcttttatcaagagtcaatatataaattaactaaggtttctatgagttgttgctttttaaaaagagtaaatgcaattatagatcttgtgttttgtaaaaattattagttggactctctcttttgttaaatgacaaaatagaccctgtaatttccaaactagtaaaaataggactctaaacttaatttttgacaaatattttttaatataaccaacttgaagacaattcctaacacgaacagatatagaaaatgtaaacaatttgttataacacttttatttattttgacaaaaaatcagtccataatcctatttgtaccattttgaaaaatacaaagtctattttgtcatttaacaaaacatagagtccaattagtaacttttataaagtacaagatctaaaatagtatttacccatttaaaaaagagtctagcctctaattctccccttagataacatggtcttcatttcatttagagagcttttggagaatttgtagtgacatgtttggtgtaatggtaatgaaataacatggtcttcatttcatttagagagcttttggagaatttgtagtgacatgtttggtgtaatggtaatgaaatgatcctgacaattctattgtttaatttgattttcacacttctattatcaaaagaaattacaccactcattctcaacatcattctaaaactaaattaaacatcaaaataacattcttaattaggttcctattacatttaatcaccatcactattctcattccattgcaccaccattttcattccactacaccgaatcaaataccacttaaaataaagaaaaattggtaagaacattagtgtcataatatgatgttgtacatttatggtcttctccatctccctgacaaaaatgtttctaaatgggactattctcatagaaagtatattctaatacatgaaaaccaaggagaggaaaccatttagagaaaacgttggagaaaatccttaatttggtcaatataaggagatcgagtagggattatatggccagagtcatgttggattgtaacagcgcaaccatcgtcgaataacgaggctagttctctgcttgcttggtttgctatctgcctgtctttaccatggtcgctaccaaaaatatgaagagaggggcatttgactaatccgttgtctagcagctctggtaattttacagcaaagccagaacacaatatcacgaacctaaactccatttcacttttctgcatccctagttgggcacaaactgcagcagccatcgctgctccctgagaaaatcccaagattccatcaaatggcccttgttgagcatatacatcttttaagtatgccaatgatgcatcgaaaccacccgtttgctgctgatactgaagaacatcaaatgggcaatcagcaatcttccattctgtttcgctgctttggctaaagttgggtgccactaaccaagcaaacttcttcttgcaatgttgtgaaggtggaggggggccttcttgtggtgaaggtgttgtgcaatcgggatgtgtctcaattccacttggttggtaaatgaagggtaattcatgaggtgcatccacaaagacaagctcgacaaagcttttgagttttttggctaatgatgctgtccggcctttaaaactagatgcattctgtcgaaacccatgcaagcataagattctgagttttcttggatgtccaatatctgctgcatcaattaaccagtacacattaagaactgtagaaaaacagagggagaaaaaaaaaccagtgaaaacttagaacacaccagacttcaatatagtactattaagtctgagtggaaattttgattttttaactactctccacccaagagagataatcaataacaatcatggacatagaccacacatgcaaatacaactttcccaatcaagaataagtgaccagatacggaccttaccctgtctcggagacgtatgaggtaacagtttggcatctgaggaaagagcttttagctcacattgggctgaagtttcatctgacctgccattttcaactgatgatatcaatccaacatccttgccgtgtttcttgcatagctcacaaactgatgcaaagctttccttctgtggacggagattaaaaaatattagcaaagagtgcaaaatagatatgaaagtgaaaaaaaaaaaaaagaagagcaaaacaagttgagcagccaggtagaatgacagattggaagggttcagacaagataactgaaaagccaatattctaatttatacaccactgaatactgaagcatgtgatgattaaattaagtcagtaaataagacatacctggcaactataacaaaccaaaataagcattctacaataagtgcaccggaggcgcgaagagtaatcatcaaagggcaagcgacaaagaaggcatgtacccaatatatttgtatctgaactccctactgacatcctacagtcacagtgcaaataaaatgcaacttagttatttcactaccaaggataaacaacagttaaaagttaagtatcggggagtaagctatatagttctttcaacagtaagaagtaggtaagaaaactaaatcataccggtgatcaaaaacaaaattcttccctttgaaaaaaccgccatctggatattgttctaaataacgctgaattccaccaaataactgccatgaagccataaccagaatattaaaaaaagaatcaataaataaaaggtctgttgctattattaatcataaaagttagaatcaaaacaagaattaacttgctgcctaaattacagacttctcatgtaaaaaagacaagggaaaaaacaagatccaccaataaattccaatagagtctcataacaagctgaagtttgaaacaatattcaaacaaaaaaactgaactttttacaggaggaaacctcacctgaaacacattctcaaaaccagccccttttgacctaagataggctgatgccatctcacacctaatccctccagtgcaatacctgcaacacaatcacaattgatgatggatatcaatgcatccagataatagtctccatattccactgcaactcgtgcaaaataaaagcaagaattcaatgacaacaacttacattagtacagattttccacgcaggtcatcagtattttcatcaatccatgagggcaggtcactatactgtctaatgcctggatccaatgtctcaacatttggtgcatggaactttcctattctcgtctcgtacaaatttcgagcatccaacaaaacaagttgtttgctgtctgttaaagttggactatcatcatccaaactttgtcctagaaaagacaaaccaaattagcagatagccctagcaataacaagtttccattatcactaaattgcatcacattatatatttctaagagtttgaaggcataaagtctaagaaagtatattcaactcagaccctttagagaataacaaattatgaacagaaaaagagcataaaagaaaccaaaaaaggtggttaccaaccagctttttgaagagcggaatgaaactcagctgcagaaagatgcttccctgcatctgaaatttcaggtggtttgagctgaggattagagtgtaaggtaaccaattcctgttaacaacactcaaactgcatcaataaagggggtcgaatctcgaaagtgccatacacatttatatacatacaaggtttctgataattaatagtgttaaaagggtaaaattaccttaacaatgcgaattgagagtgaggtgaatccacattctttagcaaccttattgttcaatggacgaggacaagcagcaagcttgaaatcagtaccatggaatagactattggactcaacatcagaaatatgttttttcaaagagcacatttttccaccaacctaataagtcaaacaatcagaaaccctaaacaaacaagcaagcaaacaaaccaagagagaaagaatgtatagtacatacagtaacattgacgccgagtggagaaagtcggacacggccgagcaggtggagggaagtgcagttggagttgtagaaggcgagaaggtggtccaggtctgggatctgcgcatacttgtagtaaagtagaacgccatggtcttcttcttgttgtggttctggttcgactcttttgttgttggattccattgatgagagggagaggtggtcgtgagcttcaacttgaagttgcatgagcattaacaaaacacattatagccctaaactaaaccccaatctattcaattcaattcaattttgccatagattctaatatttttttttttcattttttttcaagggtaacaatagatggagcatggttaattattatattaaattaatgaattgatgtttttttttttttttattttttagaaataacgtccatagatatagattacgacctcagtcattatctattaacaaagtatatagttacggaagtaaaaagagaacacgcaattata

SEQ ID NO: 184724 - DNA, 1258 bp, Cannabis indica
aaaaaaaatattacccaaataaaatggtatttattatgtatagcattagcaagcacactggttaataagagataaagccaaaccatgtcggtattcacacaaaaccacatagacaaagacaagtcatcacaattcacaactctaattattttctttttcatttttaaacaaaaataataaattcaactatagttgacttttttttttagcttaactcactctctttcttcttatgttattttattcattataaaaaccaaagcccaccatctttttctactaacctattcacatttcacaccaaccaaaacaattataacatttaaaaccctttttcttctcagatccaaaaaaataaaaatctcttcttttcaatttcatccaaaaccaaaactatggtctcaaaaacacttcttattattattactacactctttctgggtttttcttctcatatattgctcttctcagattcaattccaatcacaagtaagtactaataatatttttttatttatttttattaatttttacaaatacccttttcaattttcacttcatttattttaatataattttttttcttggtatttatagggagtctctctttaaataaatttacaaatttgggtgaacacaaagtaccaatggaaaaggtactattctttctctaaattatttggttaattaattgtaatttttgtattgatatgaattttttgaaatatgcagaatttgttgggagaggaagtgtttggtttggaagaaaatgaaggaaaatttttgatacaagaaggtaggatggatttggaaactactcttgattatccaggaactggagccaacaaaaatcatgatccaaaaccacctggaactgcttaaataatatattgtcgttttgggctttttgtgtcgttttttcatatatcgtttttttattctactagtgggttagtattgtaaaaaaaaaataatgatagtaataatatgtttttatttttagttaaaatccatttactgaatttttttttgtatataaatttttttatttgtttaaactcatctcttcttctcataatggactggcttctataattattatgattttttttacttttttttttttatatatatactattgggccatctaataatactagctagttgctacaaggttttaaattcatttttagtgaaaaagttgatttttttttaagaaaagatggaaaaaagttgaaaacttttcaaaacaaaatgc

SEQ ID NO: 184725 - DNA, 4275 bp, Cannabis indica
aaaaaaaaaaaaaaattgtgattgtgtaggattatcgtattatagatttcgtgaactggtcttatatattctctgtttggttgtatttctcttttgaatctctggcctgattgagattccacttccattcccacgttgttccttctttttgttttagtacaagatctctatagattgttcaataccaatatgttccaatgaataattatacaagacattattagattgagaaagatctgctggaaggtcttatttcttggtggtgtgtagaagaagtgcaaagactattttttcttttcttttcttgtgtaagggaagtgcaaagaaatattgatttgctgatataaatatatttgaaacacttcttaataggtattaccattgatgggtactaagattcctgcctaaccctaccatatttgggggtcaggaaactatagtcatgggagcaaaccatttgcctgaccattttatttcctaatatattaaaatttgaagattaactacttcattattacaagcttttgacccaatcatgggcatgattgtactgacatgtatatatatatatattaattttaaaatataaaattagaatttccaatatgtctaagccatattgcatgttaaatttttacagttttatcgcaggcagtgtatgggaccctttttgaagcagaacacagatcaaccttttatattccatattggaaagttcccttcatgaagtggatagtccccaggcagcggaagttccagaaggacctaaaggtcatcaatgattgtcttgatggactcatcagaaatgcaaaagacacgaggcaggttagataatacataagttgtatgatggatctaggtgctgatcataatcgtgtgtcgatgcaatcacatttaaatgatattctaagcttttagttggatatgatattcgttttttagtacaaaaaatgtcagagacagtgcttctacaacctaagcaaaatgtacagaaagttggtatgatatgccaatctcaaaggattttacttaaattggtgcacatgttacatgatttggaaacttaagcaattgatatctttaggataccaacttatctatctggaaattattagagcctgatcaatgctggcaataaaagcatgcatgtgcctcctacaattagaaccatttcaatatagcatcaagctctaataaagcttggcaggtttgagtacctgcaaaggtctcaaggttgctacaatttctggttctttagttgttacatgttctgcaacatatatcgtttcccagtttgcttctgtatgagtttcttatttgttgtatctactttggtttttatgtcaatgtcaagcattgaagttgttacctgtagcatattctaccaatatctaaaacttcattatgcatccaattacaggaaacagatgttgaaaaattacaacaaagggactactcaaatctgaaggttggtgaatagatttaattaatacataatcataatttaaaatttacttgttcgtgtaaaattaagatatgtaattcaagcattatgtcttataattacagccttataacttaaagtttgcaggatgctagtctcctgcgtttcttagttgatatgcggggagctgatgttgatgaccgtcaggtaaatcagttataattattagtttatgcatctccaaaatttctagtcaaaattggcacaaattgatccaatacattcttaaagcatggataactgacccatgcttgccaatgaaagacagcgacatatattgtacataaccaattatatcatatacaatcatttgatcaaatcaaatagaattaatattttgagatatggaaaaaaatcattgataaattaatagattagattgaatttataaacttctcacgtttacttatcactatttgaaatctcttaatttacactagacactagttatattagctgattttcgtgtagattagatgaattatatttagaatagtatgatatgaatctgttgagtacgtctagccaaaatatatatatttagttaatataattcccattggtttttcaattaagctactgcagtaatataaatgtttttttagttcctttcacatcatttttttctccattctttttcatgtacttcatttaaatttcacaatcctcctgtgttggaatcactgtggatgtgtttacttgtaggtttgtgtgcctttatttagctaggtatggtcattaatagcttattttggggatgtttaggagcaataaaccagttaacttttaccaatacccttgaattttctgacagttacgggatgacctgatgactatgcttattgctggccatgaaacaacagctgctgttcttacttgggctgttttcctgctcgctcaggtatgattatccaattctagctattaatattaaaaatctgtgttaaccatctcatgaagttaagtgaaaattactagttcttccttgatttactcggtaatagctgtcatacttttgaactgcataaacatattaatccaaattactttatgcactacagaatccatcgaaaatgaaaaaggcgcaaaaggagatcgattcagtacttgggctggatgaaccaacgtttgaatcagttaaaaaattggagtatgcctctaagcttattaacattatatctgaatttatttattgattttcacaaagaattctgtcaaaaatatgatatttcaaacaagttaaataagtgctcagaaactccccaaaaaatttagctaaatcaacaaaaattcatattgaaacttaagtaattaaaatcaatgcagtaatacatcaatttgacagtgttaagtacttctttcacaatttgacagtgttacgagatctagaattgttttttccactgttcttctactaaatattggtttttcataatgatcaaaacttctatggctgttgtctaaggacttggctttggatattaggaatgttgaatttataaattatgcttttcatttcaagctggttctctttcatcacagttggaacctcagaataatggcatcacctttgctttattttgagacagcatgcacttgatagatgattgactatttaatgatttgattttctatttcagctacataagacttattgttgtagaatcccttagattgtatcctcaaccgcctttgcttattagacgttctctcaagtcagataaattgccaggtatttatacttaatggttctgatatatgatacgactgtataatgtattcatgtcatattagaggtttcattactattatttttcttttaaaatgaaatttaaaatcgtgtctgcaggagggtacaatggcaacaaagacggttatgcaattcctccgggaactgatatttttatatctgtgagtagaagacaattgctcccttttgttgaaactaatcatgtttcttactcattttttttaataaagaaatttaaaattgtctactcaggtatataatctccatagatctccgtatttttgggatcgtcctaatgaatttgaaccagagagattcttagtgcaaaagaagaatgaagatgttgaaggatgggatggtttcgacccatctcgaagccctggtgcactgtacccaaatgaggttattcactcctccctgcatctttttagacgacttttaatcatattctgacttgtcaagtaacgaatctattgcttcaattaccagattatatccgatttcgcctttttaccctttggtggaggaccaagaaaatgcgttggagatcaatttgcactaatggagtcaacagtagcattggctatgctgttacagaagtttgatgtggagctgaaggggtctcccgaatctgtagaactggttaccggtgcaaccatccatacaaagaatggtttgtggtgcaaattgagaaagaggtctcatgagacatcataaaacttaagttgtattgtaccacaaagtctattttcattgtaacttgacagttatgaaatgccaattatataactctgttttggaacatgagaggaaaaaagtctaaaccaaaataaaataaaaccactcaattcaccatcatccctcacaaagctaaagtgctaagcaaatcactgtcacactagactgtaatgaagtaattaatttaagcaccatacttgtgttcagaaattgaccatttataatgtgaggtcagaaattgctttaccctgccattgttgcctgaaaaggagtgttttaaaat

SEQ ID NO: 184726 - DNA, 3139 bp, Cannabis indica
ttacagttcattgaggatgcctcgctggagttggaggctgatctggagattaatgaagaagtttcaaagacgggggtcctggcttctttggttggttctcgcaacctttccaagggtcgggtgaaataaattctcacgggcatttggtccatgattgggaactggagaatcaaaacgatggaacaggggctgtggggatttttcttcgacaacttgactgacaaggaagagattttaaaccggagaccgtggatagtggcgggtcagcttttaaacctccgtgaatggccatctgatggttactggcagggtgtgcccatgaataaagctgtgttttgggttgaaatacacgggcttccaaccccttttctagcaactcagaactctacagttataggagctaaggtgggtgagtttatcgaaggggatggagcggacaacagagtaatcgcaaggaggggttttttgaagcttaaggtagatatcagagttaaccttcaacttccggccggattttatcttagtatcaccagaggaaggcgtgaatggatacagttcaagtatcgcaaactcccaaagatttgttttaattgtggatacctgtcccatgacagcagtggctgttctaaggcccgagatttcgcctatcctctggtaggagaggctgtccccctttacggaccttggattaaggcctctgttccaattcgaagttgttttgatacgagaggccctacccttatccgtcatctcggcggccggccgacgtcactttcaagaatttcgaataatcaagccgtgggtacgaatatcagggacgtgcatggtactgttggtagtggtgcggcctcaacgggtacgaataatgaacgtacaaatgccaagacacctggcatgaatgcaaaggagacaactgtaaagttggttggtgggtttaatatggaaaacgtggctcatcccatgaataatttaggctgaaatcctgatgataatagggtcattttaagtatgatgcccaatgtgggcccagtggtgccccaaatgcttgaaataccccataatgagatttgcaagtccaaaactccccatattcacctgagcccactattatttctgggccgctaattgatcctttggggaaagtgactaatatccctcacaatgaaggcaagcccatttcaaaagaaaccagttggtttcattctacagatgtgtctgtgctcagggaattgggttctaagaaaagaaaggcagtgggaaatgtttctcctattctgattcaggcagacgactctgtcactggcgacaatgaagtttcaaagacaagggaagtgggaggcacttctccattggttcttcatcgcctgcagctcaagccaataactccgaaaaatttgggagtcgtaaaaaacctcacacaaggagcaagggagtacgaggagaagattcagctgagatcattcaaatcccttcaggtacagatgttaattgtgtttctgagatcagaaatatgctgttcgaagttaaaattgaccaaaattttcaagtgggcgacgaggcggcccttaccatgccccccacgtccccatgaaagccctatcatggaattgccaaggtcttgcgagaccctcgacaatccaagctatctcagcttgggtaaagaagtggcaagtggattgtgtttttcttatggagacaaaaatcggggaaaaccaaatgagaaacatttgtaagactcttcattttgattatggtagttatataccttcagtaggcattggcggtgggttttttctgttatggaataaaggtattaatatcacggtgcttaagaagtttgattcggggttctcctgttgggtgaaagaccatggctcacaaatttcgtggcatctgtttgctatctatggtacgccttatgccgatcacaagaatgaattttgggaggacttggcagatcaaataaatggttgtaatggcccttgggctcttatgggggacttgaatgttattttggctaaggaggacaagtcggggggcgtgcttttgcctatcgtgacggttctgttctgagaaattttatgttttccacgggtggtgtcgatctgggatttagtgggtgcaagtatacttggcagaacaaaagaggtttcgttcggttggtgaagaaaagaattgatcgtgtgatagttgacacaagctggatgaacttatgtccaaaaaggggagttcgtaaccttccgatcattagctctgaccatggagccattttgcttgactcatgtgcctttaagcctagagggtctaggcctttcaagtttttcgaagcctggttcactgacccttccagcttggatgttattaaagatgcgtggattagtatggatccgtatgagaagaattctgtgctaatgagtaaattggtgaaaactcaaaatgctttacgttggtggagcaggaacatctttggggattgtgatgttagaatcaaacaattggaacttgagctccaaactcttcaatccaaagaggctcatgatgtggatgtggttgccgagagaagggtccatgattctatcgttgatcattggcatcgtaaggaatcaatgtggaagcaacgttctagggaactttggctcagtcaaggagatataaattcctctttcttccatgcctctactttggttagaagaaagaggaatcatatatggaatctaaagaatgctagtgggcaactatgctccagggaaagtgaaatggggtgtatcctgaatgattactttaagaaattgttctcttctaagggggggggttctatacaccgggttggaagatctaataaatccttcggtgtctttggaagaaaataccatgctttcggccatcccagattttaaggagatcaaatcccatgttttcctaatgcatcctctcaaagctccgggacctgatggtttttctgggtgtttccaccgaaagtgttgggatttcgttggcaaggatgtggtgaattgcgttcaaaagttctttcgtactggggtcatgagtccgggattgaatcacacttttatctgccttatccctaagggtatcaaccctgacagtgtggatcgtttccggcccatcgccctctgcaact

SEQ ID NO: 184727 - DNA, 4107 bp, Cannabis indica
tggaaatattgcaattgtttacgatgacatttgtttggatttagtttcattttaattcaaatcgttgttgtcattaaattttaaactagagatagctccttataccagtgaataaaataaaataaggagtttgtatatttttttcctcatttttttcttcttaaattcataccgcaactagaaataacactttcttaaaatggataaagtatgattcatggctgaagattttggtcttccatgtagtcttttggtattgcttaaggcagctcacttacattttgtgcttaattgtaagcggcttaaaagtagcttttcaatagactaccacgggtcagtttggttagtaagctttttacctaaacaaaaactcattattgagcaatttgtgtaaaagtgaaccaagatataagcttgttctatgtcgcttcatcttttcaattgtacgggaatctatttcagctttcagtttgttaaaatgcttaatggaactagttctcgccctatgccgtgtgatgcataaaattagaagttaccttgtttgagggttgatgcataaggaccgctagctagttaacactgtcaaatttgtcagagaagttctgccctgttgtgggaatttgaagagatggagctcttatgagcattacagcgtcaagcggattgggagaaagttctttacaattatgagttttgaacttcaagtagaactggaccaatgtacattttcggttacatcctcttttcaagtcaataggccacagtaggcatgtggtttgctcccacaaggtctgaggttcgagtccttcctgggtacttacatagcaattgttatagttcctggttcctaaatattgtagagttaggtggggatcctacaaaaaattaaaataaaataagccacagtagattctaatagcctatggattgtttttgagtcataatattttatcatattcactatttgtttgtgtgtggtttttctttttccttcgatgttgttgatattgtcaaaatgcccccggctcttaaacttgttggctagatagctaaagtcataggtcttgctcttaggactgtataatgagaattattctgtaactaattaaaaacaaatgactgcaggtatcatcctgacaagaatgcaaatgatcctcaagcatcagatatgtttaaggaggtcacattttcctataacatcttgtcagatccagataaaaggcgtcagtatgatacagctgggtttgaggtataatactaaagctaagatatttaaataaattgatttcactagccagaatcattagcttcattgaggaatttatggtttgtttttatgatgaaattgatgtctaaggctgttataatattacttcctaggctgttgaagcagagagtcaagagttggagctggatctttcaagtttaggagctgttaacaccatgtttgctgcccttttcaggttagcagagcttactagttttttttcagattttttcatcctaaatattttttaaaatttgtgattactcttcttatgagtgctgcacctcgtgtcacaaattacagtaaactaggggttccaattaagaccactgtgtcagctactgtcttggaggaggcacttaatggatcggtcactgttcgttctcttccactggggcaacctatatccagaaaggtgggagtccttttgtttaaaaacagtcataattttttcttttcttttattttgttataagattatattttctattaggttgaaaaacaatgtgcccacttctatgaagtgacggttactgaagaggaagctcaagctggatttgtttgccgagtgcagtcatctgacaaaagcaagtttaaggttgatttataaatatgttgcagaacttttgcatggagtttagtcccttttgttatatcagacccttgtttttttattggtgttgtattttttatttatgcttttcagaatttttaccagattacgcccttatatgtttttcctttattcatttatttttctttcagttattgtattttgataaggatgtgaatggtgagggaagtggtggattaagccttgccttacaggtacttttaaacaatttttttttgtatgtacattttgttgtttgtgggtcgtacattgattgtctacttcagaactatctcctagtttgttgttgatgtaggtaagaccataggttatatttcttattctggaccaatatcagtctactttaattatggcccttattatttcattaaggtggcatttggttgggaggaaagaaaatataagaatacgactgggaatgtggaatggtctttccttcctttttaaaatggaatagtcattctaccaaaattccttcggttttaaaatggcatagtcatttcaccaaaatggtggaaagagcattccattggaaagtcattccaatactttataatgcaaccaaacaaaggaatgaaatgaaaattgtttcctttccattccattctatttcattatctccaaccaaacgccacctaggtgtctatcttacatattttgtttgttattttaggaagacagtgcaaaaactggaaaggttacgtcagctgggatgtatttcctttgttttcccgtgtatcgattagatcagacagttaactcggtatgctgttcttgcatttggcatttcctttacttcagttttctgttgctagattcttttggtcttcacaaacttaattcattcatttatgtttcttgaaacttttacatcaggtaactgcttcaaaggatcctgatgctgcttttttcaaaaagctagatgggtttcaaccatgcgagataactgagttgaaggcgggcacccacgtgtttgctgtttatggtctgtccatagattcattgtacagtagattattatgctgtgtaattttgcactaattctgtcagactttgtattatgaaaatttctttcaggtgacaatttttttaaaagcgtaagctacactatagaagcactttgtgcagagccgtttatagaagaaaaagacaatctaagggctgtagaatcagaaatactaacaaagagggtggagctgtcaaaatttgaagccgaatacagagaggtttggacttgatatagagcatgcgtaacttgtatgcaaatgtttaaattatgcattctcagagattttatgctatattttgataggttctggcccagttcaccgaaatgaccaatagatacgcgcaagaaatgcaagaggtaagcgtagcttctgtaaatctatttgttgtgactttgtttaagaattactagcacattagcaactgaacagaatcttgattccctgctgtatcctgtatcttttatttccttaaattgtctcttcacttcatatttaaacacagattgatgaccttctcaagcaaaggaatgagatacatgcctcgtatactgctgcacctccaatcaaacggagttccagtagaagcaggagtaagggcacaaccaaggaggaggttaaagaagatggtgaagagagagaaaagagatcaacttcaagagatcgacccaagaagaaaaagtggtataacattcatctaaaagttgacaagaggaagccatgctgatatcatgtgagagttttgagaccctttctgttaaaacgaattggaccttcccctttttcatttaggcttataggacgttggggtttagtttaagttccacagggaaagctcatttgtttggggtgatctcacatccatgcagacctagtacaaggtggagttcgagtctcagagagacattcagaagaaaatggcgctttactacagacaacaactcgttattgtaaaattcttgtattttttgatgtctttgtttatttttccttggtattccgcatctattacacatgtaaatctcgtaaattattcatgggaggcgcatacgttgcctcatttatttcttgtatttttgggataaggaaagtggagaaatgtgcccgtatgtctttaactcatatgtagtattagcttcttatcgtcttacaatttgctgtagttattagaaagccaatcattctattttttttttttt

SEQ ID NO: 184728 - DNA, 3918 bp, Cannabis indica
aacaactctaatacaactctaagttgtatgctttgcatgttactaatacctagtatatatatattggttatttatatgggttatgattcatgaacacttcattgtttccacctcatcagtccatattggtttctacttttgtctagtgaagatacttttttttttgcctcattcagatacttaccatgttcaatggtagctttaatattgttgtagccaattagccattttatcattggaagttacctggtctaagatagcagatgattcattatgagtttttgaggtattagttggaaatttggttgtttatgtaggaggaaccttcttctaaatcattaattattatgtaaaattgtttagttaactactgagtgggtcttcaacctggtctccccttttcaatgaactccctatatgtcttcttcccaggatattgaattgattgaaattcctcaactcttcctttttgttactttgaactttcttcttaggcttcatgtttcacttttcagattttcttttccactgtacttttggacttttctttttatttcatgatctggctatttcttagtttcaatttatactaatttgatgtcatcaatcgtattgcaggctagcaagaaaattgcagatgttaaacttgcaaaagattttcaatccgtcctaagagaattccagaaggctcagcgaattgctgctgagagggaaacagcatattcaccatttgttccccaagcagttcttccttctaggtatttgtgaaagtctccgaacaaatacagctcttatttattgtttctgtgaaaagtgaatttaggaaggaaatcaatctctacaaagaggctgattattgttctcaaatattgttggaggtttttcttgcaggcttgcatctcgtacctgttgcattgtgctatattttattctgttctttttttttacaatttaggagttatattgcattgtgctattttttattctgttttttttaatttacaaattgtaaacttttttgttaatattttattgctatacagttacaccgctggtgagctagatttaagttcagataagagttcagaacagcgtgcgtgtccttgtggaatcgaggaggttagttctatttgtgtttaaatgttacttattcagttcatcatagattgaaattgtttggagaagaatgaagagatacttaaagtcttgtctcaactgcatgccataaaattggtttacacttcagctataaactcacaaagttaggtccaaactccaacctcagtatacctggatggtaactgtaaattttcagccatgatgacttataaatgtttagtgtacaattgatgataaatttgataatgatttttaacgcataaaccaaaagagaatccctgagaactgtgttgttgctatgccacatggtcagtccagattttgatatgcttcaccatgtcctgataagtgtggaagttacttcttactgattccttggtttaccgcaatcattcttattatgttgcctatttttgttaacattggagggttgagtgttactaccctcctattgttgatttgacaaatcataatcattttatttagttagaaatatgtgtgtgcgcgcgcgtgtgtgttttctgtagtttgtaaactcctattaacacgagattgcatattgtttgttgtaaatggcttgtgctgtaggcaagaagttttgctgttggacaatgaaattgccttcaatgaggctataattgatgaaagggaacaaggaatacaagaaatccagcaacaaattggggaagttaatgaaatctttaaagatcttgctgtgctagttcacgagcaaggagcaatgatcggtaaataatctttccaacttccttgatcactaatattatgttaggattgtattgttagctggttagttgaattgtaaggcctaattgtgattgtcaattggggaattagttagtttacagtagtgagaatggagtctgttaaagattttgtaacattcggttggtaaaatataaataggagaggagggtatggagaaagagaaacagaaatttagttttgttgtgagagcattgttgctcagggaagaaaccaggcttttttactcgtgaattatccattttactttccttattctattgaatacatgtttatacctctctgtgttttccttgtttgagtgttgtgtgagatattgtggttggagttgatctaaggttgtatccatacgtatttcttttatcaagcttgcgtttccttacgtaaagcatatccattttgtagatgatatcggatccaatattgacggttctcatgcggctaccgcacaggcgaagtcacaacttgtaaaggcttcaaagacccaaagatcaaattcatctctggtaaatctgtgacccatatgcgcttctacttcgatttgtatttagtaatgcctcagcgatggaatgttcagatcccttttatgtttttatgcaggcttgcttgctcttggtgatttttggaatcgttctactcattttaattatagttcttgctgcatagaggttgggattggatcacataccaaattgtgatctcggctgaaactacagaagttagttttgctaatctattcaatatgcttgacagaagctttttgcttctagccctagctagtatatacagtgtggtaaaaaggctctgcgaatggttgtttttgtgtgcagttacttttctttgagttggtgattttgggatttgagcttgtgttgcaagcttttcttttcttaattataattatgtaatgtaagcagtgtttactttgatctaataatcaatattcataattcttttggtttctcagtgttgtgctttaatggattgtattaggtatatataggtagatcacttttgaaggattgtttctcaagtgaaagttttggtatttttttttggtggaagaaagttttggtatagattgagggtgtgatacactggatcttatgtactatactagtcaaaggttttcttacaaggtatgaatcttcgcacgtggtatacatgtgcattgcattgcatcatcaattgctgtttctttttcgttcatctctcaagcttattatatgtatgctaactttattatatgtatactaacttgaggaatccattgaatgtatcagaacaataatggtatagtaaggtagagtaagttttgcttgtagtgagggagacttggtatttaggtgtaggggattctcggatttctattgatcttgtgttttgtggattgaactttctttaagattgatataaactttgctgcttttattgctattttattttattctagtttgaataataagatttttattactcgatttttattggaagattttttttactgataggtttgatttgtcatttcgcattatggaaacgtagcttattcttttgatgcttcagttaatttgtcaatatggttgttaattgaagatgttaaggtttcattatgttattgtaaatgacttaattattcttattttgttgatttttctcaatcttcctataatgaattttgttaagttagcaatttttgtttacattttcaaaataaataaataaataaagaagataattaacgaagttatagcaaaggagataaatgagaaggcttctatattttgaactctttcaaactactagagaaaaaatctaacaagtaattgaacttcaaacttaacaacagacaaaatattcaactaattaacaatttaatgccaaaaatatataatatatttattaggggctcttacaaaatactaaattttaggtaaaaaatttaattttattgcacatggtagaaattacatttatactgtcattcttttttttttttttcctttcctttatact

SEQ ID NO: 184729 - DNA, 1344 bp, Cannabis indica
aaagtccatagctttagtgctctgtgagttcacagtagtatcagtaagcaagttggtatttgcagtctcaagttcagagcagtcaggtgcggaaactctagaagaagacccagcatttgatggttcggtgtcttttatagagttcaaagcagcttcaatttgcaagttggttttgagagtctgaaacttagcatagctacgtgtggtaactccagaagatgacccagcagttgatgtttctgtgtcttttagacttcttgcatcatcttgtgaaccatcctataaaatgagtaaaaacaaaaatagaccagctcaaactagcatcatgactatagtattattatactgactgctttatatacagactaaaatagtaataccagaaagttttaattaactcaacccaaagggtttattctaaattaagggcataactctttagtttagatacaaaataactaaacaatacacacagaagatggtgtttgtatggctgtgtacataatatattacatattatttcagtattctgtaagactaagatgcatttttcccttctttaccatatgaacaatcaaaggggccatcctttttctttttgttttatctaattttaacactagagaatacacagcacatgaaaatagaaagggattatcactaccttgtttaagaatcacaaaataatggaaaaaaaatagaacaccacctatcatcaacataatatcattcaataataatataataaccaagaaaaaaatagcatagatgtaccaacttaccttctcaaggagagcctcaagtaggactctgtaataatcttcttcaataaaaggccatccatcatctcctccataaacctaaagcaaaacccttttagaatctcaaacatatatatacacagagacatactatatgtaatttagaaaggagataaaacccactttcagaagttttctgacagcttcacgaacacattgcttctgaaatccaaattgactcatggcatccagtgccgcgtccatacgtgtgttacctctctgcaagtgcagagtatattataatcaaatatgaaacgatcaatagcacataacggaactaaaaagaaaaagcattccaagattaacaaagagaataaagaaatggagaatgcagaacgatgtgaaatgaaaaaggaggaaccttgttgaatcgtgcctttggggccattttgaagaagtattttagccctaggctaggcaacaccagtaacagtaaggcaaactcgaaagcaaaactctcaatcttgcttccttcaaattctcatcactgctcgatcaaagacccatgcagaaaacccaaaaa

SEQ ID NO: 184730 - DNA, 1130 bp, Cannabis indica
attttttttttttgacaagaattccctacaaattaaattgattaggtggagtggttgataaatgacgaaacgctcctaacgtgaggtatatatatgatgtgtggacttttaaatgatttcaattctgcaagcttttattacgactcttatataatataagattaacaataaacataaatatatatatataaattaataatatttttataaatattgaaacacacaatctttttaagatgtcaacatatatttgtatgactacctatccacccttatattatggcatatttaagtgtcaatgaaacagaaaagggttcaccttctttatatctctactaactatacaccatattttttgcttattatatgagaacaacaaaaagtcatgaagatggtaaatatataaatatatataaataaacaacgcgtactagttaatcacaaatattgatgtgtagaccacagtgactaattaggctctgaaatataatatttatgtttactatttatatatattaattgatcaaatataatttttagttttactattattaatttatcaaatatatatatagaatattaattaaaagaagaaaaatattaatccgacacgctaattaaaattcaatatataaatttgtaaaaaaatatctttattatttatggcaacaaaaaaggtttttgtagtgagttttatacacacatttttcacatgtacatttatacaatactcatattaataataaatcatgattgaacaaaaccggtttaatttcttccaaaaatggaattaaagacattggtgggaaggtatggtcaacgtcaacaaggatggcttttatatattaggtgaatgatcatatttacataatatgtacatatataatacaaaagcctaataaaaccaaacggaaattaatgtttttctttttcaattaattataaattaaagtcttcatgtccacacacacgataattggatcgttgaaatttcaagtcgatctcagctacaaattatcggcaaacaagtactcatctaatattaatttttttagggtgtgtttggaagtaattgtgtaattactaagtagaataattactacgtttaaaaagccactatgtaattgatt

SEQ ID NO: 184731 - DNA, 1891 bp, Cannabis indica
cttaaaagttgaggggcatgatttggtacatgtcaaagttcaggggcaaaaatcatatttagcctaatgattaataatttatctaattaaattattatttagttttaaatattaaggtttggtggggttatatataagctgtcttctcatgattggaaaggccgcttggtgtattaatttaagcaaaatactaattattaaagagagattatgtttgctgactacctacacaacatatatatctgaagtaggtatggataattgattaaatattgggttaatgggttattagcggagctaattccaagtagttggaacttggaagtgttatattgcaaaagccatgcatgtttttcaattatggtgatgctttttattcttcattaatttaatacaccagaaatacatgaacaaatccaaaattatatagtgtgacacataatttaaagaaatagagagctaagctagcatggaacaatactatattattgtcacttcaagttagcaataattagcttgttgctttagtacttgctaatatatatatacctaattgggaattaagatttattttcttattttgatgtttcaatcaatccatgtcaaattaataaatacacgacacatcatatttaaaatatttaaacaaaaatgaaaagaaaaaaaattgtccaaaacaaaaataagttagaaaattaatttactaacaattaaacatgatatgaattgtgacatcaaaattggacaaagaatttcatccagtggatgcatatatacatcttagttttttgtttttctgtgaagattaccatatttttacttcattaacatatataattaacaaggtcgatatagctttacaattagtccaccttcactactagctaggtttaattggttcatgatatgatctagcatatatttgctgagtcatttcctagatcctaagtaaattaaaagcttgagtctcaataacattaagctctcttttatctagcggagtgttctgtgcttgcttcggaagcaattcatactctcaacaagattcgaagtaatcggggtttcatggcggtcaaaacggacatgcacaaagcgtatgatagaattgaatggagttttctgcagcgagtcctcaaagcaaacagattaaatgaaaagttctgcaatataatttcccagtgtgtgacgacagtgactttctcgatcctgctaaacagagctccatagaagcctttcgctcccggaaggggtctacgacagggtgaccctttatcaccgtaccttttcattctttgtagtgaagttctttccaagttaatgaaccaggcagaagctggaagacagatttcggggatcaaagttggtaagagtactcagcccataactcacttgttttatgctgatgacgccattttcttctgtagagcgacggtttcagaagcacaacagctgggaaaatgcattgagaagtatgagggatggtcgggacaaaaatttaatagaagaaagagtggtatggtgtttttcccgagggtgaagatgaatgagaaagctaacattcaagggatccttgacattaatatgctggataaaaatgagagatatttggggaatctctttttctattcggctaggagaagggatgatttcaaatatttaaaaaaacaaactcttgtctcgattggaagggtggaaagccaagcaattgtcgatagcagggagacaaactctaattaattcggtgctgcagagtatctcgtgttatgcgatatcaaccatgagaattccagtgtccgtttgtgctgaaatagacagcattgttgcttcgttttggtggaagggatcagcgtttcgaggggaatcgatacctagctctgaaaagctgggcgga

SEQ ID NO: 184732 - DNA, 3424 bp, Cannabis indica
tttcaaactctcgagctgtttcctctttagcttcttcttatgcttgtttacaaattacaaggcctctttcagatggaagttcctagctatatccctagcactgtcatactcattaagctcaaccagcatcttctttatccggcgtgcaagtccgttagtgtcactctcgcttacacccgaggcacgtttcttctcaagagtttttccgagttgtagaacataatccaccaagggttgcaacttgcgtctgcacatttattttaaaagagattaatatcatatttgaactgtttactgcattttggtttagtgtaatttgaaataggtaagaatgaactacaaaatttcacagccttcttacctgtgatcccaactggtgacgcttggacctgcccataccccaaataacgaagcaactaccctttcagttctcgtaattgcatcatgaatgtttgctgcaatacttcgaacatgaggtagaacttttcggcacaaaagctcatcaagagcaagcttttccaaaactggcagtgctaagatttctttccacaagcaaatgtttttcatcaaacggacagacatgccaaatcgatatgctgcaacttttgcagcattaggcacagcttgcataacgtgtggactccatgttgggacctataaggtgaaaataataaacaaaacaatttatctttcctttcaaaaaaacttaaaactttatcaactacacgataggaaagcaaacacataaacaaatatgcaaaacataaagaatgtgaacaatacttgtctcaatgcattgtttcttttttttttaaaggaaacatttgttccaaaaaaataaaggaaacatgaaaatttatgtggctgcatatttaagcatgcgtttaagaatgtattaccgtaagattgtcaacagcatcagctagacgagttctaatagcaactaataaatcagcgagagcatcactagaagctggcacataatctgttaccaagcttgtggccgcaactgcattctttgtctcttgtgtactaagcatatcccagcaataaacaatttcatgatgcaaaatagggagggcaaccttttccaccagttcaggaacaaggttagcatcagcatcatcatgtgtgaaaccactcccatcttctggcaacccataatccattaataatgaatgcctgaataaggagaaaacaaactcagcatatttaaagaattaaaagcatgcaggttatagtaataccaaatgatacaaggaaaccaagctagaaaggcatttgtaatagacaaacaattaggtaaagtaacataccacttcatatttaagaaatctgttttctcgtggagtggatcccacttcaacagttccagcctcacgtagggagaaaatatagaaggaacacttaatgacatataagaatctctgtacgtggataagtaatctctcttccactcttcaagcctttctttaactactgaaagttgggaatattcttcagatgcatcactaaaaatttgatcagcagtatggagcaatgtttcaaattgtgacttgtacgctgtactctcactgtcactctcatctgtgctcgattctccttcaattctttgataggggacatccacatccattgtcgataacctcttagaatcaaaccgagcttttctgcgtcggcgagcctcagccctccctttcatctccatacgtttctgcaggttcacatctctgccatattcatctaatttcactggtagatttgcttgctcacttaaagcagaagacgcagcttgtgcagcaatcttggctgctgcaactatgtcagcactgccacctttttggctaagaacaaacattgctgcattaacctctgcctccacccccgtcatttcatcctcgttatctgcaactcttctttcgactatagccgatgcccgattttcatggagcttctgcatttgctcttcaagttcctcaatatagggtgctttatgctgtaaagtgttaaagcaaaccattaagtacgggtcattgaagaccaacacaccacagacatcctaaataatatgaaatattgactaggaaagaaaaaaggagcttgacaatagcatcttaaggcaggattatgtgaaaaaaaaaaggaagtataaatagcaatgagaacaattaaagcactaacaaaaagatatttctgctgcaaagggctgccagtcaaaatgaaagtgaatgtattttttgttaatgaatcaagcgatcagaagacgtcaaagtgagactcttggacttgaataaatgaccaaaataatgcacttaaataaataaatgggaaacttccataaatcagtcttccttcaaaacctatctcagattacaaagtaaaaaacatatatatttgtaaaaccctcaactggtttgagaaagtaactactcatatgcttgtttgtgttatattaagtcaacaagaaggaaaactgaaagtgaaagtgaaagggagggagaatggatagataagaaagccttgataattactcttccaaatttaaattctcacctgaagaaagtcacatataagagaaacaaaatttcgaagtctttgcatgtatttgtacttctcatcagcagcagacagagatttctcaagggcagtgatattcaatagtgaagcagataaattttcatcagccttattcaatgacagcacagttctgccatgagtttcctgagcagagaaaaacaaaataagtttactccatttccatgataaaagcacataagactacaagcatgtcttgccgaagttctatttttagtttgtttgaaacaagaaccccacctaaccaaaagggaaaagtgcatatgcaatatacaaaagatgcatgtacggttctacaatatttaagaactagtgaactacatgggtggtcaagagggacgaatattggagcttgtgggagcgaaccacacaacagaccatttcagcaatccctcctgggtgtcttgcaactcttgccaaagattgttcgattaaataaagtcgcagaaaaaagcaagagccatgctacaaatattaatctaagtaaagaatataatttgatcttagcaaccgtttttgtatttacaaagttgtccaatctcaactgaaaatgcaaacagctttctaacctcgcttccatattgttctagttttttttttttaatgttttctcatcattgatactgcataattttctttaacatctttttcttggtttgacagagttgagtgtccaaattttcttgaacaattaaacatgccccacaattcaacttggttatcaatgctgtctaatagaaacaatactaaaatactttcaatgctgtcccataagacaacaattaacacaacacggaacaaaaagaaagaatctgcacatgaaaaccat

SEQ ID NO: 184733 - DNA, 3683 bp, Cannabis indica
tatatatatgtatatatataagctgtataaaataaggcaattcttaatatataaacctagtgcggctgtatatttgaacatatgtatttagatcatgctaagaaagaaagaagaggggggtgggagaaccaacttgtgttttgcttcttatctctcctaattacagataaaacactactacacaatcggagtaatatgtcaggccaattataccatctttaactgatattagtgtcttatctctactagaaatagaatggtcagccagaccttgtaagatgctacgagtcctagaaaattgtgcatagcgttaaaatttaggaattttgtggttaagatgcatgaggttcatctcaaaactaactggcttatgcatcctgcgtatgtatttacttttcacgctatcaacgtagagcatgtgaatgtgttgctaaggatctggcatacaccatttcctcgtctgaagtgtggaatttatcaaattagaggatgagaagaggaaagtttaacatgacatgggtcataactctgatgaaggtgctaagtcatatctcgatgcattaacaatcgttcatgtcagtgccttttgagatttaaatactgtcattcattcatatttcggtcatagctgactagaatttggttttgcggggataattagagtatttcttatgtcaattatggttttttttgtagaactgaaatcgggattttttgtctagtgatgccctcttcaactgtatttgtttttattgtgaatttacggttactttgaaatttttgcatgagagaggtgaatttaatttagctgtctaatcttagaattctccgtatttttttttatcatatgtatcatattacaaaacccgtttgaagactactgctgcgtatttgaaccatataaaaagcttggattcctactgaagtgctggaatttatctggctttcagtcatagaaagttatcaccgcctagtaatgctgaaggaaaagtcttctatttttatttcacttgactcaagtcttaggtgtaaattcagaataccagccacctctttttctctatttaatagagccgactttcttcgttatttgtgaattttacctacctgattgtaattatatctcttcttacttgaccacctaatcagttcgtacaatgttaaagtaaatatgtcaactttcctaggataggggtatagcaccatgtttaaattcttgaataactacaatattatttatccttctcagagtttattttcagaagaaaaagaaatactttaaaagatcaaatgccatgctaaatacaactttttcatgccccttattcttttgcatttgtaggtctgcaaggcggtttttgcatccaaggaagactactcttgccctagcaaaagcttttgaggctctagcaattagtgaagaatctgttaagtcaatgtcatttgagcagcttgcccttaaaattgaatcagctacaactattcgaagcacgaaagcattacttgatcgtctagagagtcgatatttgatctcacgagcagctactggcagcagtcttcctagtttggagaacattgattaccttctacagcgtgttgcttcaccagtcagtaaggaaaacattaacatcaacgaggaatctaagaacattcattctagtgatgaaacccctttaagttcagttgcattgccaaggtatccagtaagagtttttctttgtgcatacatgattttgggacacccagagacagtttttagtgggagaagagagagtgtgaatgatctggcccagtctgcaactgatttaatttgtgaatttgagctattacttaaaattatattacaggggtcaaataagactccccacaaagatacagctcccaaatccagcacaattactttcacatcccagctagaagcctttgataaagcatggcgtttgtacctgttgcacttcgttgcatggaaagataccgacgctaagttgttagagcatgatttggtgagagcggcttgccaacttgagctttctatgcaatcctgtaagttgactcccgaacttgatatgaagactatccaaaataaggtattctgatttcaaaatcatttgttagtgcatcttttttcttccctataagtaagtcccacagttgtattcttattattattgtaatatattttttattggttgatggtagattacagaaaatcagaaaatactaagggaaaaattgcagcagctaagtggtaatcaaggacttgaaaacttggaagctgctctctctgaggtacggtccagatatgctggatcaaaggaatctgcccgtttatcttcttttcaccctgcttcattgggtgattcttcagtatctgtatctgctgaaacgagcaatctcacggacactcataaaagctctagtccaatgaatcatattgtctttgacaaagatgaatctgaccttgccaatgaagtcagttcttctttgtctttcaaaagtggtacagatggtcatttgagccctactaccttagtagttggtgagaatgagctgcttgtaaacgaaattctccatgatcaacaccttggtgttgttgatagtttgacagacggtaatgagggtcaaaacagtcttaaggttggtacataaacttataagtatcaactattaagcaatttgtgtaaagattatgaagtatttataaaaattcatctttccttgaacaggcgaatgtgagagagaccattgaaaaagctttttgggatggtgtcatggagtccatgaaaggcaatgaatccgacttcagctggattcttaaacttgttacagaagtacgagacgaactatgtcacatgtctcctaaaagttggaaacatgaaattaatgaaagtatcgatgttgatattctcgaacaggtaaatagctaactaactattccatttagtgcaaattggtgagttttcctcaatccctaatcgaaatattttcttgacttccatctcctttctttttttctattttcattctacgaagatgctgagatcaggtgatttagatgtggattattttggaaaggttctagagtttgcattagggactttaaggaaactttctgctccagctaaggaagatgatatgaagactatacattaccagtttttgaaagaactaggagacattttacaagctgaagacaaatcaaaagcttcatgtgcccttgccataaccaagggtctgcggtttgttttgcagcagattcaggtgtgtatttgacttcaagggcttgcattttttttttttttttgccttttcttttagtaaaaaatctgtgctttctgcttacatggtctgaaatgagtgtggatcctgctaagtaattgatattacaaaatattaagcatatttatttttgcctgtttggatctttagcttgaaacttgaagttccctgtatgattattccaaccaggttttgaacaatgtcatcatttcctttcataattccgatcctttctgtatcttccaatcaattcaaatgtggagatgattgtttactgaattaaatattctttggaactatctgttttcagaatattgataatacataatgaagttcttgtattttgataccacggcaaaacatatttgatacacaaatgtacttttctacttcagtgctgctag

SEQ ID NO: 184734 - DNA, 1655 bp, Cannabis indica
tagagcatgaactgaacaacagcacaaatctactgctattgttctttttcaaaaattagaaggaaaagcaaagcatagcagtttggctaataggatcttttgtgttattattactgttattgttatataatataatataaatagtccctttaacatcataggtgtttttaatgtttttcttgggatggtttttgatttccttttgtaaagaaggatgatgataaattaaaaggatatatatttataagtttcttcatccaaattgggtctcttttaatcttgtgggaatacatatactatgctttttgtttttgaataataaagtgaaatagatgagctactaaagttagtgacaccatgtgatcccaagtccttgtccttgtggaaagaaaagaagtatcttggactgaaggcagtcaaaagagagtgagaataccccatttgagactaaagaaaagaaaactatacatatatatttaagataaagacatggccctgattctctgtgttttgtttattcttttgttgagttttagtttttgtcctttaattggtttttggaacttagtttaaggtttttgatgatttggtgagataaggagagagagatatgatgattgttttttatatgtaattttattttccactttatagaatggaatacatttggattaaagtgtatcagtggattattattactaatgacagcttggttaacataataaagtccctattcagaattatttaattacttaattgtcagaaagtgtgcttatgaaactaagtgctgctgttgttgcttaagatgctttggtacagttctagtaaacatgaatgagacaaactctgatatgcttagctgaataaactgaactcttttgaaactgtttagggttctaatctattttgttaaattataaagtttcaatatgtaaaaacgacacccaaaagctcaaaaacattttatgcgttttcttgattagtgggatttttctagggatgagtccaactaaatatgcagtgcttttgtctttaatattttatatgtgtgtatattatatagtttaatcagttttgctatactttcaaattgtgagattgtaggaaatttgtgtagtagatccctttaaagagttgtttttgtagatttttttattagttttggtattcacgagagtttttgttagagttttcactcaaattaattttgtttttatatttggtaattattagatctctaatgaggcgatatatatgtatatatgttgtggttaatacaaggagactgcaatcaatatactattttgaggtttttttttttaaagtgcacggaatatatgtcgtgcactatagtcacgatatttttttatatatatatatttaattaatatttatattatgaattatttttatttttacacttttaaaattagtttttttttttttttttttagttattttttataaaattttcacataaaaactcatatagcaactaacagggcaacctaaatcgcaactaaaatctgtatagcaccccacataagaaaccaccaaagaaaccaccagagaaactcaaaccgtacatttaaaaaaaacgttaaaaaatagtatctgggtaatttccctaaatattgtatttataaaattaagaa

SEQ ID NO: 184735 - DNA, 2550 bp, Cannabis indica
caatgattcaaaaataaatagttaagtaggggcagttgccaaacaaatttgttcataccaacggtcacgattaatcgtagagcatgaacaaatttcaatcctagccgttgaggtgaagggacgaactttaatatttattgttaactgcccactagttgaattagttaaggcggagctttctgtttcagaggtataaatcacgagcatttacaataaatcgaacggtttagaaaagcccgggaagcgatggcctggcatccaaggctcaaaacatgttcgacatttaacgaagtggaccatataagagtgccgtttgaggtttaaacttttgtctcccccatcaaacttttcatatttaacgtccgctaacttatagggtttccgaaatgccacaaaaccaaaaaaggaaatcggtaacggtaattaacggagacgtcggtgattatatattcgttatatatataaatattaaatataataatctttccttttacttctcccttcgtctttctctctcttagtttcaacgggcgagaatttttcgaaacagagtagattttttcttctttccttcttcatcatcttcttcttcttcgtcttaatgtttcagagaagggtttcgtattgggtttgaaattgctggtttgaagggatgagcttcagttcgattcccgccacaccttcaccggaacaggtacttttttttttcttcacctggaaaattcagaattttgtttgaattgaatcagtttcactgttttctataacgtttcttcgttttcttggcacggaagtacctttaatttatatgaactactgagtgggctctcgtgcttcgtgatcataaaccctttaattctttgtttattggatgtgattttgattttgttctaccttaatcgatctaataactgatactaagatctgggtcctactctttttctgttgttgttatctggatttgggaattcagagaaagctgtgctcttttttctttttgaggtcttgttcttataattcgtttgctgataagatttgtgtatgtggtttgttagtatgagtatgtatgcgttttatttatttataggattttgggttttggagataagtgtagaaggatatggctgatgtgaaattggaggaatgttgtcttgagaataaacaatcaacagccgcgtcaagttcctctgtatccgaaggcagtggtagcgtcattcgcaagtcccccggagtatgtagcccagcatctaactctccctcacaatggtactatccgttaagtccctttctattgcaattcagttagttctgctctgttatgctttacgatgatatgaaattattcactttatacagattttggatttgtatcctttcctcctcagtaaacatctgctttagttcatttctcattggagtgtgaatttttttttctgccattactgaattttcagatggttttaattcctctttttgtatgttgatgagctaattgtatatacttgagtttgtaggagaaccagtggccctgttagacgagctaagggtggttggactccacaggaggtttttattattctctttacttgttcatttgaatttgcttaaggacttccatgtttatgtctataagtgactaattgaagactagcttatcgagcagaacgttttatgcttaccttttgttacatgttcaattggtaacaggatgaaacattaaggagtgctgttgcagcatttaatgggaagagttggaagaaaataggtttttgtttatttttattatttttattttcgagttattcttaaaaattagcgttttagtttttaggacacggtttgaaatatgacttttaatgtacaaccatgtatggaaataaatctgatattattaagtcaaagcagtgtttgccaagatatacattaataatcctacttatgttatattgaaatagttgcactagaagtttattgtaaagtagagctgtagtgcagacaccgagtatcaagcttcaacgagcagttgccaacatataacttaaaggaagaaaaatacttgggctttttagttaaattacttcaatatttgtcatttcttgaattaccttatacttaaaaactgatatatttggatgtcaagaatttttattcaaccatgtcattcaagtcaaagctagctgcagatcacatagaagagagagtggcagacatattatacttgcattgcagatggaaatttctaggattttttgataccctgaacctctttggttacactctgattgcattaatgcagcttgttgatgtttggacatttttatgcagccgagttttttaatgatagatcagaagtgcaatgtttgcacagatggcagaaggtccttaatcctgatcttgtcaaaggtccttggactccagaggttgctacctgataatgctcttactctcctgttcatgcagttcatcatccaagaatattaattacgagatatcatttttttggttgtaggaggataaaaaaattactgaacttgtcagtaaatatggggc

SEQ ID NO: 184736 - DNA, 3932 bp, Cannabis indica
agaacagaagaaacaataaataaattcaaactattgtacaacagcaaatactgagttaaaaaatgtgaaaataaatcatagcattcttacatccttcttgtcaaaaggcatcaagaatggatctctggaactaaggcccgcaacaacagtcattacaggatcgagacagttaaaaatagcccctaatatgagcatctttccaagtttaggctcaactggaagcattgacaggttgcgtcctgtaaagtaccaaatcattagttttcaaaaatagaagaatagtattacaataacacagctgcaaaattaaaaggcatttgtaacagtaataacagtacaatttcctcacctaaacttgttagattttcatcttcatccaaggctccaatgatcttcaaatattcaacagcattttgaacctgcaaagagaaacagtaacgtaaattcctttgtagaagaacataagtagagatatctgaaaaaaaaaatcaaggtaattaaatgatatacacaacagtagtgatacatgaaaaagcctcaggtattaaatctggaaaatcacaaatctagcattcaagaagctagaaaactctccaacggaatagctcaaatataatattccaagataagtttctcctcacacccacagcactataacgactaacatttcccccaatcccgaggcctaaaaaattctggactaaaaccaaaaatacccctcaagcagcagaaaaagaagttcgtagtaagatataaaatgacaacagacctgcctaagtggctttacagtgaacctgataggagacatatcatttaagaacaagaaagctgaaaatcaaactttagaaaggagatatcaagctatcttctcaacaggtggtagttctatactgaaacatactgataaaggttctggaggttgcagggccttagatagaaactcggaaatacttccaagccgtaagctcttgatttgcaaacacaaggattgcaatggcgttctcaaaagctccggtagctggtaatcagaaaacgcatcataaacacatcttggatatagatggtaacactctcctggctgaacacgaccggctcttccccttctctacaaaacagaaatattattctttgtaagtttaatgttatcactatcagatattgtacaagtataggaaaaacaacgaaactcatagagaactttatagagtacgataacaatactagtatagtatggtagaaaaatattttttctaccataattgatagaggaaacaccgtaaagaacaattcgaaaggttttgggccgatacaatatctaattgatagaggaagcaccgtaaagatcaattcgcaaggttttggaccaatacaataagaactgcttatttatatcatgatatgacataaaagttagggatccactaaaaaatagatgaaaaacacatacagatttgagagagagttgatcaatttaaattgaaagttcggtataaaagaaagcgctggggaaaaaaaatcaatgaaagttcctccaactgcaacattgttaaaatacatattttataatatgttacagtcataggcataacttagtcgcactacatctctcttcacaaagaggaggtcccaagttcgaattcaaaacaaaaatattatatttaatatgctgaaggtataattcgctatatcaagtattagaaaagaaaaaaccattgtttatggaaccaatcaatgcaacctcatttctgaggtcaagaaagaaaaaaccatttcattaatatattcctccccatatacactgcaccttaagtgcacagtgcactcacaaacaaacatgagcactgcaaacagataggccttagataaataaaaaagggtatatgggtcattgtaatggggtattaagatagtatatacatgagagcattagaaggtatttgggggtagagaattgtttggttaagtaagcattagctcttaggagagaactaggtttcttgaatacccaacgaacaagactattttctgttaccaatatatcagctactattttccatagttacttctgtttggctctattttcctctattctgctactgtttataccaaaatgttaggaaattcctatcaaatggttcagagcgcgttgatccagcgaccctgaagaactcgaagctcacttttcacggcgatgatccattagcgtgggtcactagcattgaagagtattttcgacatcattggcgttcaattgctacagtcgaatcgaagatgatccatacgatatgttgatatgaaggctctatgatagagttctggactcggatttgagaaggttgcaatgttgctgccggacattccaaaaacctttcttcatgatatcttcttcgagaatttgtcagcggagatggcgactaaggtacgggaccacaggcctaagaccttggcggatgttctggccaaggcattgatcgtggaagagcaaatgaaattacaatgccagacttgcaatgtttaaagagatgagtcgaggaatgaaagaaaactaaccagtggcggtcttattaatttgaaaggagtcgaagacttacagcaacagagttatgcgatttcatttggggaagaacttgataaccgtgagggaaaagcattgtgatgggaatgaacctcctcccattccaccttgctcggacctccagtaatcgcaccaatgggcgacccacattagaatcgcttgcagatttgagaagctccaaggaggtggtgatgaacttgtgaaagcgacatcctagggtgctaataagacattggaaatgatgtcaatgaatagcgaacagtggtagacgtcgccggagaagatcctatgccggcgtcggtgtcaatcgaggaagggaagaagttttcgtcggtgctgaggaagatgccggtactgatcaaggaggagttgagctggccgattaccaaactagtcgcaccgggggctgaccgatcaaagagggcggattggagaagacgaatcaataatacaatctaatcttccaacaaccctatgaaggcaggcccaattcttagagttattattcaaatccgacccacaagagtacaaataatataatggatcacttaatgttttttcccactagaactagagcattaaaatcctaccaggtaagactcgagcccaatccattcaatcggggaagggaagaagttgtcgtcgatgttgaggacgatgtcggtgttgatcaaggaggagttgagcgggccgattaccaaactagtcgcacctggggctgaccgatcaaagagggcggattggagaagacgaatcaataatacttggttgacaaatttgatcttccaaccctatgaaggcacgcccaattcctagagttattattcaaatctgacccacaagactcaagcccaatccatttaatctcaatttagagtgtgcccactcaagtgagaaatacttaatgtggctcatgggttgatgcaatgggaccctggtaaagcccatttacatgtttttatgggcctggacattacaagagaaagcaagtgttaattaatgagcaaccccacgtgatcttttctcccacacaaccctgcttcttcatttacgatttcatcccttttttctccgttcattcattgcagaagaatattttttagactttttttccaggcttcagttttaatggcagcaataaaattgctacaacaactatttcaatctcatcacaatatccttatttgacttagacaaaagagaattcaagaaggttttaattttgagagaggaaaatcaagaatttcttgttcatagcgattggatatggaagacggaaatgctcaaattctttgggtggatttttgatagagggagcaaacacaccaaacaagagcatgaatcaaagcttcccatg

SEQ ID NO: 184737 - DNA, 9465 bp, Cannabis indica
atacattgaacatatcctgagtaacgtggtagtatagctttagtcaaaagttatatagtaatttgagtaatttcatgctattactacgtggcttgttttgtataattatttgaacttaatgtttgtaaaattattgattaaatttttatttgtaaaataataaaataacattaaataatacttaattctattttcataaattttatttttaaaatagcaaacctcaagctaagttctcgtacaaaatgaacagatgcaaaaaatataatcaccctgatcataacacctctaaaccatgttattattaagttttattttaataaaaattaaacttagaaaattatcttctatctctttttttaaaaaaaattactgagtaattcatttaaaaaaacacaatccaaaataatatttatatcatttttaatataatgtcaagagcacatagttgagaatatcttatctttagtaaaaagacctgagatgcttgtcatgaaggtaagtatgtatggagtacacaaccatgaaaatgacttacacagaatctaatgcttctctctttaatgtttacatttatttatatatattgtggtgaatgtgttaagtagaagtgtctttctacgaagtattggacagcattttcttttcctattattacatggcatttactcagattcgtaatggttgttcttttcggttgttgtatctattttggtgaaaacttatcaagcacggtcaaatagatggaagaaaatagctccattttgaaagcttagttagaattgcattgatttagtgtcacaaatgtccctaaatagtaaaatctaataatagaggttaagatgatatcaaacaccaattttacagacaattatccatctaaggatgatcaatgatcgatttttcgagtattcgttctttttcttctcaattttcgctaactaaaaaccgaagcaaaaagtaaacatctttgtcgggatttctttacgaatttcaatgcatgaaatgaagttacttgcactcatatcaatcaatgcaaaagatttagtaagaaattgagaatgacaatggcttcatgatcacttttctctagtggtaaaaactaaattgtgtctactttttatagaattgtaataacactacaaaatcaatcaatgtggtttcttctccttctagcttaccatgatcggtagctttctatttccgcacaaaaaaaatacgcgtaattactgtaactgctctgtacatagcctgctcccccgtagtcttgagtatgcggtgctgtatactccggaggagcaaaaaagaaacaaaccaaagaatcttattgtcatgttcatactcgaaatggcagaagctggctgcttgtattgtcctcctgcaatgactaaaatccagtcatgaactaaaagagcctaacagcaaaaagagcaattttacagctaacaatggaaaccaaatcaacacattcggtacagtattgaaattaaattaagttgccccgagtaaataataacgtcgagatatggcgagaaacttacatcaatagacctgcctaaggatagcttcagcggagaagcatcagcagaagtagataaactgccactaatggaatgattctgaccctacaaaagtaacaacagcagacacaaatgcaatcatatatattgattttgtagcttaaatatgtttaaataaacaaagaaacaatccccaagaaaacttacatcgacagaatgaaaagacctgtccatcgatagcttcaatggagaaacatcagaaatagaagctgatccattgccaccaatgggatggttctgaacctacacgagtactgtcaggccctaggataaatatggtgtgctagaatatagtaaataaaaagtcgttgttgggagggtagatatataggtgagtaagagaatagacgcctaagggctcctatggcttgtaattggcttttctcgaaaaatttaatatcgatcatctactttttctactgttttattgttttcttgagcttggattactcggttctcatcagtaacatgagattgctataaaacataatgcatgattactgtaagttaaccaaaactgcatacagcagaaaactctaacaactactgtacagaccaaatcatagagaaagtaagagtgagctagttgatctaaaatatgttcaataatacaagtctaataatgaaattcattttatcacaatgcatggaaaaaacaactccatattgttgcttgaagcaatatggtataaactggtaaatagtttaccttgattcttaaagggttaatttttctttcttaaatcctttaaacaacaaaaaaagtaaatgaataaaaatgcataaacttttatcatgggggaccaattgaatttgaaggtattcatctgaacaaattcaggcatgggattcaaaaggctatgtttggaagcggaattttagtgaaaaaagaaaaaggtaagaaaaatagtgcgaagaacaaaaagataaatcaatttttcaagtttgatatggaaattttggttgaattgagtgttttctattataatttttcttccataccaaatataagaatttattatttttctacattttctctacttctttctttgctcaccaaaatccatcttccaaacatagcctatatatcataccaaatatttgtgtgcatgtgtgtttgtcccacattacttatgttggataaatgctatgtttagtgtgattttatatataaaaaaaacatagcctaactaagtcaaaaaaaacatatttaatagcattaaagaatattcttttaaaaaagaaataaaagacgagttaaagatgaattaccataactgaaactctattctcttcaccatcttcgaaaagagatgagtaataagctggatcataaatcgagcctcctaaaacctcatcagaacctgaagattgcctagctgcagcaggagtgactggactcaaaaaactagttcgtacatcatagtcagcttctctcggaatcgtagtatctagatgtgagacccccaacctgtagatctgaatccataatagtgatgacgataatctcacggaaaagccaatgatttgcattgacagagtgagtttaactgagaagataaaaaatgttccatatttatcagatgaaatgttcctgcatatgcaaacaatgttttcccatgtaaatattgcagattacagttaaaagcaagaatacagcataaatgaaaaggtttggtagaaaagatgtatatgtgtctagttcagatatgtttctacacatgtttgtcaaatgcataataatacttattatcgatattggttcagtagataaatcacaaacaaaatttccaaacatttctgacaaattagtcactgaaccatcctttacagtatacatcaaacatataagaatactttataaattatagtccagtcacattcaactttgcagtgacagcagataaaaccagaagaaaatatgaataagttgtagaatgctatataaggaaaagtaaaattgaacctagattgtaactgctttgacttaccaatagtattaaaggacaacaaaaaagaacgtatctcccaggcgtctctgaatgtgcatttaatagacaattataaaaggcttcaaaaacaaaatcaagatatctctatctggctactggacataaatcctttggtagattttgattaaacagcaaaacaagaaaatttgatcatcaaaaggtaaaaagactcggaatctaagattgaccttctattctgctaaaaaatggacttcaatagaaattgttcaaacccccaaagaaaactaggaaaggaaaggaatttacaacaacagtgacagctggaaggtacccttgccattctgaggagaataggacataacaatacaaatacagaacagtttaaaactgttgtcttatctatattgtgatgtgattacctcggctgctcagacaaattctatatgcccaagcagccagataaaaagttatgttgaaaatcagttaccaagtaaatgcttatacatccatgtccaaaaaccatgactacgcatttgccaagtcataactaaactggttctttaattgttgatccaatgtgccaagtatactataaataaagcttctctcagggtgagaagaatctccagctatgaaagcattcctagtcccctcaatttcaatccaactgcatccagccggttttttaacatctctggtcctcatcagtcttcttacctccatcaccttatcccatctagcctctgctgcatataagtttgacatcacaacatagttccctatattatcagcttcaagttcaaacaagcgatccgctgcaatgcgtcctaatactaccttctgatgggtcttgcaggccccaagcagtgttccccatagttttgcattagcatcaaaaggcatgctgttcacaaaagagaaggcctcatcaactcggccacctcgagcaagtaggtcgatcacacaagcatattgttccattgttggtttcatcccatgaacatcctcgatagaataaaatatctctaatccttcactcaccagtcctgcatgactgcacgcggacaaaacagtagtaatgataacatgatctggtttcgcacctatatctaacatatcggagaagatactgagtgcctcctttcccataccatgcattgcaaacccaccaatcatagctgtaaacatgaccaaatctttcttagggtttgactgataaatcgtataagcagagtctatcccaccacattttgcatacacatctagcagagctcccgttaagtgcaaatcatcgaaacaacatctcacaatatatccatgacactgcctcacaaagtgaactgaggccatctgagcacataccggaataaggctcatgatagatatggcatcaggtctcattccttgagcttgcaactcggagaacaaataaagagcttgatcaggacaatcattttcagcataaactcgaaccatcagattccaagttgtgagatctgtttcagacatctttttaaatatcatatacgcgtcgtcatgtgatccacagtttacataacttgatatcattgaattgtatgataccaaattcgttttgtctgataaactcttgaaaaccttagaagcatactctacattaccacatttagcatatgcatcaagtatagcatttcctacagtaggctgaatattatctagaaaataaccagccctaattgaatatccatgagattctttaatattttctattttcgaaacattaatgctgtaacgaataacagtcaaaatggtaatggagtctggcctcattccttctgaaaacatctttgctaatagtttaagaaactcatcacaacatttattctcagcaaaagcgtcaagcatggtattccacgatatcaaatctctccttgacatcatcgaaaatattcgtgatgccacaactacttcattgcattttgcatataagtttatcatggcattttccactgatatgtcctcgtcaggtatgattaaatgtcgaaaaatatatccatggattgctttcgtaatctgtgtgtttcggaagtgtgcgcatgcaggaataatgctgacaatagttactgaatctggcttgattaaatccgaatttagtaacctacgaaacgaatccagtgctttcaaccactcaccatttgaagtatagcctgcaataattgaattccatgaaaccaaatctcttgatttcatctgttggaacaaatactcagcttctttcatctttccaagtcttaaataaaagcttaccaaggaattgcaaacgaaaacatctcctactaattcagttcgctgcagcacataacaatggatttctctccctaaaagagaagcaacccttttatctaaaaaagcaaatgcaggcaagatagtagcgatcgttacataatttggttcgatcggtcctttgagcatccaactaaacaatttgacggaatcatgcataaatccattgtcagaaaaccctgctatcatggcattccaagaaataacatctttttgactaatacttttaaatgcagcataggcatcataacaaactagtccacatttcgagtacatagatacaagaacatttcctacaaggttattcgattcaaatcccgatttgatcacataacaatgcaaactctttccagccaccacatctcctaagcgagcacatatcggtaaaacagtagcaattgtaataggattaggcttatcctcaccacctaaacgagtgaatgcacagaataacttcataacctcattgctatgcctttgagaccctgagaatccagaaatgacaatattccaaacaacaggatcacggtaagtcatcaaaccgaatagcctcttgcaatcatcaagcttgccacacttagcatacatattaagcagtcctttatacacaaactggcaagatacatacccctgcttgacaacataaccatgaagagcctccccaaatccgacagcaaaaagagcagtacacgatttaagaacagcagcaagcgcgaggtgattaggtttattacatccaattcgtaaattcccaatgaaatgggataaagcatcacgatcaacgacagaaaacgctcctgattttactagcccccactttcttaaaaacctaaaacctacgtgaaatcacatccaaaatcatacattttcttctcttacagaacaaagcacaacaacaacaacaataataacacagcaatactctattcaacaataacttctagtttattattaacaaaattaaagtttcaatttggttcaattataaattgtaataagttatatatttttaaatgtattatattataataattttattacgatatagtagtaagaattgtttattgttattgttgttacatttgatacttttctgtgttattatttctttttcggtctcaagtgtatttttagatagaatctaaaggttctactgaagtagtaagagtttactaaccagatatcgtgggagaagagaaagaaccaggagatatcgagaagaagagacgataggagaagtacagcgtaggtacgaccaagagactgactgctgctttcaatggcgacgagagcgaagagagaaatggcgaggttgatgaggagaactccggtgtataatgctccgagagaaccaatcaaggaacaaccaatctaaaaaaagaaaaacacaataattgatttagagtgaggaattgaattgaaatgattatatgatatgatatgaaccctaattgtacagatatagagatgtagattgatacctgaatgtagatgaggataagagcggaggattgaaggcggtcgtaatcacgaagccatggctgtaatcgatcagtgagagaatgacaaagcattgtctaatctctcatctgtttctttctttctttctttcttttttgttttgtctttcaaatttaatttacaaactaaataccatttatatatatataattttcgaatattgttgttattactagtagagctttttacatttattatttataattattatttatatgagtgtcattttaggaaccatattttttttaaattattaaattaaattatatgaaattcattagtatcttttaagtattgttattggatactagtgtgtagtaatttctatagacgacgtattagttattagttagtaatattttctaaaaattatttttaggaccaatacttaattacaccagcgatataataccgacaagagtactagacatcaataatactttttaacaattctctattatttaatacatcttctaaaaatgatctactgatacactttttatctgtttcgttatttaggaaaaactttaatccaattttttttttaaacatataattatgtatattatagttatttaagacattaaaattttgaaagatttataataagtcacaatataaaaaaaaatagtttttaaacaatttattttatatgcatataaaataaaaaaattattggtgcaatcaaaattttaaaaaatattttaaataattacaatatacacaattataaaaaaaaaaaatagactaaaatattcttctaaaaatagatattgatatagtattgtaaaatttttcattattattattattattatataactccataaccataactagcagtctatcacaaacccatcaccaaatttatggatcttttattgaagaaatttattattgtttttggataaaattgatttatttatttattttttgactggttggtccttttttatatattatatatatttgttttgacttggaaatatggatggacagtgatcaactactctatatttgttttatatttatttatattatgtatatgtgaataataagacaaaaattgtcatattaaaaaatcaactactaaataaacgattgtttggtctttatatgtagtgatattttgattgtatttatttcttcttgtttttctgtctacataccattactttgtttttgaaggtaacactacaatttctcaatattattatatttaattaattaaataaatatttatatatttatttaaaaataaatacataaattttaagaaatttctgcaataagctcttaaaaaaaaatgatctaatagcattctttaaatttttaaagaattacagtgctaaaattaaaattaaagttcaaataccactcacataactatttcacacatctccaaaatatctctataactcttggaagtgtaataaaattcctttgttttattcaattacaatttatctaattcattgataaatcattccttctctaaataacatttgcaagcttgttataaaattttaaggcccaaagcaaccaaataaataaataaataaagtaacttaataaagcttttatatgtatagcaaagtgaccatagtaatagtataaacagatacataaccaaacaaacagggaaatataatgtctataagaaacatcatattataagataaccagtaaattaaatagtaaatactagtaatctttttcttttatttagtgtctcaaactccaaattcgaattcaagcagcagccacagccgaataccttgcaactttctcaacaagctcatctttcttagctcccacaatcttgtcgacaattttcccttctttcaggaacaaaatggttggcatggcctcgatttcccactcggtagcaacatcctgcaactcatcgacatcaactttcaggaataccacgttcggtgtcttcttagccaggtcggccaggattgggccgataacacggcagggtccgcaccatgttgctgtgaaatcaaccactacaagtttcttcgactcctttcccttctcgaaatgatccttccactcgtttt

SEQ ID NO: 184738 - DNA, 1137 bp, Cannabis indica
agagatgctcttatatataacctaataatttcacatcctaataaggaagtccgaactttaaatctctcacactcaatatcaaaataaaataaaataaaaaattatgtcaaaaaaatgtaacgtaatctgaccagaaataggtggcgctttagcgaccacctcaggcagatcaaagttgattccttcgcgtacattgggatgcttacgctggatcatccgcagacaatcccccgcactaccacccacgtcaaccaatttctggacccctttaaacccatcgtagccctccaatatcgccttcatgaacggcacagatacgcccgacatagccttctgcatcaacccattcatctccggcttcttcccgtaataatcataagccggttctccgttcgccttcacaaacggctccgtcgttggatccactaccgcctcgtgcacaagaggccacgcgctcaccagcgcgtcctacgaaaaatggattttgataatcaacatatctcttttttttttaaatgtatttaaatacaaaattaattaattgatgagaatacctggtggtgttgaagaacgtacggcccgtaggataagccatcggagtctgtggcgagagttctaccgacgtcggtgagagagtactttctctctgaaccgttgaggtgttcttcgaagacgccgtagctggagagcatccggaggaggcgttggagattctcggcgtcggcgccgtcgcgggaggggaggacacgtgtcagaatctgagaagcggtgaggggagaattggaacctccttgccagatagcatcaggaacgttgaggcgaacgacggcgtttaacgacattgggacgctgatcatgttggccagctcaagtatctttagcctcgcctggttgcggctctcgctggtctcttcgtccgccatttcttttttctttgtgggtttaatgttcagtgtttttgcgtctttggagagatgagggttttgcttttttgggggaagataagtactcgtgcacgtgatgtgtcgtttcgcagcataaccaaccaataacatacaaccatcatctatattggaggtttggtcgattgtcacgttaatttttgtaaaaaatctatatttttatatttaaagtttt

SEQ ID NO: 184739 - DNA, 4304 bp, Cannabis indica
attgtgtcaactataacatttagtattttccaaaaaatattaagacaagtggtccctttctctttttccaagaaaagaagacatttcatattttttttttggtttcaaatctggcatgggcttgccttggagattatttaacattgaatgtaacatttatacattgaagcataatgctacatgttgcaacacttaatattcggtcactttttgtctcaaattccgcattagcattagcacctgcatggagatggtcttatgatcagctttaagttttatctgccttctatcggccacctgcaatataatctgatgttctcaagaaacatattagcacttccaaattgaggacctccatacccttagtcactgtgcaagatccactttcttagagcaccctcctccagtcactcctccacccaaccactgctgtccatcactctaacctttcaccaaagttaaacaccacatacccccaaaaaggtggaatcttggccaaggatctgtccagttccaagtttttataatggttgggtgcttcgttacagcagtcatatggttaaaatgagcagtaggcctatatcaatattatggctgagttgttgtgctgtagaagtcacttggacaatatgaaggctgcagcctctagtttgttatagtttctcagaaggtctcaaggatgtggaagtttaattttatgatttatcatatcatccactattataaatttattgtttctaacatattgatattaattaatatctagcatgtattgtttttttaaatttttttgcttcacattcaggtcattgcttcagaccctctagcagatgtcgataaagaaaaaacagacatattgatgtattgtactggaggcattcgttgtgatgtatattcgacaattctgaggtaattcactttctcctctcttacttttctgttatttttgttttctctttgctttattgaccctaaaatttggcaaccaggagttatttagaataccaggattcattgtgtttgagtgattgattgggaaacttcattggttttgtacttgcaagatcccaaaaccaaaaggagaacagaaaaaaagaaaaagaaaagaataatgtcctagcctgcatttcagaagtttgagtactataatgctgttagattaatagcatgaggtttactgaactatggaagcaacccagaaatatggtgggattaatatgttagcctgagtcaagctaaatctgtttctttttatggtcttctgctggttaaataaaagattaatacagcaggactataaagttgcagaatagtctgaccctggtgtttgttgaaagttctttgcaactatttgagtttaatatcactgtacagaaccttcttctgtctgggttatatttgattctagaaacccattatcgcccattatatgcacataagaaattgaagatactaaaaggaccactgaatttccaaattaatagcctgtatctcaacaggtaaaggtgtctcaacagaggaatatgatatgagaaccaatataggaacctgctataattgcacaaaccagtagcaaaacagtaggaaaacacttgagcgccatgcaattcatctaggagttcctcaatcacaggaatagggaatttatgaggcaccgttttgcagtttagagcctgataatccacacaaaaccgcgaacatccgtctttttttaccaacagaactgggctcgaaaacggttactgttctgaataatctgagcttccatcatttgcccaatcatcctctcaatctcatctttctttcgttatttggggataccggtaaggccgcacactcaccggagccgcatcggggcgcaaagtgattgtgcgatcatgttgccggagtggaggaagagttattggctcttcaaacacggcgaagtatcgctgtaacaaagtagaaacgcccatagacggggtgtttctcgctgccaaacttggctctgataccaattgatgagaaccaatataggaacctgctatagttgcacaaaccagtagccaaacagtaggaaatcacaccagtagtaatgaccgaaatcaacagaacagtaaagaatggatgataatgggaatagaaaggaattgtggggagctttattaattatagtaaataagaaaaacttgagacaatgtatcttacaatgttggagagaacaaagctctccactgatagagagtttttactcaaacattgcataactcattctacctttctctcacaatacaaaacaccctcctcaaagacatctcagcactagattaagttttcctaccctttctagtgtatgtgtacctgaccgtggcctagtgtgcccgtcagaatatgagagaagagctcaagtgaacttttacttttgtattgtgactaagtgtacagaccaagctatacgaaccctctgtcaaactaacctagacgagcagaataacttgaatacggcatattagctaatttgctaattaatagttggagatcatctaatcagtttttctaatacatgagaatctcaaagtgcagattgctaataatattcgtgttttgtctcctgtggattttttggattggagctcttggaaaattattttcctttctgtttttgttgtatacaaatattatatctatatcacgtgaactgagttcgtcgttccatcaagtttggctcttgtttaataatggaaatttttaggtgaaagaacaaatattattattagcaattccactgtttataatgggtgttttatttcatcttgcaggcagcggggttttcaaaatttgtacacgttagagggtggcatcgctcattatctgaagaatgaaggtccagtcaagtggactgggaatttgttcgtgtttgactctcgtctttctctgtcaccttctacttacaagcctgaagccaaggctaaagcaatcaagagggaagaattttccagtgatagtgcatttgctaaatgctacgtctgtggctcacaagtctgtgaattaaggcataggaactgtgcaaatattgattgcaatttcctttttctgtaagcttttcttttattaattgagtcttgagatgataccagcacacttcgttctcaccaacacacatttttgcacttttctcatatacattgaatatctccatgtatatatttttagtactgtactgtgggttgatttagtggaagcgatccttaaattatatctagattattaattcttgaatcaatccttgtttcaggtgttgtacggactgtgtgaaggatttaagagggtgttgctgtgcaaattgcactactgctcctcgacttaggcctgtgctaacaggacatcaaagatacaaaaagtggcacatatatagagactcggagttgcttagcaacttggcagcttaaccaaatacatgaatcctcaaggtcagaaattgttactttatacataaattaaaaatccaaaagttatagcattgaactttgcaagaaaagtgtcggtcaaaggttcaccctattacaaaaaaatcttaccttgaacccaagccacagtttcttgcaaagtttttttatgcaatgaatagcagttgtttaactagtcttattctttataaatctcacaacaaaaaaaaaaataaaatcctgtctatatattttttacatactgtatgttgaatatttatgaggcagaactcaaatgtttgttttatgaacaattttttcatatcaatttttaactcaaatgtttgttgatgaggaattatttactactattggaagcattgagcaagtgggagacaaaatatccataatttcattaaactgaaccaaaagtcttgcccttagaaaggaaatttgggatagtgatacaaaccaaccctaggtccctagggtggaactaacatcaactttaagaacttccaatgacttgcatggcatcaacatcacacgtactattttactaaatctaatatcagactcttacagtctaatatcagacacaaaaaataaaatcttattacgagacattattaaattatttcaactcgtacaagcttgtcttgaagatgtaatgtcaccccccctcatttaggagtttgatagatattagtttaacaaaatatagcatactgtttcagcaacgaacatgtgactttgtgcagcatgtagacgctagatcatgtagaataataaatgaggttggtgcacttttttttttttaatcttaacgtgtaggatcatagggaactagttactaattacacctttgggaggtttttt

SEQ ID NO: 184740 - DNA, 2019 bp, Cannabis indica
tctctctctctctctcaccttacaattattattatagcatcaattattactaaaaatgctcacaagtagtactactactagtaccccagaccttactcataactcactcaaaagtatcacttatcccaaagatcaatacaaactactcttctctaattataataagcatctaatgatgaagagggacttatccatatccactactactaaatcatcatcatcatcatcatcaatggatcaagatcaaaactaccatggtggatcttcagcttcaatcccattcatgtgggaatctcaaccaggaacaccaaaagttaagctcagagaaaaccctttacctcctcttactcctccaccttcctattgttacactactacaaaaaaatcatcatcatcaaatgttaaaactagaaaaaagacctcatcatcaaaaccaaatcttatacgcactattttcccaaaacatgatacctctactactaaaaatactactagaccacgtaataatactaataataatattttcccttcttctcctaataattattctctttcatcaccatcttcttcctcatcactctcctcttctccaaggtcattctcctactactcttcttcatcggtaccgtcttctccggcttgtactaaacaccgcggtggtggacggcggtggagaatgatgtcatctagtccgaggcggctttcggtagattctagggttaataattgccatgatcatgaagagaattatgaggagtatggtggccatgatcatgatgatgagtcttcacctgttcccattctctgctttaatggccgtagtagtggggccaataatgtacggtccagatcaagttgttactcatccttcataaaggtactgcttaatcacaaataataattggttaataatgataatcatcactacagtttgattaaaaaaaatagctagcttgattctctatattaattttggggaatattgagctagtactcttattattaattagttgtaacatttttcgttttattgtaaccaattggaaaaaaatatatgatcaatgatatgatgatctcaattagagcttaattatataatgatactataatacaagtttggggattattagtgattatgttatgtatacgtatgatcatgctgtaattttgaaatttttgttgtcaatttttttaattcatgatgatatttgtacgtgaccattttcggtgaaatttttgatcgttacgtcagaagattattgaaataatcaaattttatctttgtgatcaagaaatgttgcacggttctatattgagagtgaaataaataaacaataatttattagtttgatacattcaaatttacgattactttatttgtatatatatgtaatgtgagtgtgtgtggtagtcggtttattatttgtcttcttcttttttagttataagataatattataaattgttggaattgaatatgccattattcatgcctcattatcaattcatattatattataagtcaaactagtgcaaaagcttactattattacttcaaataatcgaaaaggtatttcaaattttggactcattcaaatctattaattaattaataatgtgtctcttttgcttgtttttacgtataaatacgcgtgatctaaagtatactacaacactacttttcgtttcaaaaaaagaatatatatagaacactttgtgattttttaaataagagaaaaaaaataaagaggcaaatatgaaaactttgcaatttgtctagggaatgcagtcatcattatctcaacatcatttgaatcccaacaaattttaatttatagcttgtaattttctaatgattaagtaatcgttcaagtcaagtccataaccagaaaacagatctagatcgattgagaattgcataaatatatgtataagatttctcatattatatatttaatatgcatggaaatgataaattagcgattattattattagtagtcgtagtgttaaattcgtta

SEQ ID NO: 184741 - DNA, 3681 bp, Cannabis indica
tacaccaatataaaaactcacactacatcaaataagggtttcaggcgcgacactatcaggaataataaagtttgttcctaatagtgtggatcaggcgcgacttatcaaaatcgttccggataaatttatttattttaaaaataattaaataattatctaaaatgacttatacctttatcaggcatgaaatcttgttcctgatttttttactgtttggagagagtgagaaataaaacacaaaacgatccatttgagactcacaaaatctccgccctttcatctctgatcctccctctcatctccgacccagcacctccgccctccggtcgggcacacaatcaacgatcaagctccggtaagttctatctctatctctctcatatctctaatatatatatatatatatataccataaaattttttgggttattgtgtttgcaggggagctatgataatgatcactggagttgtgggcttcgattttttctttcacctttggattttgattttagaatgttataatattatcgctgactaatttggctatcgtattgcatttagggtgttagctcataattttaagctgaattctctgcagctcttggctgaggacccatcttcaaagcgatttaagtcacacaagactaatgtgaggcgacttatgagagtgtgagatgtactcactatagttgttgtagtaggtaatgttgtttattttgtgtttttactagaattcttacttagtatcttggttttgttgttaatgtaaaatgtagcgggggcttcatctcacatttacctttaacatttatgaactctttttattacttttgttagtatgaacatttatgaactcttttataatataaaaatattgtttagtattaaatatgaaaacaatgtatgaactcttttagtattaaacataaaatatttaatttttaaagataatatttgatagaaaaatgtgatattaaaaaaattcagtatttaatttaatttaaataaatttaattattctaaaaaaatggcttcagaaacgaaaatttcgttcctgataacaaaacagtcatttctgataatgtgtaaaataagttgctagcctaattttttggaacgatttttacttttcaggaacaacttatttttgttccagacattttagcattaggcacgtcgctatattttgttcctgatattgattttcaggcacgagttatcaggaataaaatattaggaatgactagtcacgccaaataatcttctagaacgaatttacaggttttctggaacaaaaaaagtcgctcctgatgatagtttttgttgtagtgtcaatatataagaacacataatttcatgagttataagaaatttttctaaccagtattctacaaaacataaaggcacgtactaggtacttgatatttgtactctttttttttactaaacaacatgcataaactataaatgtactcggtacgtgatgtaacgtactccactaccactggacaaatacataaaaaataagaaggactgaaaagacaaaaataacctcagtctgacaacatggaccccctctctgcagtacgattgtactattaactaccaccaactgtcatttgattaaatatatttgtattttctatttttaaataaaaaaaaattgacaaatggtgaaaaaacttacaatagccagttgtcaaataaataaaaaaaattacaaaaaatattaaaaaataataaagtacataagacccactatactgtataataaaatacaattcgagattttacaagatatgtacaaaatttgccttaaaatataatcgtaggcaagacaccaacacttatagtatttctcatatgttttaaggcaaacaaaactttaaattagccatcatttgaatgacgagcattgctattaggcaccagtggtgattagcaccttctcgacatgtcgcgttgcgattggttagcgatactctctaaaagctattacattaaattatatgggacccgatacttagttggaccaataacgatattgacacgtaggaaggtgctaggcaccactggtgccttttagtatttctcttgaatgacgatgccacgtgtattttctttttttcctttaattgagttttgagagtcgtgtcaacaaggaaacatgatttaattttataagatttatatcttaaaaaaagaaaagtttaaatgagattcaaagacttctcttacgtggtctatgaaaagtcaaagttaaataagaaaacaacagaaatacaatacaaattggcatcatcagctatacatagactgacatatatatataatatagtttggcagtaaaaagagagcttagaaagaatatgggttggaaaggagttttgggttttgattatggaatagttcaagcaccattgggacctgatatttctggtcctgagctagttgctgctgttgctaatgctggtggacttggttttcttagagctcctgattgggttagtaatactatctttctttaatcttttatatattttgtaataacaaagttcactctttttttttggttggttcactttaggaagacccaaattacctgagggaattaataagaaagactcgaacattaactgacaaaccctttggagttggtgttgttctggcttttccccatgaagagaatataaaagcaattttagaggagaaagttggagttttgcaggtttattggggtgaatgttcacaacaacttgtagataaagcacataaggcaggggtcaagattgttcctcaagtgagtctgtgcttactattatacatctttgtatcattaattcatctgttattattttgttttattatatttatcaattaaattgtgagttattgaattaacaaatagaatgaaccatgctatccctctgtttattttgattgatttttcttataataaattataaattgtgtattttaggttgggagttatgaagaagcaaatacagctaaagatttgggtgttgatgccattattgttcaaggccgtgaagcaggtggtcatgtgattggtcaggtactattacaaatgcacaaaaaattacatgaatgaacaaaattttgaacatgagttctttatagagcaactttttttttttttttaaatttttaaaatattcatagtgattaataataataaaaacttgtgggactaattgtagttttttaggtatgttaatataatttatttaattttcaacatgataaaagtaataataattaattagtaattgaaatacacatctaggagggtctgttcccacttttgccaagagtagttgatctggttggagagagagatatacctgttattgctgctggaggcattgtagatgctagtggttatgttgctgctttggcccttggagctcaaggagtctgtttaggcacaaggtatatatctttttcatataaactcaccaattcattttatcatatttacaaatgaatgataaccaatactagagaaaatcgtcatgacattgtgaacacgcaggtttggccctagcatagccttaggcataggccttaggcataggcggggctaggcccgtgcttaggggtcactcttttcgggggtctaaaaagtaaaaaaactaaaaaaaataaaactaattcggc

SEQ ID NO: 184742 - DNA, 4244 bp, Cannabis indica
gaacaacaaatattcaatatgttttacaagtaagaaaacaatactacataaaatttcttctaaaacaatcaatattgagatcaacaaacaccactaaatcacaaataacaaaatctttaagaatggaaacaaaaagaagggaaaattattacaaaaacatctactttcacctcctcatgttcgaacatctatattcccgatctgatcaaaaataggaccagtacttatttttgtttcacatttggctaacgaaaattttgtcggtttgtaaatattttgaatcataaaggagatctcgagagcagcagattatcagagcagttttgctcacttgatttgacaatgagaatcgaatcgaacctctcaaccttggtagatcatcgaaaggatttcgttcttcatcgttgaaaaatgaatgtggtcctttatcttgtattaggtttcgaatttgtacctttatctatttcatgaattccaagacgctctgtgtgatatcctcgagaaaggaaacaaaacccgtgacactggtcaaaccacttccgtcaacatcttgttcctcgatgagaaagttctcgaaagcagaagcatcttcctgccctcctcggatgaatattagtttaggggtaatacatctctcttgcttcaatttgttgatggtacttctcaacaagcctaagagattaagaaagatcatcaaaagcctaaatcatttttcgcgaaaaaaattggttggatagtaaatgcagcagcgataagtacgcatacttacagtcatggggtggaggataaggaagtgtagggtctgctgttgaagaataaaacacaactagtgttgtaaatgcatcgaggaagaatatgggacttccgctagtgattagagcagcacggctcaatgagtggcgtggataagcttgcttatctggtgtggaatacgaggtcagcattgggtacactgcacggtgtagggagctcggttccaaagcactgcaccaaaagttttacaaaacactttaagagatggctaaaagttcttaatcatttgttggaagaacatggaaattaatggctagaccatgatgcaggtttagtcaaactctagataagacagtattcatggaaaaaatgccacaatgtaggtataagtaactctattcggtaatacctgaagaggcattgcaggtagatccggtagtcaggatgtacaccttcttcatgaaatcgaagaagaggattccgaagcaaagcaaagactaggcgaggcaaatgctgcatttctgggcattgtgagaatgcaacatcgatctgagaagacattgagcttccattcttgtattgagcaagtttataagcattattgtactgtgccgtaaggatcactagccaatcgtgaagcaatagtctaccctctcgaaccccttgctccaacgaagctaatataacctgaaaatggaaaagaacaaaatatattttatatcccaatgaacctttattcaatcattacattactatccagtacaaaagtagagactttgtacgataataaacaaaaatggctcggtaagatttacaccaaggacaggaaagtgaccagtgaggattaccttgtgaacaagtaatgataaaacaatttcgggaacaacactgtcgtagatttcattgatgttttgggcagttgcaaactgcactgttcgaatccttagtcgacgtttgagggaatattttcctctacaaaatatatacatatataaaaaagaattataagcatgctcatatcaagctctgaacaaagactaaatataatgcataaatattaaaataaaattgtcaatagaaaaaaataaaaataattaaagaaaataactacaaaagcaagggtagcatagtatgtagattgcacactaccgaaatcattagttgaggcgacaaaaacgaaaacatgttgtctacaatacaaagtaaatggacaaaagctaattttacagcatctttatttcattttcaatgtcaattcaaaatgctattctatttgttacaacatcacaaaagaaggcataatcatgataagcagaacaaaccatacctacttgaagtacgtgacactgagttttctagctcctcgggaggcacaacaactgtgtattgaaatacagtttgtacgataggaggaggttctgatccatgtctgcaggattacaataagaatacgtcaaccaaacacatcggtaatagcttgcagaagggaaactgcttaaatcactaaaattctgaaatgtaatctgaagatccagtcaaacaaagaaaaattaataactgtaggcaggggtgcttgacaccaatacaatgcagatgagagttttttaagaatttcttaagtgcgatcatgccgtgcatcttattttcatcatttgaaatgtcttccagaaaaccaataaaggacagatatggtctttaaatctatacacacacacatatttttactgtcaatctaatctagaatttgatatctattgaccttaggggtaaatagtgaaagatctcctaccttgaaaagccatcgacaccaacaaactcaaagtcataagcatatgttgcataagaatcacaacaaataatatgttgaacattctcatactgcggatctggaaagaaatgaccatactgcagaaaatagagatatttaataagaaacagtacaacgttaaatataaatgcaaatgaagttgcaatactcacagaatgaccgggcttaaattcagtagatgtcctcattcgcaatatacaattaaacgcatatggtcgacttagcattcgatacctgagaggacacataaaggcttgattgaatttttcactttaaaataaagatctaaatatgttaagcataagggcttcatccaaaggcaaaatatttctgcttcgataccatgaaatacttacatgtcctgaggaagggttgaatcatcagtgcttgaatagaaaaacagcgatcctccactttctatgctgagaaacttcagtgaagccaaatctgtatactcatttgtaacagcgaatatatctacacaaacacctgcttgaacagcgacagcagcctgtaaaatccatttgaaagacttaatatccattaaaggataaaggagactgaattaaatttacacaaacatatgtaaagatcatttttaccagatctttgtagaaaggtgtctgctcaggaagtaaagcacgatctgcatcctctcctttactagcatattgttccccataccgtctggtatctagtgtaccagctccgtaatcaggaggaccagaaagaaaagcaaagactctagctgcacttacatttcaaagtagacaagctatcatcattttttataacaatataatcacccaaatatttactaaattgcagcagtataattacttgatcttaaaaattgttccaacctacctaatgcaaatgtgcttccatattctgatccaaggtaattaaacagagcttccattgccaccccaaatccccgaccgcccatcaaaacaccatccattccttggccagctgctgtggttctctcccatgaagttgtcggtcttagtgtttcaagtgcagatgcaattcggtccttacaagtttctacctgtaaggcagatatagttcaggactgaatgaaaaatttagttcatagacacgatagtgaatttttaaattaaaaagtaaataaaaagcaagccatacaggagctaagaattgtaacaaaggcatgacatcttcgagttcaactgcaagggtgccttctgtgtctgggggaataaaaacattcttcacaactggtatgggcccttgaacatcatacaaccccaatttgtggctaaaagtagcaatgccgaagagtgaaccgggtgcaagagctggacatgaaacaatatttatgatgatagtcttaatattcaaagaaagagatttaagccataaataattacagttattacattaatgtataactattgaccttctaaagctgccagaagtgcgctcttagtaagttccagaaattcttcggaggctgcagattaaataaaggaagaaaagaaaaattatatcatttggaaagattacttcgcatgaatataaatgaagcttcaaaatgtattcactggttgagtgagacatagtgcagcagaaatacaaaaaatgcttctatgacaaggggaaaacggaaagggtccaaattatgaaaataatgttt

SEQ ID NO: 184743 - DNA, 4723 bp, Cannabis indica
tcttttatcaacaggccttttctgttatgtaacaaaactattttggtttaatagttctttcaactgggattagaggggaaaaaagtagagaagaagctttccttttatagggtttatagttaacctttcccattaagagaaataaagctttcccaaaccgaaaaattttgccataaattttacaccttaatcgatgcattttgagcattaattgtaattttgatttacttatcccagtttactcacaagccttcactagcatgaatttcatctcactagtgagcttaaccactacaatttttttccaatagtctagtccagttggcttgttattcttattcctctaattaattagaattttgttacagttttttggtggttcttcctccaaatgtatagattgaccaaaattgtgcaacttttttagactttactcgtagatattctggaattaattttctgtttcgtcctcttaatttctgttcccctttctggttttataagcctgttcaagaaccagaaaaaatgacccagataattgtggatgcgcttgaaaaaactggacaaagaggaatcatcaacaaaggctggggtggccttggaaactgtaagttttttgatcgaataaggctattataattatctcacctgtgcactaatcttcttcacctggtttttgtttactgctagtggctgaacccaaagaatcaatatacttgctggacaattgccctcacgactggctctttttacaatgcaaggctgtggtatggcttacttatctagttttatggcttccaattctgcattctattaacttgttatagactgttaattctcaataggctgcgctaatgatagtatacctcagtttcaaacacaatttttttttcataataaatatggaaaatatcgaaaagaattagagaagtggcatttttcttctataccatcttggaatctttatgatttgatgctgtaacttcaggtgcatcatggaggtgcaggaacaacggctgctggtctaaaagcggcggtaatagcttctaatcgaattatgcatatccttatcttttcagttctttgttttgcctctgcttaattcactcattcttccacccctttatttattttaatcattatacatttgtctgattatgtttttttttttaattttcatattacagtgtcccacaaccattgttcctttctttggtgaccaacctttctggggagaacgagtacacgctagagaagtaggtcctgcacctattcctgttgaccaattttcacttccaaagttgattgatgccataaattacatgattgatgacaaggtaattatttttggtattgtgctttaagaagattttattatcttcattgaatcacacatcaatgatgattccaggtgaaagaacgtgctcttgagctcgccaaggccatggagaacgaagatggtgtgacaggagcagtgaaagccttctttaagcatcttcctcgcaagaagcccgacccagaaccagaattggtgtcatcaagttttttctctataagtaaatgtttcggttgtgcctaaatctcaatttcccaatcgactgccctcgttcattggttttacctggtcgtaatggacctcttttgataccccagatatatttatatataaatatatatattttatgtgtagtgttgtgcattaggctctgattcctacttccataacttgtaattatatatctatttttgtagtcaatattcattcagagaaaagcaaaagttggttttctttccccccatgaattttatgtacgttttctaggcttaatgtttgtcttccctacagtaaatccatttcagtgtaatcaaccataacttgtcttatgatgctgctttcttggacaactgtatattcggtatgttctaagtctcccatgacaataaaattttctccataccaaagttgcagttctatgcatgcagtcattgaagggtaagatttttctcacattatcatttaagaagagttgtggtcatcatcatcacacagataattgctggtgtcgttttgtgttgaaaaattgcacattttactattcttccagtgccaattactgaccctgtacaactaatctcaaggatagatttttaattggcaggttagagactggggaatatagtctggtatgtatctccaattctctgtaacaggttaacttcttaagagtcaaattatagcaatataatttatctttctttaaatttaaaactgttgcagaaaattatatgttggtttctttacattaagtacttgaccaattagagagagagctcaatgatcctcagcattatttcttttcccccattttgtcacattatgcccataaaacaaatctagcatggtttgtttttcgtccaaacattggtgtttatatttcactttgaactcttacgatccttccaaaaaaaaaaagagacaaaaatccacaggaacttagtagaactattaactatagtaaccccaactgtacagagtttcacggtccaatacaattagggaacagagtgataggggggccccattattaagagtgcaataaatagttaaacaattccacgttagatggaaactaaagtaggagttgagagagagagtttgagttttgtgctttggtccatgtcttttgtttgttgaagaaataagagccgtcagatttgtctacatcgagattacaacaacaatccaaataaggtggccacgtgtaagggagcatcaacatggagcttaaacttaaaacgtattggattccattattcaaacagagagtgacgttgatatatcagtgcatgcaaggtaaaaggaatgggttttgtgaaaagtgacaaattgcatgagattggcggtgggattgggaagagatagacaagagagcagcaaggaccattggctaatggctactggtgcttaattttgccccataactatttatagaaaagcagaggattgtagcagtataaataagctcatctcaaggcaaaaaagaaaagaaaaaaaaaagaaaaagaaaagaaaaccactactgagttccagacacaagtgggtgtgtgatgtgaagactgactttagctttaaagtcccccccaatccacattggccattgaaggtatcacaaaccctgatcatctctttaaaagcttacctcttactctgacataactgatgacttatattgattccacacacactatataaatgtagtaatatttaaataaaaataaaccactcacttacaactttcttaaatgtgaaaaatgaagggaccactctactcctattaatcacactgatcttcatttataaggtggtaacagagtgttttgccacttacaagagtagtgattagatagggaaagaataagtggtggatatacatgtatttagtcattaatgacattaaaaattatataataaaacgttagaaatggaatttaaaaaaccgtgtaaagcccctgaaaaaaaaaaaggaaaatgtaattgtcagagagataagtggggaaactatatataatccaatacttcctatgcagcctgttgtggagtgattggtgagaagtttttattcggattggaaagtgaaatttctctctctttttcctcttcttcttatctttttcttttttctgtttccaacccaaaagcccatacatctctttaactcgaaatactctatttaataattatacttaacttgccaagacttcacattttccaactcttttacaaaccttctgaactaccctttttatctacactttttgatcagttcaaaggccaaacttccaacccaatctctacacctattccccaagtacaatttttcttcaaagaaaaaagagggttttcttgttatcctttctttaactctatttgggtgtcttaaaaatttaatctttttttgttctctccttttcccactttcagaaactatggaagatgaagagaaatcaatccaagttagaggaagcaatgtagaagacacaacatcaagagtgttcccctgtttgttctgtacaagaaagttttacagttctcaagctttagggggtcatcaaaatgctcacaaaaaagaaagaacagcagctagaaaagccaaaagagcatctgaatacaccccattaaacttctcttcacaccctcaacaaaccatggtttttgctccaaatcatcatatgggccattttcatcatcatcatcattctcctccaatgtatataaatgctcatgcctctaactttcgctatttcccaactacaactactaataatcacaacactactactactactactgctcatcaattcgggtcaaatggagcaccaaagtttgagaatttcgtctattatggtgggagttatccatgtgaagaagatgaaaaaagcttcttgaattggcagagaagtataagatataatggctttggtggagttgggtcatctcaaaatggatctcaagtgatgaatcatagtatcattagtcataataataataatattgtcaattgtgataagggtaaagatccaaaacttgatctttctcttcatttatagattaatggttggatatagtattattagtatggttaaaaagttgagaattttgccttacttgaatggagagatgatgagtatgaaataataagcattctttttcttttttcttttt

SEQ ID NO: 184744 - DNA, 4091 bp, Cannabis indica
caacccaaaaaatacatctcatatgaaaacaaaaaaattatttcgcaccacgttaataaataatttttaatttttaaaatctcaaaatttcataaaccaaatcatcagattttcaattaattcaacaaaggtggctctagtaccacttgttaggatttataaaatactcaagaaatatataaatcacagatgcaaacatattcctaaaagtgctttaatatagaaaaccctaaatcataaatctataaagcctttctaaattaaagaagaagatgataaaatatgagcggaaacactaacttgaaaccattgttagagattgcagagaagattttgattttccaagaatacactattttttaaagtattttctctaatgtggaaggagagaatacagaaacctttagtgtctcttagggaccactacctatttatagactcatgttttggatatttacttatgatatctacaaattaattccatgacaatttaatacttttttgatacccataacgtaattgatagttaattttatatcacacattataataccatatacattatacgcccacatcgaatttttaatccaacacttcacaccctttttccttgaggtttagtgttcaggttttaatgaggagagaattgttggaagatgtattttaagaaaactacaacgaaatggaggcgaaaagaatgaaaatggagagtatgttctgaaatcgaaggtgggagaggcctccttctccacagtatggaaggcggagcacatcgtcaatggacaccaaacggcggtgaagctggtctacctctccaacctcaatactccacacatgcgcagctgcttcgactgcgagttcaatttcttgtcctccgtcaaccatcccaacatcgtccgcctcttccacattttccatgtacttttacctatctatttcatattctctcatcttctcttttcttctcttctttaggctcaaaaataaattcatgaaattgcatttttcatcagtgacatgactaatcattattccgttcatatccacagggtaaagattgcattttcttgtgcttgaattatgtgagggtggaaatctagcttcctatatacatctacatggtagaattcaagaacacattacaagacgatttatgcaacagcttggtaaccttgtcattttcattatgttaagttattctattgctctgaagcaattcttaaatcgtaattcagaactctttactgcagcagttggtttggaagtaatgcaatctcatcacatcgctcatagagacttgaagcctgaggtaaacaagttgcctttgtgtgagtgattaacctactgaaaaaaaaacatgcggtggtgccaatatagacaactatgaggaatatttggtatgtgtgataatagtatcttctcaaatcttaatgggaccgtattcaagtcaaactctgcattttaatttttcttttccttcaattaattgatttcatcaatggtttcatctcaagacagctatactttaaagaagatggtttagagtgaagataatgggctctagtacttgcaacttagagagtcatcttttaaattctatgttaatttatgaatgatctgactttaccatgttctatggacagaggtttttatctggaataagcaaggctttttgaggactgttatattatagaaatctatatgcatttaacaatgatacttattattgaagcagaatattttattgtcaagcacagagggtgatccggtgttgaaaatggctgattttggtctctcaaggtaatttttatgaatttaagtgaaactaaaatattggtgtgattcattattttttttaattcaatgatttccttcttcaatagatgcatacacccaggtgattatgctgagacagtttgtggatctcaattatacatggcgccagaagttcttgcattccaaagatatgatgaaagagtacaaacttcttactctctcctgtttcttaaaatcgggttgtactgaaaagtaggcgtttgtggagtcttggtgtaatcctttttgagcttcttaatgggtatcccccttttagtggaaggaataactttcaggtacttactttctgtttccaaaggcaaagatgttttagatgggcattcttcgattgcttgtaaacttcttattattcaggtcctcaagaatataaaatctagtacatgtcttccattttctcaacgtgttcttcctgaattacatttagattctgttgatatgtgtgcgaaattgctgtctctgaatccaagtttgttgagttgacattatctattcgacgattacattcttattctattctcaatcctgacagattgagttatttttgcagcacaccacctgtccttcagtgagttttgttcacacaatttcttgacaataaatggggtgggaagataaaggcgagtcttggcaactaaaatgctaaatgtttcctcttaagacagacatttttagaaattagaatgatttgatcactggttgactgccagtgaaccttagtcacttctacttctattatgtatataaaatgctagaagtttggatttcatttgaagttttgatgatgtagcatcgacagcagcaatactgggttacatttctatattttaaagaagtaagaaagtgatacgtgtcaaccgatattcacaagaactttaagattcagtagattgttagaggaagtaagaggatcatttgggaaggttaacaaaggaataattttgaatagccagaaaagggtggctgtaaagagattaagtagattgttggaggaaggagatgtagagtttcaggagatgaaagcaattgggagaacccaccacaaagaacctagttcatttactaggatattatcgtgaaggatgtttatgagtacatggccaacgagtcacttgcggatttgctgttccaaaaggaaagtcagccatgttgagatgaaagattggggatcgctccccaagagtgagacacatatcatccattgtgatataaagcctctaaacatactcattgataacatcagatcagccaagttttagattttggattggggaaattgatgatgccagaccaaaccagaaccttcactgcgataaagggcttcctgtcacaatcaatgcagacattatagcattggtattgtactgttagagattatatgttgtcgaaagaatgtgatattggatcttctggaggaagaggaagcagtcttggaagattgggtctacaactgttttgagaataaaaagctggagaaagtggtatgtaattaagagtaaaacaagatccaattggagagaattgttaagattgcactgtggtgcattcaggaagatccattgttgcgtcttccgtcctccaatgaagaaggttcagctaatgctagaaggtataatggacatccctactcctccaagtcgaactctttttgttagtattgtattgcagttggaagttgttataacccatgtcataagagcacattttcctcctatgagctgaaatctaatataaattaacaaaatgagctagttaagaactgtgtatgtttttcccgtggttgtaaatataatcaatttctgttacattctaataaggtaggttagcaaggccagcttcttcgatagctcagaacacaggtactcaaatatattgagttcgtccatattatttgtgcaacatatacaaacaatccaaataacatgactaattatttcatctataggcagtacaatatttttgtttcttcctttataggcaatttttttttttattttatttttaaataatcatgctaattttgtttatttggactaattctgatttctcctcctatttgtcacattattctattaactttgtaatggtgtagttttctgtaatttcaatttcagatgcccaattgaatttagtccaaaccaaaataatggtaagacaaaagtagataaataaatacattacgtcgcggtcttaatttaacaggaatgagtgtaatcgaagctttagtagatctctccttcaatcgccaagatatgttg

SEQ ID NO: 184745 - DNA, 6163 bp, Cannabis indica
gagtacttgacttgctatgggtgaggatgtattctttcactataggttcaaaatttatgaagagggagagaaagaggatttcaaaaaaaaatagagaatgaaaggaggctctcaaaaaactttagctgtctgacagaatgaaaactaggttaaaagcatcggatgagaatgagagcatcatgctctgtttaaaactcgagaaatcctcttcttagtagtgattgcagccgtgttgtgtaggcgtggtataagggaagttgggggttgttgtctgtgtagtcaatcttttgtagtaaaggattaacatcatgctatttggagttgtcaaaagggaagaatttttggaagaatgggggtttcaaagctattgtttgtagatttgatggtaatgacgctaatgttttttttttcaagccaaaattataaaaattcttcttgctgatagatttgttcctttgttactataatttggtaggtttgatatgattgtaattgtgttcctcataaacaatttgtactcaatgtttatgtgatgtttgggtgggttactagacatttacaagattatatggatcttaataagagaggggttaggttccaaggaacaaacaaaagtggtatagtcgcctgagttggaagaagggatgatgaatgttgacgttgggtgtggattctacttagggtgtttgtagttgtgtggttgtgattcaggattatcatcatgggttttccttcgatgtcatgaaggtacgttctttaacaaattctatgtgttaacactattaactaatcctagttaattttctgttagcttaggttagttaagtctattcagttagtttaggtagttaacatttcttttatgagttgtgttctctatttttcttgcctctttctcttgtatatatacattgatcttcattaataatgtgagcttttccaattctgtttctctatgctttctctctctctgctttctttctctacatggtatcagaaatcttgactcaagattatgtcttcgtctacctccgatcctcaggccccttccatgacacctgcaactcaagctcctcaggctcctgccattgctactggatcttggaatcctttttccaattccctgtcctcctctctcacgatcaagctcgatcatgtcagccttcttccttggaagtcccaagtagtccctactgtaattggacatgatctcgatgagatcttgttagccgaagttcctcccctagcaactctgctcaatggcaattcaaatctggagtaccttcaatggcgatgcaaggaccaacttcttctctcttggctgccttcctctatatctgaaaatattcttacatctgttgccaatcacaacacctcattttctgtttggggcgctcttgaacaaaagtttgcctctcaaatcaaagctcgacgacttcagctcaagggacagttctcacatgttcacaaagtccaagccattgcaggttcccctgttgttgatcaagatttggttcttcaagtactcaatggcctaggatccaaatttgattctgttgtctcaggaattacttcaagaagtgatgccttaactatggaagaagtttaggctctacttatgtctctttaaagtcgaattgaacatcacttgtccatgagggatctcagcatcaaaatgcaagctaatatggctcttgaaaatggcagatcttgaggtgttcgacctattgccaacaataaccaggcagctccaccaataggtcgtggcaaaggtttctctaggtttcccaaccaaaaagttgtcaagtatgcatgaagattggtcacactgcagcagtgtgtcattattggtttgataaaaaactagacaactcctaaaaccaggtaacactgcaaatcgtgcctttcttactgaaattgactatgattatgatcctcaggcatataccacaactatgatccaagattgtgaagaggacaactcttggtattttgactccagagccacaacacgtcacttttgatccccacactatcgatgattcaaagccattcattggcactgagacacttgcaattggtgatggtaagaaattattcatttctcatactggatccatctctattccatcttacaataaaatcttgtcccctacatatgcaatctattttaactgttccttccattaccaagaatctagtcagtgtatctaaactcactcaagataataacatctttcttgaatttcataaaaactgttgctttgtcaaggacaagacaacagggtatgtgctgctcaaagggaaagctagggatgggctctaccttcttggtgattcttcaagtcccttaagatcaacattccagtgtcaccttgccacttctgacatatctcctactgtttgtagttgtaataaagaatgtcattgtactgaaaagtgtgatctagcgcacaactcttataatacaagttcaatcaataaaattctatttcttatccctatgagcattttgttttacatgttcccaaaccctctgatattaacctctggcattgtaaattaggacatcctgctatgttaacattacaaaagctatcgccctcaataccacactgtggtacactaaagcaattttagttttgcaatgcgtgtcagcaagggaaaagtcacggacttccctttttatcatcaccaaacagagcctcccaaccccttcaactcatacatgcagacctctggggaccctctcatggaccttctaaagatggttttcgatactacattcacttttggatgattttagtcggttcacttggatatacccactaacattgaaattacaagcctttgaaatgtttatccagttcaaaaagtatggtggaaaagcaatttggattgccaattaaaagtgttcatgtaaatgggggtggtgagtataaaccctttgctaggtttctagctgatcaaggtatattgttttcccatccatgccctcatactcaccaacaaaatggtagaggagaatggaagcatagacatataacagaaatatgtcttacactgctagcacaagctaaattggatctcaaatattggtggcatgcctttcaatgtgctacatttaccatcaacagattaccaacacctgtgattggtaacatcagtccctatgaatgcttgtttaattcaaaacttgattactccatattgaaaccttttggttgtgcttgttggcctcatttaaggccttataactctcacaagctagatttcaggtctaaatagtgcttattcttgggttactctcccgttcacaagggatacttgtgtgaaaatacaaatggcagaatgttcattgctcgaaatgtcatcttcaatgagcatcactaccctgacatcactcatagtagccatatagattaggtaaatcctacagttcaatgtccatttgttcctactgctagttttttttatttaaaccatgcactaatactgagtttcctaatgttgtccataatattactgctgagacaatggtaccatcatcaacaactgaagtgcaccaccctatcccaatagcccagcctttacagcctataccagaaacacaacaactgtctcctccccaccctacacctaatactttaaacacaccaaacactgaaccaccaataccagtatttgcatcctaaatagcacctagttttgaccctacaaatggccaacctgctgctgtgattgtctctcaaacacctccacaaccaaatacaatacatgccactaacctatctatctctactgaccaaaatcatgcttctgtctcccatttgtccccaccaattgtctcaaacaacacagcatctaccgctgcgcataggtcacatcctatgataaccaggtccggaaatgggatcacaaaaccaaaagcatatttggccacaaacacccattatcagagtccctattaccttcagaacccaaatctctacaagctacacttaaagatcctcaatggcttaattctatgcaaactgaagtttttgcattgaaaagagcagacacatggatactagtacctaagaaacctaggatgcacattattggcaataagtgggtacacagcatcaaactcaatgctgatgggtccttggacaggttcaaatcgagattggttgctaaaggttatttataggccctaggaattgactatgaggagactttttctcagttgttcagcctgtcacagttcaaactgtattgtcccttgctgtcacttcaaattagaaagtaacacagttagatgtaagtaatggctttctcaatggtgagctaactgaaactgtgtttatgaaccaaccaccaggcttcatagatcaatccaaacctgatcatgtgtgtcttcttcacaaggcccttttatggcctcaaacaagctccatgagcttggaatgacaaactcaaaactagtctacttcaatggggtttcactgcttccaaatctgacacatcactctttgcacatggctctggtaacaatctcatcatccagtcgtatatgttgatgatattttaataacaggtccaaatcaacatctaatctccaaattagttactgatcttaaccataagttctcacttaaagatcttggtgatgttcattattttcttggagttgaaatcttcagagattccaaaggaatgcttttgtctcaaactaaatatatcacagatttataagttaaattgcatatggaaggtgctaaggtttgttccaattcgataagtaacaccaccaaactgtcattgaatgatggagaattgtttgaagatcctactctctaaagaagcaccataggagctcttcaatatatcaccctaaccagacctgatgttgtgtgatcaaaaaactcaatcaatttctcaaagcccttactgtatcacattgggaagcctgcaagagattactacgatatctcaagggaaccatctctgatggtttattacttacaccagccactgtcatgactcttgaaagctactcagatgttgatggtctagctgtgttgatgatagaatgtcaacatgtggctatgttatttacttaggtgacaacttaatctcttggtctgctaagaagcataatgttgttgcatgctcaagcactgaaagtgaattccgtgccttagacaacactgcagctaaactaaagtggattgtgtccttactcactgagtggaatattaacttgtctcattgccatgttatttgggttgataatcagagtgcatctgctttagctgttaaccctgtttcccatgctcgatctaaacacattgagatagacttgcgttttataagggatcaaattctggaaaagaggctctctgttcgatatgttccaagtcgtgatcaagtggttgttatgctcaccaaaccattcatgacaaatgatcgattcatctacctaaagtccaaactaaaaatgactccaaccccttttcatttgaggaaggatgttaacactattaacaaatctttgttaattttctgtaagcttaagttagttaagtgtgttcagttagtttaggtagttaacatttctgttatgagttgtgtgctatgtttttcttgcctctttctcttgtatatatacattgatcttcattaataaagtgagcttttccaattctgtttctctatgctttctctctcagctttctttctctacactatgcaccatatttcgttgagttgatgattaggacggtttaggatgggttagcaacgggcaatggtgtcttctgattgttcaatagcggtggctatgcttaatggactgacaaagttaaggtgaagagtttgatgttttgatttttatgattagaggggaagttaatgctaatggtgttctagatattacatttagtcctagatttggtaattcgagtgccgatcttaaggtgaagcaagtaatgcggccacctaataagcctcgcacggtccatggcccatattttttttttatataatgattagaataaattaaaaaaaaatactacacatactatacattgagagtacaataaaattcagtagtaatttgctctgtaataatttgaagattttgagttcaaatcttagttaactttttttttttttt

SEQ ID NO: 184746 - DNA, 3017 bp, Cannabis indica
tgttttttggagagagctatatcaaactataaaaataagtatataagtcgcattctatttagttttgagtttattttacaaaaagaacatcatctctctatttacagctgtcatctgctatgattacattttgatcacggtttacatccaaaaattatattgcacctatagcatagtcatagtagttacaaaacaattcacgtcgttgagtttagtattaattcttttaaatacgttatgtctggtttgaatttttttttctttgattatttggaaccaataaacttaagattttattaacatgtccgtataatttatcaatatcttttgacatatttgtttccattaaattaaatcaattattaattcaggctcccttgtccattattggtgttgacaagcctgttatcttactaaaaaaaataaaaaaaattaaacgtttgccggctgttttttcttataattttttctgcgaacccagcaaataaattattgatgagagaaataattataacaataatgtgatcccacctgtcacacatagtgaatattttgatattaacgttaattaatcaattattgcttataaaaataatgtaatcttatattctcatatctatatataacatagataattatatatgaaaaatatatatgtaataataatatctattgatatacatatgattttagcacttcatcacttgagtaaaatttatcatttaaaacgagttggaaacatattataaacagctccaaccgatatgaagactcgattttttttttcttttaatattgatttttttcccattttaattcttaaagagatccacaccgtttttggtgacgaaacttaacaaatagataataatagactaatttatctccaatcggaatcatatacaattatacattaatttataatttactataatattatatgatcggatcgatccaataacaaagaaagaaatacacacaatccaatttgaatagttgctagctaattaaacagtactatacagcacagtattgttaattaaccctaattaaacattattcaacactgaaaatcaaaagaattataattaattaatttataaaagcatatctaaatcatagatgatgtggataaacaggaatgctctgctcattcctaaagaaatttgctgggtcaaccctcgttttaatctccaccaacctattgaaattacctttgaaatacttaactccataagctcttccttccaaatagctgcctttcccattatgattgattcccaaatcaagatccttataattataaaacgcttctctgggattcttggacacaaaaggagtcatatattgatagagtttcctggtcaaaccaatgtatttatcggtcaaacctttctggctttcgttccaatcgattgcgtactgaatcaaagccaagtttccagctctatgagggaatggactcgcattctcaggaatctcagccattctcccaccataaggattgaaagtcagcctcaacggaccatcgagctccatcattctaccccaaatcgattccaaacccttcttcgtaatgggttttttcacgtaatcagatttccgttttaagtagttgaccgttggggttcgagtgagcaaaacgctgtcgtatgagccattggggatattggtcgtccagaaaagtacagtggctttaatccaactcgtttcattacagtcagatttctttaaacccaattcaggaaatctctttcccaaaatggaaacaacgttttcagaatcaccaagataaaatccattgaaagtagctctacccgttttctttcctgttttagtatcatttttcacgtccattacaagccttaagaaaacgtcgtcgtctagtttattagccacgtgttgccactttgaagcaattaacaaagcattttgttccatagttctctggacactgaaaaatgttgctttttctggcacacgaacgagtttaatcttgtaagccaaaacgacaccgtaactagctcctccaccaccacttatagcccaaaacaaatcttcccccatagcttttctatcaagaagcctaccattaacatcaatcattagggcatcgtctaaattatcaactgttagaccaaattttctcatcatacttccataaccaccgccgcttatatggccaccaacaccgaccgtagggcacacacctgcggggtagccatggattttgctcctttgtgctatgttatagtaaacttcaccaagagttgcacctgtttgaacccatgcagtctctttttcgatatctatatcgatttttcggagattaaacatgtccaggatgaagaaagggacttcggctacgtatgaaacgccttcgtaatcgtggcctccgcttctgatcttcatttgcaaatggagtttgcgagcacaaacaatggcggcttggatatgggactcatgcagggctgttatgatgagaaagggttttcgggttgaggaagtgttgaatcttaggtttcggatgtaggattgtaaaacagaggagaaagtagagtttttcggggtgaagatagccggtgaaattgggtgagaggggtgtgagttttctagaaggcagggaatgaagtcatgagggtttggattattacttacagcatatgccggccatgaatgccaaagtagaagaaatattaatggtgcaaatattaacaaaagatttggagactttgaaatattggccatttttgttttttagatgagatattatgatttgtgttgtggggtttttttggatgtgtttgtatgacattttataggcttgttgggtttgaggtttggacaaaaaaagtcaaacaactcttatgttgaagattactatacattcacttgtttaaaattgtcaccttttcttgacgtggaaaagtcaaagtataattgagaacgtaataaatttatagttgccttgacattatctatcttaattaattcaatattaatatagtgaaatgaat

SEQ ID NO: 184747 - DNA, 1560 bp, Cannabis indica
ctcctataaaccctctcctccacaatcccatctccttattttcttaactccaacttccaaaagaaacgaacccataaaagaaaagcaagctcaattcccatttctctaatctcccaagacagcgagccatggcttcttcctatttcattcccttactcctctccctctccctccctatcctcaccttctttccctccacaacactatcaaagctcaccccaaactactaccaaaaaagctgcccgaaattccccgacatcgtacggcagattgtacaggaaaagcaatcggtggtcccaaccacagctgccgccactctccgcctcctcttccatgattgcctcgtcgaaggctgcgacgcctccatcctcatcgcctccaatgccttcaacaaggctgagcgagatgctgaaaacaacctctctctctccggcgatggttttgacgtcgtgacgcgtatcaagaccgctcttgagcttcaatgtcccggcattgtgtcgtgctcagatattctagcaactgctgcccgggacttgatcaccattgaaggcgggccttattatcccgttaggctcggccggaaagacggacttgtgtcgaaagctgaattagtagaagggaaacttccaaggccgaagatgccattgacgcagctcattgcccttttcgcttccaagaaattcaccgtgcaagagatggtggcattggtcggcgcacacacaattgggttcgcgcattgctcggaatttagcaatagaatctacaattttagtaaaaaaactaaggttgatccggcttacaatcccaaatacgcagaagggttgaggaaactttgctcaaattacaccaaggacccatcgatgtcggctttcaacgatgtgatgacacccaacaagttcgataacatgtactacaagaacttgcagagagggctggcgctgttggcttcggaccaagctttggctgtggacaagagaactaggcctcacgtggacttgtacgctgccaaccagaccaagttctttcaggattttgctcatgctatggagaagcttagtgtttataagattaagacgggtaggaagggagaggtgagacgtagatgtgatgcctttaataatttgaaaactgcttaatctcaattcaaaacacaagaggacccctcgcatttcgtttttatttatcttgttataacattttttcttctttacaaattaaattacataagaaacatggaggaatattttaccatgtttttaactgtattaaccgcttcagaaaataggaggtttgcatttttatgtggtaagtactgttatcacccacctagtttagcaaaaaaaaagtactgttataacctttttcaattgatagcaactgttagtttttacaacgcaagtcgggttggcaatttatccgtcacccaaaatattgctgatcatcaaagtaactaggtagagatgaatacatctttcaatacatggaaccaataatcaggattaagtcgagaaaagtgtaaatatggggcgaaaatgattaataaccttaaaacataaaaaa

SEQ ID NO: 184748 - DNA, 7890 bp, Cannabis indica
taagtatattgagttaatttttattgattttttttactcttaaagaaaatgatctaaaatctactgttaaaaaacataaacaaacagttttttttttaaacataaaactgttttgcgttctcatttttttaaaacacaattttaaaaacaaaaaaccaaaaacaacgccaaacaagtttttgaaaatttgaatgttattgagtaatgaaattaaacctcaatgttggggttcaaatagtaaatgaattatttttccaactttaataaataattaactctaacatattcaccgaggataaagataaatacagctaatattaaacgtattaatattaaagtaacaaattacatcaaaaattttatttttttgtgtttgtattcatttcttattgttccattcaggagaagcacttttggtgacatccggtctcgttctctatttaggggacatgttggcattaactatagcaaaagtaaggttcttctgcacttgattgttctttgtttcctctaggaaaactagcttatgatattggcagtgacaaattttgtaaaaaacaggcatgtagattgttgattacagaaaacatggtgcggtatggaagtaaaaggagtgagattggtgttattattcaggtatgattccttatgtgatgaattgattaagaaaatgttatagctgtatagcaaagcttctctcttgtgcagggaatgctgctcggccttcttctttttccagtggtgtttagatttgtacttcaaattttggaatggtttttaactaaagcattttctcaatcaaggatcgacaatgaaattcggaaatctcttatattcttcttttgccttggatttagcatgattgtgattattccaacatggatggagtttgttcaggattttcatatgcatccattgctatggtattgctatcactttggttgcatttacttatattaaatttagggtggtagtttggtagctgtagggctctgtttgacgttgctatcactttggttgcatttacttatattaaatttgaggtggtagtttggcagctatagggctctgtttgatggctgctatgaactcactatgatttaaatcaaatgagaaacacttatattttattatattttgtttttatataaattgttttgacatagattcaatatttatatgggagtgatagaactttcttttctatcaaaggtgaaagacagaactgaaactgaaatctttcttgtatagaactgaagaaaagaaaaggagaaaggaaacctcaatgtacaaattgggttccaaactcccaagaggtttaatctctccactggatctaggcttttcaatgttacaaaactatgagataatgaatccctccttagcctatcttatttatggacaagtaaatgaactaaatatattttgataaaactacttatgtaccctaactgctgcctttaactttcatcttattattggtctatcaattaccccagccaaactttcaccttgtcctcaaggtggaattcaggaaatcgctctgttaggatctaaaattcctaccaaggtaacttcaaattctggtaagtgcttccatttgatcagtacctcttgctctccatcttctctcttccttgaatagggcacacatctacggttgcttgcttctggttgtactttcattccaacttggatgtgagctggggaggagcaataatggttgctaaagtctgttctattgcatgccaatgtggaaagtgggttgtatggctgctgtagggggcagctccaatttgtaggctactttcccaatcctttgctttgtagggtttatagtacatagtacatagctggatgtttctcattcctatgacctaataacttttgccgttatggtctcagcttaagaaaaaagctggctgaaactctttcgtgtcgctttctatctgcattctcaagtcatcttgaacagcatctcaattttgtaacaacctatccgcttctgaaactcctttacattaggtcatgtggggtgggtctctaccatatgatgcttgggttgggtgggagtgcattttgttgctgagtggtaattgatgttgtacaattatcaaccacaagaagtattggatcccaatttttttctctctttctctctatcataggtaaaagacaactgaaactgaattctttctcttattgaactgaaaagaacaaactcaatgtacaaataaggttctaaacttttgagaggtttgctctctctactagatcaaggctcttcaaagtctttgaacagtcagataataaatccctccttaggctagcctactgactaaataatattccgttggggctacttgagtctaactaatctaactgctacttttaactttctccacgttagatatcttgataatggttggattaggagtttaggcctgcatgagtgtttatatcttggctatgtattttctaatgtgaatattggaacagtagtagctatccttgtgaaccctacatgattagtagccaagtaattttttgtaagattaaagttctggctttgtaggagcttttgcgatgcaatatcagaagtcatccatgctaaacgatgaagttgttataacattgaaatagccacatgcttttgtaggatctacagcaaacatcttcctgctcaaaattaatatagttatttaggtttcctgtgaattggatcatacatttattacttagactgtcgagacttttccacctttgaagatgtataaattggtatactgtacaagttgaataagacattttttttgggatgggtagggatggggtaggtgttacttctacaattatgatttctattagctgctgtatgttctggcatctgtgtttttatatcaaattactctctaatctctacatggtgtttttctttttcggcagggttttttcatttgtcttttcagaaccccttaaaagattatctttatgcatctactgggtgcttgtcatatgtgtttctgttgtgagattctataacatctcaaaaaatagcaaaatcgagaggattcttctacggaagtactaccatcttatggctgttttaatgtttctccctgctctagtcttccaggtgtgattttaagggattttaatgtatttattctgatgttattctctctcttttttgtggtgttcttagatatgttctctttatgtttgattttcagcctaaatttcttgatctagcatttggtgtggctttgggagttttcttggcattggaaattgttcgagtaagttacaaaactaatagtatgattgtttggctaaattgtctttcttttgttctaatgtaaactggcattatccatgtatatgaaaaggaggtttgtaaaaattatgttaaaaatgcggaatgagaaactttgatcccattcaattgacttaggatgtcccatatttgacatttgtaagatgaattacccaaagtcaagtacaggatcgtacgataggaagagaagattgtacatcaatatgatcaaattttgttcagtgcataccttgggcaactatgttactaatctacacccaagtttttttttttcaaaaataactaattgggaattgaggcgtttcctcaactgaaacaaaacatacattttgattttttttaaataatcataaatttgtgaaaaaaaacataaaactcataaaacaaacaattaattcataaaaaacacgaagtttgaaaacaaaatagtatttctaaattagacaaatataaatttagtaacctaggatagatcgtagattttaaaccaagtcttttagtcttaaataagtgctattaaactttaaattaagtcccttgacataaaagctgaaatgtatttcatggaatctgggttcataaattggaaagaatataacatctctgctttattcatggtcatctttcggaagacttgctgggtctaagctcttcttaagaacatttcaaaaaaatattaaccaattcttatcctcttatgttttatggtacatttttttgtaactactttgttttagtcaggtatggagactttggcctctggggcgactggtgcatcaatttatgactgctttcacggaccatcgtgactctgatattctaattgttaggtgggtgaggcattttatttttctcttggaccagaaactttaaagtttagtacttatcaaaatgatcttgatgctttaatttctaatatcttaaatattcagccacttttcacttctgttgggatgtgcacttcccatttggatgtcttctggctacaatgatcgtcctcttgttccttttgctggaattttgagccttgggattggagatacaatggtgagcgagttcacaactgtacttgtaattgtgcaccaataatttgatatactagttagggtgttattttgggttagagatatcattcataactctgtccttatctttgagatgagaagaatgttgtttggcaagcatgatgtaaagagttcagtgttcttctgtatttgtgaatccttgttagcaactgtggcttgcacagaagccactaggttggtctagcggtgactgggtttaagaaatgagtgtgacccaggcttgaacctgggatctcttaatatagaggatcttaggggctcatttaggcaccaagtgtgccaagatattaaaaaaaaaactatggcgtgcacatgtagccataagtttcatgccaatagtttgtcaaattagtaatgctaacagagtatgttaactgtgatcctaggatgattattttatagcacatctgttataaaagctggcagagaacaaagttattgctgaaaatgttttctaaaccattatcgagagtgctatcaagctatccatcaaaaccttttttatacgatgatgtattgtatgttttaccaacagttttgctttacatattcaggcatcaatggttggctacaagtatggtgtccttagatggagcaagtcgggcagtaagtatgcttttcattaatggttatattattttactattgtttctttctaaaacccagctggtattatcaattttcaaaattttgctgacatgtcctggacatggtgactttcatagagaaaactgttgaagggactgcagctggtattacatcggttctggccacgtgctcggttctgcttccgcttctagcatcaactggatatattgttacagaggtatctctagccctctacttttctgtgaattaagcattggtacagttggttatcaacatagactgtgatggttgtgctttatgcatatgggatattttggatctaaatccaattaaaaatcttatgacaaaaaaatttacataggcaaaatttcaaattacaaataggcgtgtatgtaaatcctttcttctgagtttctgttaaaagtcaattttcaagagtaaattctgctcatagattcatcagaaaaagaagggaattcagtgactcacttaaaatccgagaaaggaaaagtaggacattatatggtatttatgctttttgcctttcacttttgcagcattggttctctcttgtcgttgctgtcactgtgagtggtttattggaggcctacacaacacaacttgataatgctttcataccacttgttttctatagccttctttgtctgtaaatggtgcttccaagttccaacttttgaaagtacaagaaaccgaaaatgatcaaagccttccaaagaatacaaatacactagatacagacaaggtaaaagaggaaaaggagaaagaagacagatattcatcactcaatttatgtgatctctcatgattgcgttttgtagataactagatacgactgagtagagtggtcaatactaacaagatgacttatttgttctatgtcaatttttcattggtctgagttgggttcttaataagggttagatttagcataaagtattccttttgtaattttttaccatacattttagtttttagagagagttacacagagtaggaaagagttaggacactacactgatcctatagtaaagaaaatttaacacctttatttcattttcaacctctcaaagtttttgattatgtatctgctattatctgacattaaaacccaatgatgccttactggacgccatggcgaatataagcttttcaaatcgtgcaccaaagaattttatatttatatatatatttttagcaataagtacatgaaaaaagaatgaccgtattatgaaaagtaaattattcttagcataccaaatagaccaaacaataaagataatattctagagtgaactaaagatgtggcaaacctgatctgaaaccaaaagaggtaagtcgaaaacatgtaaaattctattccaaaccaaatgagcacgaacactcgtagtgaagatgcgatcaatgagaactctaggatttgttcccactttactataataacccactttgaatcccatttcgtccaaatcactactatatcaatgaatggagctatttcttgcagtgatcataattaatgaagatgtatgtgtgtagaagaggtaagattggttatctaactagagatactgaggcaccatcaaaaactcaccacaactatggtgttcgggatgaggaaaactctatgattatggtctagctagtaaattctatagatgaagatattagtcctatctatatatgttactccacaacaaaagaattacgggataaagtgagtaaatgtattcagatttgtcagttaaaaaaaaatgtattcaaatttgtttaacaagtctcaaacttttggactataattgaagcttggaagtgtacttaacaaggagatggcgatgtgacaaagtaatttgattctttgatgagaatgtgacatggatagtaatttgattcataaatatatattgtggatcaaattactatttgatgactatatagtaatcctcgtgttactttggcacaaataagtagaagtgctaatgctctttctagttctctaatttttgaactaatatgtccttcatgtctctaaattgtcttgcaaccttttctcttttagcaagctatcaaaaaagattctgttgtattgttttgtctaattcttactgaattttagaaccaactttctaggaagacgattgactgtgccaaaataatcaatgatctctactatttcgatgataattgttataagtatagacaagttcaagaattaagtggtagtaccagttctacttatgaaacaataatgttttggcatgccatcaacgattaaggcccctaggtttatttgaaacaaccattccctagtttgtttaaaggtgtgtatttaaaatctatgtattgtgaacattttatttatctaggagttattgtacttttttttttccaaagcctactggatatttcatttctagtccgttctatctaattcatagtgatgtatgagaatcttcaaaggttaccactttatttggaaaaaaattatttgccacttttattggtgacaatacttgtttatgttgggtgtgtctaatgaatgctaattctccaagtttaaaatttgttcaagtatattttcaagattattgaaagagatcattttagaacagccaacagtcatgtaaatcttagctcgcagttctagcttttttctaaggacatgagcaaatgcacctccaaattctataatgacactaggtatacgtttatttatcattctaaatgtgttttgggaacagacttagatgagacatatcataatgccagattccattgtggaagacagattttttttttgaagaattcgccatctacgcagcttttctgtatgaatgcatt

SEQ ID NO: 184749 - DNA, 6190 bp, Cannabis indica
aataataacaataataaaaattcttgatttatttcaattaatttacacgtaaatgctaccataataaagaacaataagaatgcatgcaaaggttatgaaagtgagttgttgaggcatcattcttgcatgtccaacttaatccactttttagccaaaaaattaagaaaagaaaccagcccataataaggctttaccatgagttgaatttattggtaaaaaccaataagaaatcttaagctttgatggcgaccaatttgcgcttgttggttctgatggcattgctatccctagtttcttcggtggacattcccccgggaatccaaaacgaagacctcgttattgctgcttcggagatgcagagagcaaattacttcacttttgttttgctcctcaacatggctaaattggatcgaaggcttcaaggtaatatcaccttcttgatgcccaacgatcggatgctgtcgaaaattgccctagagccacatgccatctccgacttcttgcttcgccactcgattccttctaccatgcttttcgactacttgcaccatataccaacaggctcaacaattccgagctcaaaacgggattacatgcttaagatttccaataatggtaggtggagtttctttctcaacaatgtgaaactcattagtccaaatatatgcactgcaagctcctccgttcgatgtcatggcatagatggcgttctgtctctggctatgcctatgagtaactctaccaccgaaattgcttctccttcatctatttgttttagtagcccaaattcatcgcctccagcaataacaccaccatcaccatcaccaccatcatcatcgtcgtcatcacctttttctttagcgacgggagctagtggccttaatatgacaccggccgctggccctagtgtaagtccaccgaaatcagggtcttctacgatttcaatattttcagttacatatatgttgttgtcactttggatttcttctctatgtattgttctttagcttccaaaaagagcaatttattattaattcaatctccaaaggagtgttcttggactctctatctattattaacaagctcaatcaaacaaaacataaagcaattggctttgtaacttgtatgccatatattttatttatttggtataaatataagtctcaagatggaagattttagagttgatgcctctgaatattaatagctttgcaaaaattcataacaaaaatggaaaacacctgattcaactaagaaattacttaaaaaagtgttcaattgtataatttagtatacaaaatttcatttatggtaagaatcgaatggagagggaaagctaaaacaaataaagattcgtttttctacaatcgactgaagtgtacttcatcatcatcgatgacaaggggttgcaaaatctgttatcgatgaaatataagttgctcggatatcatcaagcagtaatgtaggtcatgacactcttatgatacagcagcaacgcgagtgtaagctacgtctttaactttcttttgcttcttcctctctttatgcttgtctgattttcgcttcttcaaggatgcctttgggttcaacccttcttcatctgcctgttgttgttccttgtctgcattttctgaatgagctttcgattcccttgcatcagttttcggttcaatgactgacattcctgtaagagtgtagtctaacaaatatgtgcttctcacaagcctgtctacccggctaaaatgcctctgagaatatggtaggagcccttcaaggagttccgaaatacctttaatctggaatatttcatggtatttataaaaatgtcagagcaattcacgatatatatttagaattaatactcaaagtccaggcaaagaagcaacctcaataatctcggttgggggcacgttgttgaaaactctgaaaagcacaaattgtgcaacatgacacagtttcggtttagtattccattctcgaacatactccagaagtaaccggaattcttccttgttaagagcctgaagggctttctgtatctggttttcagcttctctcttcctgcaaagtactcgattgagaaatacgccaacacgtggaaataggaagaaaaggtttaagacaatcgcaaacctgcaaagttcagcaaacagctcgaaaagcttgtgaggcctacgtagctcgaaagcaatttgtattgcttttgtataatcagcatccactatagcattctgaagttcttgaccctttagaacaccttcttcctgcatcaacattaccaacatagtatatttatcatgtgaaaagtgcttccttcataagcacacacccaaaaaacttgtgtataaattacgaactctaacctctctctggaaagcttcctctttatcagaagcagtagaatcgtgccatagattgacaacagcatcaccgccacctgtggctaacatttctgtcttcttccctaccgccaaagcccaaacctgcaggacaatttagtactccttaaaatttaaatcatccaattatatatttcggaaaaggattcagcataaagtctttcttcttcattagaaatcatatctaaatgcattgattacatgaattgaatttaactgtcaaacgcccccaccaactgttaggccacctatatggtttactaacactagaaggaaaaaaagaacttaggctaatgttagtaagaaagcttggaaggttgtagtagaagcgagttcaataaagatctcggagaagttactcaaaaacattgttctaactgtcttgatagaaaagagagaaaatgttcaccaatctagcaccctttttcttaattatggtattttgtacacttcaaaggaaatagattctagtcaattcaactatacaagcctacaacatcttttatctattttgagcaagtaccttatcctcatgatgatcatatgtagcaatacattcattggttttgactgtccatagctttactaaaccatcggcacctgaaaccatcatcaattcgatcaaaaatgacatcaagcaaggtggaagagaaaagtataaattcaatcaagcattagcctcattaccagaagagacaaattgagtcccgcgagtaataaatgatgctcttaacacacttgaggtatgaccctcgaatgttttcaagcatgaaccatcagttatatcccatagctttattgtcttgtctcctgatgatgttatgacacattgatcaactggagaaaactcaactgaccaaatcccccttttatgccctttaagtacagctccaggtacaagatccggcagcttccataaacgagcagtgcgatcctgattacccaagaaaggacatatgtataaatcaatgagaaaatttatgtgcttcaaagaggacaagaccatgacagattaagataaacacttactaacctgggaaccactacaaacaagactatcattgggtgcaatagccaaagaattgatatccttatcgtgtgctgcgacaacagctttggcttgcaaatccacaggttgttccacatcatctgaaagaccatcgaagttccacaccttgatggtacgatcactgaacacaaatcaaaccaaacaaattatgaaaagaaaagcagagccttatatcatataacagcagccgagcctatcagtatgtttccaaaatattcgtatacagaagcaaaatggaaaacgtcaatattaacaaacgaatcatcagatataaagaccaagtagaaacaccaaattaagctaaacggaattcatttttcactcaactaaataaacaaatacagagactcaagagtagctcaaatggtcaggcatatggtttcctaggtacctacatagcaattgctatagtttcctggtcccaaatattgtggggaacctggcaacagattttaacaaggtttgagatcacaccatcacaatagagagtttttgcattctcacctgctaccgctaacaaagaaggatttccctttcttagaaaaggcgacggctccaacagcacccatatgacctacacagtcgccaaggcaacgtccagtttccgagtcccacaatctaacctatacatataatcaagtcagaaatttgaaaaattacaagtatacggaatgcactagaaaaatcaatcgactgaagaaaattgacgagaaattgaagcttacacttttgtccttactgccagttacaataagtgtttgtccagagctcgacacacaggtgtccaaacttaaaatagtttcagtatgacccgccaatacatagtgacacgacattgatgcaaggtcgtacactcgtacctgcaaatttacaaattgtatagcgtgatcagagataagaccttagaatatatgtgatgtttgatgaaggagctagaatcacagacccttcacggaaataaggatataaaaatttcaagcaaatgacctgttcggtatttgaagcaacagcaagatatttctcttcattgcctaagaacttcatatcaacaatttcctcattgtatcctacaagtcttttgctcatgactatatcaaagatcccttcaggttgtttcacaggggaatacacaagaagttgttgatcaacagtcacacaaagcaatccttgatccaagggaagcataacagcagtagcgaaaccccttttgctgccatcctcatctgaactaaccgtaacatctgaagactgttgttcaaacagacaggctgctctgtcaaaataaatgcatttgacaaaaacagactcatcaaatataactcaaagtaaacaaaatcttacaaaaatataatgtcacatggaaaacacccccatggcttacctttcagaattccatattcgtacaatcccacgctcaccgacagttacaaaataaattccttgtgacccacttttctttccactctgttccaaacacggcacaaaaggagttgaagaatgaatgacacacacagcttcaacagcttcgtatgtcaataccgtctttttgcaactgtagtctagaagatcccataacatcacaacctgaaatcaagtaaaacatcagctagaatcttcaaactataaaaaccagaaggtctctgcatgagcaatgaaatagtcataaccttatctcttccagcactaagcaacatcccaccatcttcagatatagctattgaagtaacagttgaattatgtcccccaagtgttgcaacacacttcttagtcaaaagatcccaaacttttacagttgtatcatcacttgcggaaaatagctatgatttgtaaatgagaaaatggtcaattaaatcaaacatgcatcaaaaataagaacaactagtgttttataaaagtagtctttatgaaaacttttattagcaaaataatttcacaaaaattttttttagcacaataactatgtatggtcccacaagcgaccatagatttacaaagtgcaaccgtcacaatcgtatagagtagattgagtgtggttattttgtaattttactaatttacattgctagttatgcatggaaaataagaacaccattcagcaagaatgagggattcaaaatgcttcatttcctttaaagctaataagtgcatatcatacatacatatattgatagactgaaaatattatagggacttattagtcatttgcatgtagtgagaaagcctataaatatgtaattggatagaaattaatggatatagaatgagaaaatagaacttctgttcattccgagattgacaaagtctcaaagagtgctttcattgagttcaactctcagtgaaaacaataatgatagataatgggtcctcttcgaaacaggactaatctccaaatgcactctttgagatagtgccaatctcccgataaactgaagtccaaatgcactcttcgagacaatgccaatctcccgatgaaccaaagttctatgactaataagcccctatagtattttcatagtcttaacatatatatatatatatatatatatatatgattgaaagtaaattagtattgtcataccatttcctccattacaatcatctaaaataattaagcaactcataacaacattgtttctgagattgaacaacttacaagtgatttggtcgaatcaggatgaaaaagaatactcgaaacaacccccttatgacccttaaagtaatg

SEQ ID NO: 184750 - DNA, 6630 bp, Cannabis indica
taacaattttttttaatataacttatttaaagataattcctaatacaaacaaatgcaaaaaatttcaccagttttttcataatacctctagatcgaattattatttaagttttatcgtgaccaaaaatcaatttagggccttatttgtactattttaagaaatgcatggtccattttgtcatttaatataacacaaggtctaatctgtaacttttactaaatacaggatctaaaatagcatttacccttagtttaaaaatatatattttaatggttagaaaaataagaaaaaatccttaaactatatatatttttttttgagtaaatctttaaattatatttaataaaagagaaatatatatttttcaacatgaagtatataccaaacttctgaatttcctttgtctaaatattgtaacaatattaaaaatcttaggatattttcagcaaaatttcatcactttaaactttgttttttttatcttctaaagtgtaaaaacaatatgtgcttcaatcatatgtatatgaaacatactaaaagaaataaatgaaaaaaaaaatggaaagataaagaaaggagtggttataagtgtataaatagtcaaagcaccaaaatcatggaacataatataatatagtataattatgttatgcataaacagcccggtcaccaaaacggcgcaacccatgcaaatctctttctctttctctttcatgttaaatataagtctaagctgacgttggccacacgtgaaaaccccaaaaaaacatcaaaagctccaattttgactctttgactttgggtcccacaattctcacgtgtgccaaagagtaggttacaacaaatacagaatatgtgttctttctcttcttcttctcttctttccttctttttgttcttttctcctgtccgttttatactttacattctctttcgttttgttttcctttccttaatttgactttcttgttcgggaatacctctatattaagatataacttctgtatcttcgttttaaatatgataaaaataaatccaaaatggtaaaagtaattaatgcaagcgacctattttaaccaacccccccaaagaaaacctcaaaagtcaacaaaactacctttttcaaatgactttatatgtgctgagccaaagaaaaactgtctttttccctttatatacatggaaatgagacttgagcaatgaagatagaccaataaaaagcacttattatcagtaagtagtgttcagactatacaagtataagaagaaaaacaacactgcttaaatttaataatatacatctccaaaagtaaaacttgaaatcggtcataaccaaaaagtgttatggaacatggtatttagaaatattagtacaccatgttctataaaccacttgtacatgtgtagaagcaggggattttgaggctgtagaataatattaaaaccaaacaaacaaacaaacaaaactgccatggaaaatagtcgtaaattatttgatcaaagacttatttcttcgaccaaaattgggcaaaaaaagaagaataacaataatgtgaagagtctttggttggatcagagtggcttcacaaggtagaatttttggtcagcattgggaaggaactaagagattataaatcatttgaggctgcacaattgagctaatgtttgtctgtctttacatgtcctacgttgtcgcttcccgaatccattagaattgtcaacctcctcgcggttttcgtgaactcactgttatatgaaacaagtcaatcaactgaacaaccctactattacaatagatgtgaacatctaaatctttacctgaatggttcatctccgatgtgctttactgcacctgtgccatcgcgatagagagcatggcttagtgtttcagagttttctattccaaacatgtctgcaagtttcctatacaattcattgtaagagccaagcacagagagatcaagggtgcgccctacatcttctgactccatgaaaactttacagtgaccagtttccaagttcggctcagtctccttattccattggagcccttcgcagggtgagcgtcgttgttggccagaagcatcagaaaagttagctgctttatcaccattcccatctgatgaactgtttccagtaagaactggcgagactgtatcaccagaacagcttaaagagatctgctgttctgttagtatcggttgaccaaagagtatgagctgcggtgtctttacatcattagtagacttcttaggtgtttgtgcggtatgggacattgttaacaagcaagaaacattttcattgaggctcagcggcttctgattcattgcattgttggggaacttagcgggcgcagcaccatgatcgaatggtgggaaaccagcctggaaaaggctcggttgcagtttattgaagtgaagatctgataaagatagaccaaaatgagcttgcctggctccctgcatgccagcaggagtgttttcggacagacaactaaagttgttactgtgaccaaagagattgccggtgaaactcggcattggaatatgagtgtcaagtgggaaatctgaatgctggggcaatctcaatttctttcttggtggtgagaatggtgagagatgaatggccggcatgttagacaccaattctaccaaccacggactaactcgtttcacattttgaagtagatcaggttcatcccatgaaacctgcagcaccatattctcaatacaaattagcacttgtgaagagtacaaaaggctttcaatgtaaacgaacaatcatttggtacatgttcaagacaagtatcattatcgtttcctattagatgtatttaaattcaacaacaattgaatggaaacctcccaaggctttgttttgataaattttttatgtttaaccgtatcttacgccagtaagcagactaaaaaggtcgagatgaaaaaatacagagtaatttggtaacaggagaagataaagtaactataaattctagcttagtttgatattttttttacgtttagagataataaaaaaataaaagacaaaaaaaaaagaaaagaaaacagagtaatttggtaagtacctggagtagtctccatggagaatcaggccagcgatggtaatcagaaacctggacagaagatatagttcccataaaccaacttattcggctagaatcttcggtttcaaaggccatcttgaacctcattccaggggtccaacggatctgtaatgcggctcttaccaaggacgctttgacacaaaactcaggagtactagctcgagggtagtaaacaacctcaaatggttgaccattagaagcaagtgttgcagcttcaataactgattcgggcctcactttccccttccccatcagactaccattcgagttcgttccattaccattaccatttctcaacatcttgttctcttcatcccttaaaaaagcagcaaatcctccataaggactagcacaattcccaccagttggattccaacccgaagaggactccgttccacctcccataccccgcttagcacgacgaataccaacacagagatcgccattttcagctcttaaaaacacaattgaatccccagcaaccagcttcttatggttaacaaaagtactccatcctgttgtcaaaagatgccgccttggcgtccctctatatatatgtctgaatttccatgtttcgccatgaacatccttagcaaggatagtctgaacagggggatcggcattgtaatccaaacgtggaaagatggtttcggcacagtatcttggtactgagaatccaccaccattgttggcatctgactgggtcaaagtcttggcaaatgatgctggtttctcttgagcttcagacccattaagccctcctccaataccatcatcatcaaagccaagctcattcacaccagcagaagaaggaatcaaccttaacttggcaaaaacctcatcagtctcaggatcagccatgaatttaatggaagaaactttgcatagtgtgaaagatgaaatcctgaggattttgctgaaatcaacaggaccacaggcatgttcggcatggccttgagggaagtaaaacacctttgcatttaccattggcatctgaaccatacctccagcacaggcatgccataactgaggatctaaacacttctccacctctttaagtttctcttttgaatccataaacgtaatcaacttaagtgataattcttttgaaaaaaaaaaaggaaaaactacaaaatcttcccagaaatgaacaccctttactagtttttgattcctttatcaaataagacctgcataaccatataaatcagtcaaataagtcagaatcaaaacccaaaagaaagaaagataaaagattctttttaaaggaaaagtaaagaaatataataatcataagggaagtaattattaattccaatcaatgaagtacaatttgatgcatttcttaccttaaatagataaagaagaccaaagtagagatggaagatctaaactttgtggcacgattcaccaaaggaatctgttctaaaactccacataaaacaatacccacaatcaataccactaattctatagaaccccataattaagaataaacagaaaaacagaccagcttcgaaatatctttgctccctctcccctcttaaattcaatgcttcaattacatcactcatcccagaaagaaaaaacctcccttagaaaacttcaaccatcaaaacacaaaataaacttaatttgaaaaacacacaaaaaccctaataaagtgtacactcaatgaaaccagtggagcagcctcaacagtaagactctttttaacccaaactaactcacagtccctctacccagaaaagaatcctaaacgacttcgtttcaattcctttaacttctcagataaaaaattccgagctaactctgcttcaacgatccaagaatgaagaaactataaaacaaagctctcaaatttcttcagttaaaagtaattagttgagaaaacaaaaacaaaaagaagaacccagttggaaactttttggtgtgggaaattgaaaagaaaaaaaaattgaatcttcttttcctttttctcgtcttctttgtttttcttctccttggctcagagattcaatcgaacactcaatggccgacacacaacacaagatagaactccattttcaaacaaaaacaaaaagaaaaaagccacagcaaccttttggatcatgcaagagtccaaaatattgagaaaaaaaaaacaactagcggtactattagtaatactgctactgttcctttatttatttatttaatatttaatatatttctctctcttatttattaattttaaaataattaatttgatttttttaccctttttcttcggatctgacgaaactgtatgtgtatcttcagaagccagcaaaacaacaaagatctttaaggaacctatccaatttttacttttttaatatttttttttaattaataataaattaattcgaaatggaattaattaaataataaaaacctgatttttttttaataatccgaaatggaatcaattaaataataaaaacctgatttctttttaataatccgaaatggaattaattaattaataaattaattaaaaaagtaaaaaaaaaacaggtttaaacaaataataaaggttaactacctaatttaaacccctagaaaccctaaaaaagactataccgtgcagctcttttatattagtagggggagttataattgtaattttcttttttaaacactttaccttaatttattatagtgattataaatttttcaaaaaaattaacttctaaacattaggttaaacaaacttttgtttacatgtattctatagatttttttgttctacaaagtaaattagttgatacaagatattataaataatatttgaagctgtctaaatagctataatataattttggaaaaaattataactatttttcagctgagggagtttctttaaataattgcatgtaattattttaaaaaaattataactattcatatccacatatgatgaggcatggtgtactatttttaaccttttattttttctcaatttaaaatattaaaataactatatcaggaattataataatttttctaataataaaaaaaagagagaaaaactatgcattaattccggcgttcctcgcttagcactacagtggactcgaccgatattcatcaatttcttgcaattttatagttgggattgttaatgtttaactttgctctaaaagcaagggaaaaaacacaacagcttacaagttaaccgtagtttaacttttttttcagtgatgtttgagtcaacatggttaaaacttaacccaacacgggtcccggttccggctcaagcgcaaacactgttggtttttagaactgtttccgcttctctgtttgacgatgagataattttgtctcacgctttgtctggtgcaagtgtatatcacgcacttcatccaaaattaaattcattttattcggaagaaaatcaaaagttatattcttaattgttttttcttaaaaaaaaaagggcatattcttaattgttattaagcttttttatttttttttcttt

SEQ ID NO: 184751 - DNA, 5359 bp, Cannabis indica
agaaaaagagagttgacctgatcaacctgcctaacccgccaaccctaaacctgccaatttgcgacacgtgaatgagcgggttcgggttcatttttttcacccaaaacccgccattccgaaacacggtcaacccgcccaatgttcacccctggccctaattgagtcccttaaccttttttgccatgtacccctattgagcgaacattttcttcatagacattctgtctacgtacactatcagcatctgaattgacaaaatctctatcttcctctgagaaaatagactgatttctcttttccataaaggcaaccatttatttatatattttttttcatctaaaccctcacatgagctccggcctttttcttcctcactttcactccaagtcactgccaaagctttcttcttcttgagcgtatttgcacattccgcttgaatgtgtctaaaactatctcactcacgacactgtatgcccatatacttcttatctctatgctctggatttttgttattttcaccatagtttcttctaagttgattctttttcccaccaaaaagtttttcttgtaattctttttagaaaatcttgcataattctcggttaacagggcaagagtgtcatctgctaggcattcattagagttagattttttttttttttttttcttttttatgaacaaaagcaaggctattctctggtttttctttctcagattcttttggcgtcttccttttattccaccttgtaagagtcatttcatagttctataagctctcctccaagtcaagcccctcaacatctctcattcttctatggaagtgactttagacttgaactttcttagcaaaaccctcaactcttttcgaacaagtttggcattagagtaagtcttccccaatgcgtaagactcattcgaaatatcacacatcttagcgtgaaactttgccactgtttcatcttccatagatagattttcaaatgcctttgccaatgatcgcaacctggacttttcataggagcagttccttctttttaattctcaacttttcccaagcgtctttggctactttacaattgtcaattacttcgagctaatttgtaaaaactgcgctgcacagcgcatgcatagcttttaaattgtaattagccttctccatctcttcagaagtccacatgctcaattgtttggatttggtcactccttccacaattgaaggacaacacaaaccatcttccacaatcatccaaactctctcgtcaactgctttgagaaatgctcgcatcctggtcttccaatagggataattttgcccctcgagcattggaggtttagaggtatatccacctaccctaaacatttccataatagacaaaaaaacacaatatatacttctagagatggatctcaaaaggggttagctcaacaaggatgttacaaaagggaaaaaaatatgtagaaaaatcaagaattgcagcaacaccgaatttcagtactacacagcttgcaagaaccaaatgtaaattcttacctatattacttctatttttcaattttcaaactcatgtaaatcaagattcaacataatcaaacatcacaccaagaaattacaaggctcactccaactggaaataaatttcagctagctactccttagaaccaggataataactccactaattaagaatgttacttacaagctctaatccatattgcaaaactgcaaattacattcctccactgaaaataaaagtaaaaattttaaattaccctaaaaccaaatcccttggttatgcacaagatccccttgtacgattgttgaaatcccttcagcaacttcacgatttgaactcctttcagatctggtcaaagcttcaacaagctctgcaactcagctccacctgctgaaatggtgaacctgcacaaagaacaaagaagaagaagaatggaacgagttttctctcactaacaaagtcaatgagaagggttagatctgatattcaagaatctgctatttatatgaaactaaacctgaactaactcaacccgtaatggacttcaaacaagattaaactaaaatctaaataatgttcataatgctgatgtggacttaccaacttactgcactctacagatgaaataacgaacaacaaaggtgtaactgagacaaaatattcgtttagacaaaatatagatgaaacactacacacgctagatgcaactctggaacataattttgcacacacaaaaataatgactgttacctttagtattatattattgagtcatttttcttttgttcaaattaaaagttttccgatagagtattcattattcaatatgttactttctgcaggtcggtgatgttgtgcttgttgaggatgagacagtgattgaaaatgaatttaaaatggttggattggagacgttggtaggttatggttcatttaatcaggtgttcagtattggtgtttaagagttttcattttgttacatttaaacattcagctaggattaggatttttttattttttatgatttatgatgtgtggattacatgattcttgacaccttttctataaggttgtaggttccttctattgctgaaaacttcacatatgcatacaaattagtcttctgttttggatcagcatggttagtgttttttcttgtttcccccttaattaaagcttctctatctaactctctgtctccctcagaaaatatctcttcaatatggtaatgtgtcagaaacattatcttttcttcggtttaattctgttgttgagcaacatgctgtgtctttgacagatcaattactaatatgttagacgtaatacgagagagggtgatgttgattcatcaacagtggttgtttaaaaaggtctgggagacagatttagttgatgttttgagtggctgattagtataaataggaaagacaattagggaagcatacattttgtgtgttagggaggggactattgggattttggtagtgagttggggagagtgaccaggctcttgaatttgtaggggttctttgacaatttggatgtttctgtactagacattatttttaataaaacagtgaatgtttcctctgttcttttcctactgtactgttgtgtgtgtgtgttgccgtatctgtgttcagttctgttcttatttttcaatgtcttgaagaacttctgcatattgtggattttttcgatattgtttttttcatcaacgataagaatttcaagttatctattccctgttttgtgggattagcaatgagttactatgttgagttctgtataattcagttctgcctttacacttcgagggcttaagtttttatatttgctaggtagggtacaaagttgtaacaccaggtcggcggaatattggcaaggtgtgtcaccttttatttctggtgtcttcttaagtttatgtacctattcagttgactgacatttagttattactacaattacaggtgcgtggatatacttttaatattaattcaggggctattgaatcactagagcttgattcttacgggatctcaatcatcccctcaagtttggtatgtggattgaaaattataatcttataacagtgccaaaaatttgaaacttttctttttttttttgattggataatttgaatttatattttatctaattagacaaggtcttgttatagttatacttgtcttgcataaatactaaatgctctgacgtctactgtttgtctcacttatgtttaggttagtacatatgctttgcttgttgaggatgtgctggaagttctctctgatgctgttgtggtacatgaagctgccgcttcacgaatacatagattgaccaaggtaccttttcctgccttgattcagtttggacctgtctcttacttttaatttgatttttatgttactactcatctggaaaaatctccactcccagagtagttttccattcgtatgctttatttagtaagtgatggttacgaagcatttgagcacctgaagtgaagcacataacttgaatccttgcctgtttcttgttataagcatatactctataatactcagcacacaatacaagcgtggaggcatttagaagggtgtacatccagcataatagttttagggattttaacaaaactgtcattatccctttgttttgaaaaactgcaaaatacatctccatatttttagaagcagatacttctattgaaacataggttatttgtattgattttgcaaataaaacctttccacagtttgtcctaaattacacagtacacttttgagatgacggagccccctattcgcttcacatacaccaggagtagtaagaaagccaactaggcagtgagctgtgagggtagtgttggaactgcatgaggcttgtccaagttgtcagttgattgagtaatgggattatggagtgagtatttgttcttatttataattcaattaaagtgttttatggtagtttaataaaagatatatcaaaaagtttgactagaattaggtaaggcaaggttattctggttggttttgatagccacaggtcttctgtggaagtttcttataaacgtaaggttgtaattggtaattaactagaactcaaacgtatactattaaaaaaaaattcattataataaaactattttgaacttaggtggctttggttggaattaatgtgatggaacggaatggaaaggaaaccatttttattcaatttttttatttggttgcaatttaaagtatcagagtgctgatagaactttcttcagatcaataaatgtttctatgtacaatcaacagacaaggaaatcaatctctaagaaattactttgttaatattcgtggccaaagtacacctaactttcgagaggctgagagacccattcgagagggttgtctctcccaagtgagtcaatgctcatctaaaatccatgctactcaaaatagattctcatccttatatttataggttttgattgaggataaaattacaacccaagccctcttattacgtcagccaataacacaaataaacaattaaagaataaaaatactaaaagacccttacaactcataacaggtccttttaacaatttaagcctatgctctatgcttatttcgaatctgatggtaagctgatttgagatccagtttaaaaaaaattcgagcgccatgaagctcatctataacaggtattagaaacttatatggtatagtcactctatttagagcactgtagttcacacaaaactgccacgagctatctttcttcctggcaagaagaacttggcttgaacaaaggctgttgttgggttgaattattcctaccgtaagcat

SEQ ID NO: 184752 - DNA, 9355 bp, Cannabis indica
gtaaacaaagaaaaagaataatataatgttcttttcctatctctccctgtggatggataagagctgtatcttaccttgttttgcattggtggccttctgagtattacatgaaatggcattagacccttttgtgtttgtctgttgggaaaccttcaaaattcctttctaagcagtgcatgtttgatgtgagttgtaagtcctcttaatgagtgtaatgttttggtgtatattttgtgtgcacatacatcattattataaataatggtggagcaaaatcctagttagaagaaacaaaaatgacatgttgggtacaaaatattttatgaataaaaaacaccttctaagccaacttataagttgtttctgccgtctatctttttcttttggaaggtttctaccagctcaggccttaccttgatcaacaacaataaaagaagaaaaataagatagtaactctttcatttttcaagctattttctcatagtttgatcttttgatattacatggtggtttgcttaagtagtttgtttcaaacattcatacaaaggtttgagtcttggtttccttttatttttcattgtacttgctctattgataaaaattccagctgaggatatctttatgtgatgttagtctgttggcgaaattgtgaggactagtttttgaagcctcgtctgtttcgaacaatgattcatagatctctggtgcttgtgctgcttgctttgaaccaattgttacatgtagcaggagagacagagccccaagactgtaagttctattcaaactcaattttgcatatgaaatacacttttctttttcatttaaaaaatgtgctatttagttttgtttatatgtattacagacctatgagtctaatattcagctttctttgcacctcaagcttttcggtacttgcacaaaagccaacgtaaactagtttcagtcgtgttcaatttaaaatactattctctaatatctgtatgtttaatacctaatgaatagtttaacttaaatattgcgctccatgcagatgcagtagtgcaaaatattatttctcaaaatcttattgaattaaaagacaattgaatcagccttttcaatatcttgaacatcttctctgtgttattatggaaggaaatagttgtttacgtggtgaatcatatatctatttcataatcattatctctgtacagacaatgcattgctgtcactcatgagtagttgggagaatttatcaatgaattgggaggggcaagatccttgtggagaaaattggcaaggagtttggtgttctgattcacgtgtgacaaagatgtaagttttggtattcgactgataagatgccttcactaaatcatttggacattaacaggattttcttttgattttagaatattaccaagtatgaacctggtgggtactctacctgacaatatacagcaactatctgagcttcagtcactgtaagtgttctattttcagtcttttctacttttagagctctcaaatcatttgctaacttcttttttcctgaatataaaataaatgttttatcattggtaacgaaacactcttgcatcatactactgtgtttttgttttcctttctttttactttcatgtttctgagtttttcccttgtggtatttgattgttcttcttgtgtacatttcctgattaagtgtttctttccatagggttctttcttataacaagaacctgggaggattgctaccgccatcaatagggaatttaaaaaaattagaaaacttgtaagaaattgaattctagactcggcactcaacattgtctgtctaaaataaataaataaaagtcttatctaattccttgttttttcacttttatggcagagctcttatcgattgcaacttttatggtcctattccagactcaataggaaatatacggcagctaaattttctgtaagggttatcaaattggaatttttataatgtgctattgctttggcaattgcatccaattcctttacaatggctatatttcatttcctgattttgtgatgtttgttctatggaattttgaagtttcagcacctgaaaaaattgttgttgctttttgttgtagagctttgaattctaataagttcagtggatcaattccaagttcaattggttacctttctaaccttcgttggttagatctatcggagaaccagctcgaaggatccatcccagtctctaatggaaccactacacctggtcttgatatgctttttggcgcaaagcatttgtatgtcagctgtttttacattttatttatttttgagctttataacttcttttttttttttgttgatgtagatctttacaacttcttgcttacatgaatttgtgctgtttcaaaatcattgaccatctacagtcatcttgggaacaataaactccagggtcgtattcccagtcagctgttcaactcaaatatgactttgcaacatgtgtaagtccctatattctttctctctatttctttaacatccttatttctcttgatgaaagttgtgcagatggttttcctacccatatgtgtagtaaataaaactaccgagtgaatatagtattgagtgatcattgccagtataaatattctgacatttttttgccacttgccaggcttttggacagcaacaagcttactggtgaaattcctgagactattggacttgtccaaactttggaggtgttgtgagtatctacttgcatttgcaagacttagtaatttcataatagatattacctgatttcatgtttctttggacatgatttcaagtaacttatgccatactttgccaacaggcgcctggatagaaacatattaacaggagcagtgcctgtcaacattaccaatctcgtaaatgtcactgacctgtaaggagaacaaaacaaataatccaactcagctttagcttgtttaggagtaatattgttttacatgagaatgtcactctaaagttttcagttgttggcttcttcaggctgttgtccaacaataagctgtctggtcctattcccaacctcagcagcatgaagttccttacttatgtgtaagtaattcattgatttgattactcccatgtagagccaggccaagtagacaatttaaaagtaatatctccaaaaaatgcaatctttcatagccaatcttaatattacacttttttcattattgctaaaataatatcagggatatgagcaacaatagttttgattcatcagctttccctgcatggatttcatcattactctctttgacaacaatgtaagctttctttgacgacatgcaaaacctggaattattttctaagattcataaacaagttacagcattgatagacaatgtatttcatgatatgcttgacagatcaatggaaggcacacaacttcaagggccagttcctgtttctcttttcagcctccccaatttagaaactgtgtgagttctcccattaatcttaagctttctaatatcatgaaagaaagtagtgaattttgaatgaaacaatctcttgttttcaaatttctgtggccagtgcaagaaccatagtgtatattattatatagggtataagataatttatctaacttatggtggtgacagggtactacgagaaaaccagcttacaggagcattgaatctgggagccagctatagtagccggcttacgctagtagatatgcagaataatcaaattagtgaggctccaagagtcatagaaggaaacattactttgatgtaggccacattcctcaaatattgtggccacttctaggaaattatggcttgtagtaatgctgtattttttaactcatttgattttgaatattttttttctacagactcacaaataacccagtttgcccagaaacgggagaggcaaaaagttactgcctggcccatgttcctgatacctcttattcagtgccacctgtaatatgtaaaccaattatctgcagttcaggccaagttttaagccctcactgcagttgcgcttatccgtacaagggaacatttatgtttagaagtgtttccttctcagatttgagaaactcaaactatttaatggatcttcaggagggactcataagtacttttgagtccaataaattgccagtggatacagtatctgtaaatgatcccacaatggactcattggcatatcttaatgtgaccatagaaatcttcccttcaggcgaagatcgctttgatcgaaccggaattactggtatagcatttttgcttagcaaccagatttttaaagctccacagatgtatggaccttatgcttttattggtgatgactatgtcaactatgcaggtactactgaaagatacaagtttccaattgaactaaacaatgatataattattaaattcaatgcttgcactttgactctcattctctctgtgctttaccatgaagtatctcttgaaaaaagcaagtcatcaagcagaggcattattattggggcagcggttggcggttctatccttttgctatgcttggtccttgctggattttatgcattccatcaaaagaaaagagcaaatagagcaattggaaacaatccatttggtgagatcaacatatatttagatttcggcagcttatagttaaagagacggagcatcataagttaactatattgttacaaaaatgcagcacaatgggacacaaacaaaacccggggtgatgttccccagctgaaaggggcacaatggttctcactcgaagagcttaagaaatttaccaacaacttctcaaaattgaatgagattggatctggcggctacggaaaggttaatttactgtctcttaatttctattagttatatgttaactttgatttaatttatgctagccaagctacaagtttttttaaagcagccatttgtcctcaactttacatctctgctatgcaaacaaagtaaaatcactttacatgttggcctgttttctccctctttctcataaacaaactaatttatttgttgttcctatcatcacaggtatataggggaattcttccaacgggtaaattgatggcaattaaaagagctcatagagaatctatgcagggtgtgccagaatttagaactgagattgaacttttatcaagggtacatcacaagaaccttgtcagcctagtgggtttctgttttgatcaaggtgaacaactgctggtctatgagtttgttccaaatggtactttgagggatactctatcaggtacaaacacaaactttgatgtggagttgttcatttttctaagattctcagcttttaatttgtcaagtaatttgttaatctaccataccttccgtgcctgctaaatgagtgaacaaagtcatagcaacatgaaagtaataagaatcgatcaagctgaaatagctgtaacatctgagacattgtaggaatttgctatttatatcctatgagcatgcaaatgagtttttgacttgattttcacaattttttccaacataatatttctttattttgaatattatgttctctatagcctcatggatttttaagtcaaaagtattttgagtatctttccttcttgtatctttgtagagtgtgggtaaacctactgcatttatccttgaataccatataattttcctttatttcccatgaatgtaaaagttctctctcactctctctcctaacatttataaagttgtgcaggaaagtctggagtcaggttagactggataaagagacttgaaatatccctgggtgcagccagaggcattgcctatcttcatgagtatgcaagtcctcccataatacatagggacattaaatcaaccaatattttactagataagcacttaaaagccaaagttgctgattttggtctctccaaaattatgggtgactgcgaaaagagtcacgtcagtactcaagttaaaggaactgtggttagtatgattctctctcattccaaaaattttaattaaacaacaaaatgtggtcaatataacagtaataatctaaattcagtttggttatatgtattttcttctattctgttgaccggtgtgatttgaaatgtgattcactatgagtacttgacttggttttatggatgttagaattttttaactataggacttcaacagaaaatttgcaactgccttggaagaattcgcaaagaaatttcagtaattaatgttttttctacatggggcgtatttatgtactatgtcagcatgaattcacattcgacattgagaattgatctttacatatattgtttggaattggtgtagggatatttggatcctgactattacatgaccaaccagttaactgagaagagtgatgtttatagctttggagtagtcatgttagaaataataacaggacgaagaccaatagagcaagggaaatacatcgtcaaagaggttcgaatgcctatggataagacaaaagatttatacaaccttcatgaaattctagacaaaactattgttgactttggcatagcacttaaaggtttggaaaagtttgtcgacttggcgttgaggtgtgttgaagattcaggagctgaaaggcctacaatgggagaggtagtgaaagagatagagaacatcatgcagctagctggtgtgaaccccagagctgaatcaatagcaacatcagaaacttatgaagatgctagtatgcggtatcatatttacaaccccgagttctttccatatagtggtgactttccacatccaaggtagtagcctccgccagtatagctgcagtcaatgaatgtttaaactagtatcaattgactggttgagggtggcagctactttcattagaaacctttttttcttgtacttatcaggacctgtattgtattatggaaccaaaatatgtaatggaatatttaacaaaagttttaaacttttggtgttattagaaagaaaatttgtagagaaacactgtgtataattacagagaaaagcagataggccataacagtcattacattcaaatttatggccatgttccatggtgtttctgtttaatattcttccctttttttttctcttgaaattccatattgcttcttgatgtctaatattctagatctgtcattgaaagctaaaaaaaccataaccaatcaaatcttagaacttcaagacagaatagtcatacttttgatgcctctatagagcatattgctgtgtatagaaagctactaaacttagctcattggtttctccaacagggctgagaagtaccagtcattcttatccattctgcggtctacattcctgccaacattccatctcaacttattaaacccaacacgttcaattagagggatgtaagtttggttcagctggggcctggtgcagatgaaatgatcaagccagagaagtccccctggccttagtaccctatagatgtcatagaatatgaactctagatgggtgtctggaatccaattactcagaacatgcatggaatgaacaatatccagtgtgttttcaaagaaaggaaaccgatgagagacactgacatggatcggaatcaggcctcttgaagcaatgaagttgttgaaagggccatcaaagttcattgagcttgtgatgacagtcacatctctttctctcattctagctgcaaatgtaccacttccacctccaatgtcaagtcctatccggattgtccctttcggttttattctcagaacttgatcaatcccataactcagtcctccattgtcatggagccagcggctcttctccctaccctgcaaatcaaaagagtcttggctgccataaaacccggacatgttcttccgctgaatgaggcacccataactcttgcaagtataaggatcccaaatgatgctgctgtccggcgggattgaccagaggctgtctggaaatggggttggctccttgtaaccagcaggggacttgggatggcatcttcgtcgaggaagcggctcgcagcccttaagcatgagtgtttgagcaaaaacatcatccacaggacactcccctccaatttcatatgttaagtaccgagccagatcctcttgtaggctcaggcagcctgctccaactgcagagtaaatttcatccaatccagtagtagaagaggatttcccaagtgggagcttgtgtggcccaagagctagcttaagctcattattaccattctgattcatgaactcccatatttcatcactacttgaagcctcattttttctagccaactcaacaagcagtgcctgaacaagtaagttagtggagttaagtttctcgttgagctcaacaaccaaggactgactggtcctatcgagttgttctattgttgaaacatggtcatggaagagtttgttggtgtaaccagaaatggagttcttgacatggagagaaggccctgcgacgatgtaaagggtgagaaggttagtgaaaacgacaacaataagcatctgaaggttgtgctttctgctgctgatatgagtttggtttaaatgctttcttgggtagaaatcttcctcaacaggtgcagctcccatcttttttactcttccttaatgttactataatcactaggctttgggtttttcctctgagtagaatgaaagagtgagtgaacaaagaaagattgcagaagccaacactactaaacagcatagaatcgacatgtaaaggcaattgtaagttgtgttattatatattaacccctcaatgcaatggagaagtcatatataaattaaacgtttgccaaatcttatgatatctgcccaaaaaaaattataataattataataatagaggttcataatatatagaaaaatactaaaattataccaaaaaaaaaaaaaaaaaaaacaaaggctaaaacaatttagcatgaatagtttttcttttacttgaaaaaaaaattaaaaaaaatagatcttcaggctataaatcagccataaacatgtgtagaaagaaccgtgatatacagtccaccaaatatgtatatatattgttattgttcatagagagtgtcattttagcaagagcatgagctatctttctaaaactataattaaattatatctcagcaaaactattagaagtcatcaaaatatcttataaatttactccacaccaagaaccattgcgaagcaacctaacagctttaatagaaactgaatgacttaatcgctaaacagcttttatataaagttaaatatagtacttttgactgtattcctaataaaagtttcctcgttcagtgttactcggcggagtgggcgttgaagaagtacagtgtgagatttaattaatgattctgaagatat

SEQ ID NO: 184753 - DNA, 2096 bp, Cannabis indica
ttttttatatgctgcagatgatacaacacctggcattcaatgcgtataagttccatacaggtttattattaaaaaaaattgactgtcctttgtatgtatcaataatcaactttagtgaatattgcaacaacaaataatgtttaggcccatacatagaaaaagaaaacatacctggtttccgtcgttgttgccttgcaggtttcatggtagtcgagtcccctttattattgctacggttaatgcttaagtttacattgcgcttcaacggtgctttcccagatcctactttctgaatgttttgactgtcaacaagaaccaatttaacagtacgactttcatgacctgaagttctaccctgatttataactgtgttaggagtaggagagctgtgatccccattagtaggtcgttttctcacactcttctttcggtcctttaacagttggtgctccttcattgaaaggaatgtttcagacagtttggtaaaaatcagaatgaattccttattttcattaatggaataaataaataaaaaaaaaagaaagaaaacgggcttaccaaggcttctatgaatatcttaaaccttctaggtttcaagtgaagtttcgatgccttgcagctatacttttccaataaagaccacctgaaccaccaaagtcacaaaatgtattagtaattgtatagaacagtgccccaaataaggagagacaaacatcaggaagcaatattattttctccccaactcataaaaataaagtgtttacaccatgcattccactacaaataaatattaccaacgaagcattgcagcattagtatctttagagtttttggcatcaagatacaatcctgggccaagaagcttgttcattcgtctcacaagacgatagtaataatgtctgacctaaaaacaattaaaatgcaaacaaacaaaagtagaagaatatcaaaatcaaaatattgcaagacagtatgaatacaattagttaagaatccccaaaatatttcataaaattacctgatccttgtttttactttggacacgacaagttatcttttcaaaattctgaaatcagaagaaattacagttagaaactaccatgataaaacatctaataccatgtcaaagcagtcattacatatgaacatgcctttccaacttgtcgtaatgcagtaaagaaattttcctcctcttgacgtgtccacgcagcccattgtcgtgtttgctttttcactgtaattgccaatgatatatcaatcaaaggatgacatttcagcttactcaaaaggaaaatatcattaaaatgtccggactaagaaatcataaaccagaagtcagaacaaattaccaggttgctgaggcacaatgttaattggtgcagaagaggatactcctggttctctttcttgagatgcaatagtgtctgaattgaggtgtgcctcggattgcaagatgacccttgactccatcagaatgtgaataacatgacaaaaactctacatggccatgatctcagattccaagtctcaagtaatgattaagatggtgcaatacaaagtcaattttactctacaaaagaaggaaaataattgtgacatttaatctagtgtaaacaataaaaaatttaacctgaatgaatgcaatacaaagatcagtttcaccaatgacctaaaaattaatatattaccacttgaatttcaaaaggggaataaaagaaaccctaattttaatccttgtttgcccagagcatacatttaatagataaaattcaaattcaattcaacaaagcgaagaaaagaaaagaaattaggcctccttgatcaactatacgaaaaaaaaaaaactcattttaagtagcttagaaaatgcaggaaaactattaaagactagaacattgactcttctacaaattgaaaatttagatccaaaatacaagacaggactaatagttataacttcaactgaataaaacaaaatcaatttttttttaaaaatgaagtccaatatcataaaccccaaaaacataaatttccactatctttaacccctttccccaattttctcagagaagaaacaagaactccgatttcatact

SEQ ID NO: 184754 - DNA, 4005 bp, Cannabis indica
ataaataaatagttgtgatccaaaaatataaggaaaaagcaagaaaatgattttttttggggggaaagacgataacacccttctagatttacttcgtagttgtgagaggaataaaaagaaaacgacaaacgacgtagcagagcagagggcacatatagagatccgaaaaaacaaacgactgttaagcgagccctcctcaacctcactgaattttttcttctacggcggccatggcggaagaccttgtactagatacgccgatcagaaattgggtgttgatcccgctttcggttgtcatggttcttatcggagtcctccgctactttgtttctaagctcatgcgttccttccaagtccccgatccaaaaatcgtcaaagaagggttcgctaacttctaatctacttaatcatatatgcgattgcccttcttacttttttattcattttttgggggtgaatttcaggcaagtcgtcgttagggcacggaatttgcgtgctggtgctaatttcattccggccaaatcgtttcgcgctcgtaggttttacttcagtaatgaggttagtatgtttaacgctctgttagtttttttatactacctatgtggtttgtctggggggtgcgatgtattttgttattcacgatgtaattgctgattaagaaactattatttttgagactgagtaccattaaactaaactatgtataattagggttgagttgcttgatcttttctggttgacttttactaagatagaattggatcgatcgcaattcatgaattgagtttgagttgttctagaagggtgacttaaacattgacatttgttgttaatgaaaatatcctttttatttttggtagattaggatgagttgaatgaaactagatagtcttgctttggcatgctatttcatatgttacaaccctcaatgttttgcaaatttaaatattgaagtttaatatgttggggatcacaggaaaatgggttgttacatgttccgaaaggacagggtcagaacccacaagcgcaaatgtttctgaccctaatactggcaatggacatgatgaagaaaaacctttcaatgattattcctcaggtattgaaaatttctcgtcttatttcactttaattgccttgttgttgcccgtgttaatattgagatatcttgcttcttgatcagactcttacttttgcttgggtcaatttcttcttctctggatttgtagcaggtcagaacctattccttgctttttctttttcatgcgattatcttcttcatttatatgtgtattacactatcatctgctaatgtgatttcaagccactttgattggttatcgccttgttggttcactttttcatactactattctggttattctgatcgttgattttttagttcaaatagttctttgattctgcaatatttctttctatgttcttgcttgttagctagattcaagttatttatttgttgctttatccttagctaaaatatttttgtttgatttgacagccaaaataccatttcccctgactcagaggtttaggtccatgttacagaatgggattgatttgagcactgttgatgtcagctatgtcagtagccgctcatggtacttttaatctttcacgtgttatagttactgaagtactctgttcttttgtctacattatttctgtcttcagagttttagtattgttgatcattcctaattcttcaaaattctttatcaggtacttcctcaatctatttggattaagaggtttatttagtctcattttgggagaagaaaatggttagtgtctaaaggttcctatatgttgatgctttttgcgaacttgcttatgcatgctggttatcctttcaaaaatcagaaacaaaaaaatgtgataaaactataaacttgatatactaatctttgccattttttgttctagccatggatgacacacagcgtatgatgcagatgggaggatttggctttgatccatcaaaggtacaaacataaatggtttaggtttaactatgttcactattaaggatgtctttgaccttttttccttttttaatgaactagtacttagcagctatgtacatgactgtttcttaagtattcatgtttcaagattattttggtcctctgtggttttcataagctataggcaatttaagaaagaaatggaatcatttaactcctatctttctcacagattagccctaccatcaaaaagttgcaaagagtttgaattactacttcatgtttagcaaaacaaaactattagttccgtcaaacacggcaagattactaacatatgagtgttcaatttgtttttttttttcttctacttcagaatttaggtgctgagaaggacaaccttgacataatgcagcatgattgggccatgcccaagtttgagcagcgtgctgaagcagtattgagaaaactagtccactgaaatatcaaactagtacccttttaaagaaaaagaaaagaaaaggaaatatcaacctagtgaacagtttgatggtcatgtgaacatgcttccttaatctttttgctcaatttctttgtacctcttctattaggaacacttaaaatacattactgtagtctttttgctcataagtttattctaattattcaaaagaatttgaaatagctgattctagttattttgaacaattttttaactcagttcaattactttagatgttgtctcgttttgagcatcctgggctccgaaaagaaaggggagatgtcatggagtatactacacctttgagtaaccgttattcttaatccttttttgtggaccagtaattgttgcagagtagggtacacattatgaatttttttgattatgaatttaaggaagaaacatttcatttgaatgtacaagttacactgctaaccccattttgacttttgtgccggctaaaccagtgccataattataagaatgcattcagagtaaaataacctgaaatctgtgtgtgtgtgtgtttaattattattggtagagcagaggaatatgataatgttgtgcacttttgaagattcaatagaggctggctactttaaaggattcaagcaggcttcttgtttatgggatccttcgaatgacaatgtctctgtcgatcaaaggcccacctcataaacaatagcttttctctgttgcttgtaccaaagttcataaacagtagctcttttaacataataaaaataattgtactatagatgaaaaagaaaagaaaagaagaaagtaacgcctagccaaacaaggaaaaaagatggggaaagaagtaaaggtcccttccattctgtccccatccccattcataacacaaattaataaagaaagataaaaaaaagtatgattacgagtcgaccttatgtttaatgaactggacttggtaactaaagcatcataataattattaatttatttaattttttttaaaaagggcactggaccacagttaaagggttattatgaaataacacttggcgaatatttaatatctgagaatgttatatatcttgaaaagctagctctcattcattatttattgcatatccaaacttaaaaattaaaaattgacgtgctaaaagctagtaagcgacctacctggctaccttaccttcaacagatcacattatataatatattaaaaaggttccagtatactcaaattactaatataccaaacaatacttaaatattatctggagatatttttaatatgacattccatcaatcccaaaatatttaagttgacatatttgtatacggtcaaagattaaacaaaccaatgaattatttagctagaggcgtgttaatttttaattgttcaataataatgataaaccattgtttattaagtgagtcatcaaggtttcttaaagcctaattaaaaaaactaacggtaagggaacatacagtatgtgccaaaattacgatgaattgtaataattttcattattatcaatccactaaagt

SEQ ID NO: 184755 - DNA, 2952 bp, Cannabis indica
tgaagcgtagatggaaaagtaaccatttgtttcttcttccatgctttgttttgctttggttattcaacgttcacctcccatcacatgctgcagacactctcacagctggtgaaatcatgagagactggcaattcttggagtctccaaacaaaatatttcgtttactgttctttgttcctactttatcaaataagcgttatttgggtattcagcacatgttgtacccttttgatgcgaagtttgtttgggtcgccaaccgagaaaaacccttgatggatacctctggatatgtaaatataaatatagaagggaacttggtgatgaatagcaacaacacaacttccttcattataaactctagcaaaccagccaccagttcttctaatacgagtctcaaactactcgactctggaaacttggttctgaaagcaggagaagaaatcgtgtggcaaagtttcgattatccatcggatacgattctaccaggaatgaaatttggcctttttgatttgaagcttaaggagcctagaaacataagcttcaattcatggcaaggcatagggtctccatatggaggagccttcactcttggtgtcgatccaaacaacactcaacaacttatgatatggcaaagagggcttccctactggcgcagcggaaactggaatgggaagaattttagctacttccccaattcgtattatgatgacaccaataacatctttaagtttgactatatttcgaatgaaaaggagagctactttacctatactactctgactccatataacaattcatatattgaaatgaattctactgggggcgtttctttctatattgctaaacctgatgctgcgtcaattagctatggttcagcatgtaatgacatgtctttcggttccaaaggatgtataaagcaaaatcatacggcatgtagcagtggcgaagattatttttatatgcctaggtctgggcatatggactcgtgggactatccggaagatttcagtctcctgggtcttgacgactgtagagcgatatgcagtaagaactgtaaatgtacagcctatatgtctgcaacacccgatggaacaggttgttcattttcttatggaaaatacgtagctgaatcattctgggaaactttttacgttcgggatagcgcctatgacgcagtagatgatacaaccaaaaatgccaccagagttgcaccaaagaagtcagaaaagaaattcaaaagaaacacccctgctcctatcctcaaaggtaaaatgtacatagtaaatatatacagagttatatacacatattgtcatggaccatgtaagcaagattcaacggattatgacagaataatgaaggttataatttgttattaaacaactaataagattcaacattcattttgtaccattacttttgttcggcatgtagttttactactttagaaacttctctagttattacagtactattcctggcatccatgacatttttttttttcttttgcatggttataggtggaactccaagaaagaggaagaacaaaaatatgattgtaatccctttggtttccatagctgttcttacactggcctgttcagtaggctatataatatggaaaaagttctattccaaaggtatttatcatcctatacccctaatcttggtgttcgatgaataacagaataattgagcaacaaattcaagcgcttcttttatctattgaatatataagcagggaaaggaggaagtaatggaaagcaagtgtgcggagacacagagaaatatatacatgaattaggaactagtatggcagccattgataaaggtgatggacaaaatttattacatggaaagatcgatcccgatttacctttgttcagtttttgtacaatagaaacagctacagacttcttttctgaggcaaatagacttggtcaaggtggttttgggcctgtctataaggtaaaacaaaatctcatgtgtcatttatcaaataggacaccaacagttttctttatatgttttgttctatttttgctctttgaaaaataaagtaaaatgattgggtgaatactttagggggtgttggataatggtcaagaaattgcagtgaaaagactctcagtaggttctggacaaggacaagaagaattcaaaacggaagttgtgttgatctcaaaagtacaacacaggaatctagttcgattgttgggttgttgcattaaaggagtagagaagatacttatttatgagtatttgcccaacaaaagtttggatactttcatttttggttagttttacctaacatttcttgtatctttgagttctttatgatcttttgtaattgtaaggtcatgtttcactgtttcaatttttcatttgaattgtttttagtttacttaactcatacttttttgacagatgaaactaaacgaatcttactcaattggagaatgcgtgtcaatatcatcgaaggaattgctcaaggacttctatatctccacaaatattctagactgaaaattatccatagagatttaaaatgcagcaatatattgttggacaatgacatgagtccaaaaatatcagattttggaacagcaaaaacatttggagacaatgaatctggagcaaacacatgtcgaattgttggaacatagtaagcaaagcaatttaatttattctttgtgtttctatttttcaattaacgactctttaactaattgctctataaatgaaacatcacttgcatttgtgaactaaacgcagcggttatatgtctcctgagtatgccatggacggtcttttttctgtgaaatctgatgttttcagctttggagtaatgatgctagaaatcattagtggaaagaaatgtttaggcttgtatcatccaaaccaatcaataaacctagtaggatatgtaagtgcttgaatatcttagttttt

SEQ ID NO: 184756 - DNA, 3462 bp, Cannabis indica
aataaataataaaaaaaagatacaaatattatctaaatactttatctatcttaatttgaatttatgtaaaactaacaagacataatagaaatccaaaaagttatccaatcaaattggtaagctttcttagatcagattccacaaaatgacaaaatatctatacagaagaatagaaaattcggattttttcagtaattagctttaccttgttctccattgagcaaagagcaaatttccaacccacattatgattaagattgcacaaaagagcatcaatccactcactcttccccgaattagggacaccagttacaatagttaattcacctggcacgacctaattaaaattaaaaaacaaataagaatgagaataacagcatttcaacatagtattttagatgtaggaataatagtaattaaaccactccacttcgtgtttttgtgcattgtaataaaagttcactactaaccaaaataaggccacctgcatctctcagtcttttcctcaccagctgaattctcatattttagtatcctctaattcaattcactttcgatttcttcttttcttccttcccacctttctattttcctaaaggtatttgagttcgttttcagaaaaaaatagtttgggcaatgacaacaaattctaacataaattatcaatgagtgtgaatgaaaagttatagtttcatatttaaattatttaccaaaagaaatatttccttaggaataggtgtgtaattttataagtgagatattcaagaaagaactagatactgcttcccactcacttaccaaacaaatgacagtgctagtaatgggtattaattaatgtagaaataatgtgcacctaaagcagctgaaggtattttctagcattttttttcttttcaactgtagacaagatagccaatatgcttacattgtataactcgttcagagacttccatccagttgaggcaccaaacccatatccagcagtgccataataatatgcatctatttcatcgaagtaatcactgaacttgaacagcccacgtatggggtataattcagcattctcaataacttctttcagtacatcagcacccatatacatgagtacctgtaaaagcattttgtacataattgtaaggttcacttcggagagacagtaaatcccaataaaaataaaataaaataactcttcagaaaatggccacaaagttttttttttcttgattaacgaaaaaaaatgcatttactttgtaaatacaactttctcaaatatgcaacataaaatagtcagtattttcatatattaaataaaaggtgttcattagtaaacatatttgttatcagttgaagtcagttttcgaagaaaatttgtttcctttgattcgtaatgcacaatattattattaactgcctcaactgaaaaagtattattaataaatgcttacacagtaaaaattataggagcaaaatatttgcagttgataagtaataagtaaagcctgactagttgactgacctcatttgcatctttaaaataggtatcgtcagttttctttggccacttgactcgccaacatctgcaacatcagttaagtcattcatactagcaccagctaaaaattgtttcaacacagaacaacactacactatcaacgaacctctctcgtccaagccgacgcgctagctcttcggccaaggcttggccaggtgtatctccatcagtagcaagtataatgcgtgatgcctaacataattggcaaatttagtaaaaacctgacaactccaatagtatcgtgagtatcgtgtcttatgcacaagaataatttacgaaccttctttaagtactctttacagttccacaagtacgaatactttgtgtcctagctttacagaaaacagatagaaaaaaaaaaacatcagagccattctgatgaacaagacaagaaaaaataacaaagaaaataaacaagaactatggtaagtagaaactagacaagatcagatggcaatgataaaatgcaaatgatgttgtgagtgttatagccaatggtccttaagtacgaaattcatatcagatacataaaatactttgagggcggaaaagaagacagctacgtgtcaaagggtgtgttcgcacttattagagtatcgaaatacatatcccttgcttatgtttcagttaaagttttagaagcagatgaggatatgcaaagttacaaacctcgacttcgaaaggaaaaaaaaaagaaaaaaaacatatccccaaaattaagtgatcaataacacagacatagacccatgaattcagaaagcaatgaaaaacaattaggaacataaaaagtaagcaaagtacagaaggatcgtgtatatatatatacacacaaatatatatcttcttggaccaagatttgcaaattcacatcaattggagagtaagaaaagggaaaatagttaagacagtattgttgaaggaaagagcttcaattactttagacaagcctttagggaacaaatgaaaatttgtgaataaaaactcttttttgctgttcccaaagaacaagcgccagaaattgtcaactgctaaaaatttgagagggtaaaaagcaaagaacttaggtgttgtatggtttcattgtaatgtaatggtaatgagaataataatagtaatagaaatgatattgcaatgtttggtttatttttggaatgacattggaaacttgtttagaaaacaatgccatgtaccgttgcttgatctcatagcagagatctaattataaaaacagtttgttcagtttcaataagtaaacctttacacacacgcacacacaaaagaaaaatagtaacagagacattaataatagatagttttcatggatttaggtttaggatttagtattaatgaaatctttattttttcttataattatccctttttgtaatttgtggatttaattccatttgcaatgaaaagatggttctttgtttgagacattaacaatagatgaagaataccaaagtataaaggtaggcattcctcattgtcaattaatacagaatcatagacaaatcctctaataatgaataatgacacaaacctgttcttcaggtggcaagtcctttgtggaagccgaaggaggtgcaccatcagggacactaacacaattccgaaatccagcttcttccattgcaagcttatccatttcaccctcaacctgtaataaatttggaacaagcatcaggtagtgtaatgatttgggggacatccgttaccagcaatggtggaagacgtacaataataatatcattaatatcctttatatcatccaggccatagaaaatcttctcagtatccgcttcctggaaaagagaacaagaaaaagataacatgtgaaatgtaaatatagcaagaaatcaattgaacatgataaaaaaaaaaatcaagtgaacacgatatatatatta

SEQ ID NO: 184757 - DNA, 3242 bp, Cannabis indica
atgttagatttgagaaacaacaataataataaaatagacagaccatggagcgccacttataagacccgcacgatctgtacggcagctcatttgtgtttttggggcactatcattatacgccccacccacagtgagaaggtgagcgtaaatccatacaatcaccactgtaaataggacagcaaaacggtcaaagatatgtttccctgagtggaagaggtgcggcaaatactgcaaaacaaagaagaaaaacaatgtcagcattttattttaaaggagccggtaaatacaagcaaaagcagcaaatcaaaacaattcatagaaattactgtaactaaatctcgtgaaaagacacttccaggaacttacctgtgaaacgaacactaagagaacaagctgtggaagtccaatctctacacatttagcaacctaaacatccaagagaagcatttagattagaaacaatcattacaatgagattcagtaaatgcaatgtgcattagagggaaagtacacataccccaggaaaacccaactcatagagaccaaaaccagctagagctaccaaaggaacagctgaaagtggacttaagaacctgaagagtggggaaaatgtttcaccttgattaaattattttctgacaatctgttctgaagaaaacagtgaaagcatattgaaagtctagccaacttcgttatgaaaatgagaccgttcctctttacaatttaattcttaaatagataaccttgtaacattgcgccaaaggccactgaagcctaaaacaatctgaagagttgaagcaacaataagagacccctgaattgcccgcattgtcctcttaaatttctgagacaatataagaatatttacatggtgagaagtaaacttaagaatttcacaaaattaatgtgtgtttgagtgcattcatcaatcttaattttggagttttcataggtaattaagaaatcttttttatttccttttggcttccgctatgtatccccaccgcgtgaactatatgatgcactggttctgataaaaacaaagtcaagtttatacatgcagtctcctaaaaactacatccttttgtaaggtgagaaccattgctaaacctatgattgaatctagccatcaaatccattgtacatgtattgaattagtagttaacaaacagctcaatgttaaagtatcaaccaagtttaaggtgctcagattaaaaagaaaaaaaaaaacctcttcaggatcagaagaatcactgaatcgtccggcaaggataattgaaattgtggtggggacaaacgaatacgatgctccaatgacagcaggtaatcgagttccgaacaatgattgtagcaatgtattcaaaccagcaacaaagagtagggtctggatcaccttagccttctcgtcctacaagatgatatttacaacgtcattatacaaagaaacaacttttacaaatcaaaatctaccaacaaagttaaatatctttcttagaacttacatttccaccacccatctggggaacaagagcagttggaatgagaaccgtagtgccaagcatcacaagataatgctgaaaaccaaggagaatggcctcggctgtgcatcagacatggtccacatttttataagtaacatttatatctgctgaaattactgatactcatataatttcaaagatggcaaattatcaaaaaccagaaatctcaatcctaaaacatttcaactcaaaagttaaaacttactaaattatcatgatgataaaatatgttccagcacccaatcccaggggatatgttacaattattatggagaataatatttaaaaagcaacttacaaaaagatattttttgctgcgagtagcagacaaataaacttaaattggggtcaaccaaacttatatgcatattctccataacaactaaaaacaacaagatctcagttcctcaaatttacaaggtaggaacaaataataataaataaaatttaaaaggactaattaattagttgaagataattgtactaattttaaacactaatcctcttaagaaaacaaaattaaactacaattcccacttctttttttgttcttgttaaagtcaacaagaaaaaaatattccttccttataaaactagatttctcttccttttttattttatttttctttcaatgatttccatatttgctgtacaaacttatcagtatttcagcttaattactttttctcaaaagatagaattactttttaaaaagtagcttctcaggccaagataaagaaggaactaagaaaagctactttcaacaattatgtagtacaaagaaaagaaaaaacccaccaaaagaacctacttgaaatataccccaaaagatccagaagaatcaaagtaataattaagaaccaccattaattaatctaacaccatcttagcaaatgaacgagatttcttttctactaacagaaagaaaaaggaacaagattcagaataacaaatcaaagaaaaaaaaaaaggtggttagagtgtacttacgccatggaggaggactggtaatgcagtaagagatatttggtagctgatccttaggtggatgtggttgtggctcatctgcttttggtgcagcaccgcctgccattgttactctacaactttctctctctgaaactttctctctctatctaaccaaaagaaccacaaatgaaactcaaataaccaaaacccagatcccaaatctggcaaaacccaactaaaatgagcagaaaacagagatatattgagataatatgtatgacccagaagattgaaaccagtcacatgtgtaaccactacagcaaaaataatagaagatgggaactgtgtaactaaacgaaagctacacccaaaataaaaaataaaaaacaagaaagcagaggaaaatgatagtgtaagtagagggtttgatatagtgagaagaaataatgtcgtttaataattgctaacaaagaataaataaggaaagttaaagagagaaatgataataataattaaaaaaaaaagtacctttttaactatatattgtgaggaagcaaactcaagtggtaagcttaaatccaaaaaccaacataccccacacctaaaaaattatatgttttctttctttttaaaactttaaaagtgaaaatatatgtatcaaaaaggagatatggatatggtgaagaaaacccagatgggttttttcctctttttttatccttctcttctcag

SEQ ID NO: 184758 - DNA, 2682 bp, Cannabis indica
aagtacacttcagtgaaatctccaaaataaaaatattgtcgttccatcagaaaacatcaaaaggtctctcctttaaaaaagttttctttataattaatagaaaaaatctggagcagcaaataaatttccattgattgaactgggctaaagataggacacgtggcaattcatttgattgccgcgtcttactattcatcgatttatttatttatgttatgatattgtcaaaggttataaagtagacaattttgccttgaagtatgcaagccacccatttttttttattatttaaaaatataattttcttctactttcaaatttctagatctaaatctaatcaacagtaaacatttttatataaaatcattgtgaaaatatcagtgaactaaatttgaaacatatttccccaaaataaatgggatagttttctttaaaaaaatatattttaccccatatcattcataattatttgaattgaaatcatttacccaacaaattctgtaatttaaatctgtaactattttttctattgtttacaccaaaacaacctacgtgacacgtgtccttcaataactatgagtaagggagtttactttttttttaaaaaaatatctaacataacattctttttcaatttattactcccagttccatttgttttgttttacgtggtgtgaccaatcaaaacgaagcgtttcatgttataacctaagggcattgccgtcctttgatctgaacccctctagtcatcttcaaatctatctatctctatatataataagaacgacaaaaaaccatactccccattcctaaagatattttccttcttcttcttcaaatggttatggtgatgaagaacaggaatattctatcggaaaagccatggtttttcgggttgagtctggcttgtttaatcgccggagcgctgctaatcacaacgttcttgaaagcggacgaggggtcgcggctctgttctctaacggggactcgaatcaagtctgtggtggcggagaacgagtatgttccgacggatattcagcttaaggctattatccactacgccacgtcgaagattgtgcctcagcaatcaatcggagaaataaccgtctcattcgacgtcctccagtcacgggggcctagtaacttcctggtttttgggctgggccacgattcactaatgtgggcttccctcaatccacgtggcaacactctatttctcgaagaggaccctaagtgggtccagaccgttctccagaaagcccctcaactccgggcccactacgtcaagtaccgtactcagctccgggaagccgacgatctactcgccacgtataagtccgagccgcgatgttggccggctaaggcggcgccgctcaaaggaaacgaacggtgtcgtttggccttggagaatttgccggctgaggtgtacgagagggaatgggatctgatcatggtcgacgcgccacgtggctattttcccgaggctcccggtcgtatggcagctattttctcggcagcggttatggctagaaacaggaaaggatccggtgtgacgcacgtgttcctccacgatgttgatcggaaggtggagaagactttcgccgaggagtttctctgccgaaaatacctcgtcaaggccgtcggaaggctctggcattttgagattccggccgttaacgtgagccaggctgcggataccggtgctcgtttttgctaaagtgcaccgattgcgaatacagaaattgcgtgagtttattttattttattttgtttttagttttttttttcttataattctcattttcacgattttattttattactctaatgtgcgccttgggcctatagagcaaagacggtacttatatttaaattgcggaagttaaatttttacaatgtatatggtagaaagaaagaataatagaaatatagaagctaaagctttagcttcatgattagtaattgactatttatttaatatccaatgattgtttttgagtgttatacaatgggattggcttgattagttaattagtattaattaattaattaatgtagctgaaagagttacttttattaatggaggagaatactgtagtctgtagatgtggaaaaattagtcgaaatatgatctgattggaatgaaagaatttcttgccgcactcatttgactacaatgacttagagtagaaaaaatagccaaaagtattggaacatttagtgaattagcctaattcatggatccactaccacattgcatctattacgaatttgaatgagtatttttaagtcaatgaatcggaactagtcttctgtgtcatatatttattcttaaaccccatttgcaatcattattagatatataagaagtagttataggagtgttttaatagatctacagaattacaaagaaacaaattcgagttttctcctatacaaaagaaaagttcgaatttgtgagtttattagtcaatggtaaatgatatgtgaatacaatgaaatccattcaaacatatcaatactatttgagttgttgatccacttatgtgtaatatttcatgtctatgaatgtgctattttattacattttttagtagagaagaaatattagtgggaaaaaaaaaatgtaggagagagaagagaaaagaaagaagaaaaaaaaaatgaattgtttggtatgag

SEQ ID NO: 184759 - DNA, 5763 bp, Cannabis indica
gtgggaacgataagctctagctacgttagttgctaaaccatttactataatcttcaagatgtcaaaaaattcccatcgtctttgagaaaatggggttcactcaggtgaaaaccagccaaccaccatagtaagagaatgtcaactccagttgctggagggggtcagagggagagtaaccaaagtgtggaccagcacgcaaatacttaaattgggcccaaagcaatacatgactcgataatggcattggtgggtaaccctatcgatagaagtattcaactatcgagaaggccatgtccgacgcggtgccttccaccaattgtgccaccaaacctcgacacttcaaggaataggcctagaaaggaaaagcgagtgtactcagtgagttcaagctcccatgcttactactacaaggaggaaataagcgacctccgctggaagaacaagaggttagaaactagtgttgcttgtgtgcaaaacatgttgagtggcatactcaaaggccaaacccaagcttgacaccttcatcacaaaagccaccgagtgggaagaaagatctcaattatgtatgctggtaaaggtgattccatgtcatccactaatagcaccacatgagatgaacatggaaggagtctattgtcagacaaaagctcagcaggccaagtgagacgactcaaaccaacccaccatggggggagttttgctataggaagcaccccatagcctaaggaagagacttcacccaagtggtctcatgctagggggcacttcacctatggctccccaccaagtgcaagataagcagaagtccttatctgtcaactttagtggtaagttacacattgtccagacaagaggagtaccctccacgagccctgtgcaaaccacatgaaagacccaagttccactcgctaactttcgagaaaggatgagcaaaaggatgaaggagttggaggcaaaagtgcaagacctacatcaaaagataactatcactataaagggggccttgagtgatgacgaggagtttgatgaagaatctccgctctcaagggagatttaaatgaaaccactcccaaacatctgaatgaaacaatgatttttttagagagtgaaggttgtaagattttgactttaagtattcttctattaagattttaaaataccatttcgagttcttgttatttcgttgacaagttcttaccgtcaagaatttggcatcgtctgtgggaacaacaagctctagctacatcagttcctaaaccattcactataatcttcaagatgtcaagaaattcctcgtctccgagaaaatagggttcactcaagtgaaaaccagccgaccaccatagtaagagaactttaacctctagttgtcggagggggacagagggagagtaaccaaagtgtggaccaccacaaactactaaaaaagggcctagagcaatatgtgactcgatttaatggcattggtgggtaaccctaccgatagaagtattcaactatcaagaaggccatctccggtgcgatgccttccacaatttataccaccaaaccctaacacttcaaggaatgggcctagaaacgaaaagagagagtactcggtgagttcaagctcataggcttactgctacaaggagaaaataagcaacctcagctggaagaacaagaggttagaaactagtgttactggtatgcataaagtgttgagtggcatactcaaaggcaaagcccaagcctcacaccttcgtcacaaaagccaccgaactgggaaatcaagaatctcaactactgtatgctagtaaaaggtgattccatgttagccactaacagcaccacaggagatgaacacggaaggagtctattacgagacaaaagcttaacatgccaagtgagacaactcaagcctacccaccatggggggatttcgctgagggaaacaccccatagcctaagtaagagacttcacccaagtggtctcgtgctagggggcacttcacctatgactccccaccaagtgcaagataagcagaaggccttatctgacagctttagtggtaagttacacattgttcggacaagaggagtaccctccacgagccatgtgcaaaccacacgaaagacccaagttccactcgctaaatcttgagaaagaatgagcaaaaggatgaaggagttggaggcaaaaatgcaagacctacatcaaaagatagctatcactacgaagggggacttgaatgatgctgaggagtttgatgaagaatcccctctctcgagggagattcaaatggaaccactcccactaaacatcaaagagccacagatgacactatatgatggtctcactgacccaaagtaccatctcaacacgtttgatgagctaatgaagaagaaaaaggtgcctagtaaggcaatgtgtcaatgtttcaagatcatcaagactatcagttgactagagatagggaaagaagagatatcaaaccaccaaacaagttcggatatgttgacttaattttctttgctctaaatatatcagaacttgatagtgaggaacttggttcctataaagaaaccttgatgtccatttacaagttggaatgggattcagctatgcagcaagaaacggtgtcttggaatgtgtaccaatccacttaagtgtattttttgttattgagttgtaaatacaactgacttaactattttctcgacagttaagagagtcagtactctagtgttagttagctataaatactagcctctaattcattgtacagagagagtgaaatacttagattgtaaagcattacacaattaataaaacagaggaatttcagtaacttagtgtgtgtggttgtgccttggttctgtggaatattttagagtgtgttctttggaaatctctgttgtgtgagatcataggcaattcctaacataatatttgtttaaatattttatagagaagaataatgacaattattatctcaaacagtcttggtatgttttgatatacttgcttgaagaattcgttttccaaaccatttaattgacaaactctacatgtgacagagtttttccttcatgaagttgaattgcagtgtcaccaacaacctgcaattgtagaatttgcgaaaaatactacaaatcagataaggaaatttaatttgggaagaaaaaaaaatcaataagaagcactgtaattaatttcacataaaatcagcatctctagcatatagttcatgccaaacaaattgatagggaattgcaaagagcgaactaaaagttcattagctaataaagtttatacatgcaaattgcatttacccatttttctcttgcattttatttcaagggcaagaatgaaattttgggttgtgtgcaacagtgaaaaggcattgcctcatttaagcacatgcattcataatggttgaagaggatttaacaaaaacgacatttatggaactcagtaatttcatcaaatatcataaacaaagttgatgacactaacaagtagcttaaattgtgaaaaattggaaattgttttgaaaagagataatataaagagtaatgcaaatgaacatacatactataaattctattcagtgtccactctcactgatccatttagtagactttcaaccagataaagaagcagatattagattgaccataactttaaaagcatgattgatttgccaaagtacataccttggccatggctctataagaatactctgtgacacctgccacatgaggtgtgattagaacattattgaacttcaaaattggatcgttgggattaaatggctcggtccaagcaacatcaatacccaagcctcccagatggttggatttgaggccgtgataaacggcttcatagtccaagagtccccctcgggcaatattaaccaaatgaccaccctacacaccatagattgtaagcatataggaatgtacagactacagaagaaacagatagacctcagctaaaaccatgattgacttgttagttccatttgacaatagcagcctcacaaataataacatcactttcttatgaatataggcatcagcaattaattctatgtttttcattacaaacatcttacgatagattttgaattatcttttctttttctttttcgataaatacatgaagtagtgcaatactatactgcctgtaatttgaaaacagaaaagctttcacttcgccaatcacataaaattattcctattatttctgttgggattatttcccaagaatacatatatatcgtctatgataacaataataattaaaactattctagtgtttgaacaaacctttttcattgaagaaataaatgacttgtttacaatgtgcacctgaaaaaacaaagtatgcaaacagtaaacattaagaaactaagcttagaaattatgtttctgcaaataactaatcaacaagaacaagaccacgacatagagcagacttggggcgacaacttagcctgaatccattggtattaacattcaggaataaatatatcgaacaccagtagaatgactaaaataaatataatatgttgacctttattttcttttttggaatattcatcatcttcaacatatcatgctcagaaagaaagttatatcacattcttttgcctgaatgtttaccgttatacaattcaatattctcaaggacaaacttatatgtgccttgcttttgtttttacctttaggaatatttggtagctttattgatcaaatctacatatcatgcttgaaatacagttatatcagctattgagggatatcttatacaaatgcaagatcgtcttactgtttccttgttcaacaacaaacagcaaacaacaatatccgccttgctcgcaaacttgtagatatcttcatgacttcccttctcatcaaccaaatcatcactgccatagattgaacctggaaatgaagaagttacatcataagttgtaacaactaagtgtgtttctcaatagaaagttctccatgcataccattagattccaaagaatgtgaagtccagctcctttttgtagcaataattttcacaccaaatggtctcaagcgctttgccaagtcaattccaatattgccgaatcctaatatgaatacctgcatgatcaagaactttctaaactatcacattgtaaatgtcataacaccattattgtaatcggagtaagcataattactattctctggtaaattagatgtcaaatattttcaagttactaaaagtaaaagaaaaagttctcttttacttgagaaggatagtaagttagtaacaactagttggtccctattcctgctttctattagttagtttaaagaaatggattcttcatctggaatgtttggtttatcatacagatcacatctaaaatacatgctctagtaataaaagataacaattcaacagtaaagctaaaacgcagaagaaaggataagatatctggtgtgagaagaaccagaaaatagtgacaaaaattagttaaaatatcatgccattgcctcagccacaactgaactgatctggcttcagtctctgttcaaagaagttggattcccttgctccacatgccctgtcttatggtgtgacaatcttggcgctacatccttagccacgaatcttgtcttccacgaaagaactaagcacattgaagttgatctccacttcatcagagaacagaattctatccaatcagctcgacatcagacatggcagttcagaacaccagatagttgatatac

SEQ ID NO: 184760 - DNA, 5744 bp, Cannabis indica
ttttttttttttgagaaaattatactgttttttttttgttacaaagttaaaaggaatgattttatggtggtatgaaatttgagtggaaaggttcttaatggcgtaacggagattatcaaaggaaattgtgtatatagggttgataaatttgtgagtaatagatagtgcggtcgattgattttgatactttaagagatgtaatattgaattgctctttttgagaactttcatttattgtcataagcgggtgttataatatctaggccaatgagggttgtagccatggaattggatgaaatatatttcgaatggcttgaaaagtttgtgcttttcactgtttcttggctttttagattgagattttgcacttgttttcataaatgatcgtttacattctttactgaactgatacgaaaacgattacttatgttgttgtgaagaactattatggcatatttgaatacgtgatgttttagggtatatctgtcttcacctaaatcctctggatctgaggaactagctgctagagatcaggtgtctggtctatctctgttttcaaatcctgagctggagactaaatcttgtcttgttgttgacactgttagaggccctactgtaccaaatcatgctctcaaggcatttaagcttttaagtaccagcactgaagcacaggtaatgaatgaccaactttcttctcgtacatacaatctcactatcatgaagataaaatattagagatctttgtaatatttaattaatctctgttttagactctacctagacactgactaattttcctcttttgggttccatatttagaatgttgtagcctccattgcctgtgaccccaatgtctggaatgctgttttgcaaaatcctgtgcttaaagatttcatggaatcaaaccaatccagtaagattcctataattatctattatgttgaacagaaattgttgaattttctctgctgcttgttgcatggattttttacttgaagtgctctgttgcagttgctgactttcaagagccagtttttggtgagagttgtgaggtttcctctcctgggagccaggaagctaaggatggaaattggtttttggacgcactgaagaacgtaaagcttagtgtgactgagatggttagcagcctttccggttattttcaaagcatatttggaccttcttcagatgctaagggagacgccaaagcaacttttgttgatatgagccttggagcatccttcatgggattggcgacccttgctgttatggtgattatgctcagacgtatttagtgctgctggatctgttcttttctaaaacttgtcgagtttacctatatataagtggttgtttttctaagaagggatttttaccttgatatttggaaacgtacctttcagcttttgaagaaatgtaaagctctgatgatgtctgtccagaaattagtttactatagcaatcagctcttttgcttgtattgaatgactggtatgagacacttgaatagtacctagtatgcttgcttatatacagaaaatactgattcctgtttgtggaagtacacgtgtgatttttaaaatgattgagtacttcaattatataattattctaaaatggaattgaatgtatcagttgttcatatataaatatacatatatatatatatattaaataactagaaaggcacattgaaccacttcaaattaatccaatgatgaggaactttcttagatatggcactaatgctaaagagttcgattaggtatgtttcttagccttttactataaaattacaaatgtacatttttttttgggataacatcaactaaaattatgcagcagtgactggtagagcaattcaataacgaggtctgtagttttcaatttcattaggtgaaactgaaagttattagggcaaatatatagtgaaagttttaaggccttttgttacgtacgagaacatcaaaaatcttagaagttcagtttattggtgcaagtttttaagatatctaatgtattgttaggaattcaaaattcttaaggttggcatatagatttgcagagaggatttaagagttttgattcgattgagtgtgagatttttgaagtttagagatctttttttaatgtattatgtcatgagtgttggaggttttatggccttcatttgaaatcatatatttggaacaaattgatttttctaatagagttcttttctttactttcaatacccaacaaaaaaaaaagctggattttactgactattatctttcctgcatgtcaatccattggtgaggcttggattagaagacttacgtgtcgaagagtaaagatacgctaacatgtaaccaaggttgcaatcctcttcattatcatattgattaaaatttaacaataatcctccacttattttcgctgcaatctactttaaaaccaacataatttgtaatatgtaattgcattaaatctatagatctaaaactcatttttgctagtcacaattacatattattggcatataagaatggacaacgtatgagttgcatcagatagtacagagaaattattgccttgcctaaacttctcattttgtttattattttcaatgaattttctctttcaactcgttctttaaaatttttgtaaacaaagaattaatcacatgatcaggtgactcaaatctccttccgaactgagcagccttttgaaccaataaacagaatgttttggaatcctggttagattgttcttgtaatccacataatagagcccgaatcggactgtgtatcccaagttccactcccagttgtcaagtagtgaccaaacaaagtatcctcgaatatcacaatcatcttgcctgttataaattcagtttaagcataagaaatgttaaatagtaagctatggactgagagtagttggatttgtcatgatcaccttatagcagcagataagtttgaaagataatctctgtgaaatgtgatcctcttttcatctttcaatgccttgtctattgaaatgaaatgtttatttggatcatccatacctgttatgaattttaacattatggggttcttataaagagatttatagaataagagttggacatgctaaaagaacttataaatcaaggacattgtaaagggttcttattagttgtggtttcaaaactttacttgtgaaagaattagtggagaaaaacttaatgaagattataacttataaacctagtttaaatgttgtgttgaacttcctgaaactaaaactacttaccattctctgtgattatcactggagggtttccatacttgtctttcacatatcttgtcagcttcctgatcccccatggcactatgcgtaaccatcgtgaagcggcctaaaggaggaacaactcagcccactgagattaaaatctcttaagtgatgatcgatatctaatacttactcagtggttttgatcacatactttttctccaatagcaattccttttcggtatgctgaagcagaaaattttagtaacaatcagtactggtcatatagattatttctaaggtgtagggaatatgtaattggaacatgaacaacttacgcgttgttatgacagcaacatctgataaagcatcctgcaatatgaacttccggattctagccctatcatttcgagcatacaatgtggtgtagtgatttatgccaacaaaatctaatgatccaacaaggagttttgaggttgcttgtgaaatttttggtagcctctcccccacaaatttcttcattgaaggaggataatcaccaaggaggagtggatcaagaaacctgattcccacaattttgtaaagcttgataagtttttattacaccataatgtcgttaaatctttcaactttcaagaaaaaacttgaaaattaatggagttaagttataccatccaagtgcaaaatccattgcacgatttgctgcatcaatgtcctcttcagtgtctgataagggttcgtgccacttggcatccaagactattcctatttgacctccttgttccttctgtttgacagagttagatcaaagatagttaagataaagtttatatatttcttacttatgtcttcttcaaatgttagaaaaatcataccttgaaagttctttgataggtatgataagcagcagcatgagagagaaggatattgtgagccacaatgtaaggttcagtagatgaatttcccttcttacagaacaaatgaccaacaatagaacacctgccaggggcttgtatgcctaagtcatagctttgaattgaaaaaccatgtggctcattgaaggtaatccaatgctttaccctatctccaaaagcgtcgaaacaagtcacagcataatgctcaaagtcctttctgtaatggtagatcaaattaatcttaatgaccaatattatgaaaaatgacttcaaagggtttcctcatactcacacaatctgattgttcaaccacccttcatatctgtcctcaagcatctgtggtagatcccagtgataaagagtcacaaagggcttgattcctgattgaaatgaacacttaacctttcaatatatataaatatatattttgtaatatttttaagggaaaactgcatctaatactcaaaatattctcaattacttgacctttctcaagcaaagcatctataagactgttgtagtaacttatcccctctgggttggattctccagttccatctgttgatttgatcttcaatagcatttgaaaatagaaaaataggaaagaaaaagaaaatgtgccatgggataatgttggaagattaagtcttgcttacttggaaaaattcttgaccatgatattgaaaatctataagcatccattcctaaatctttcatcaagtctatgtcactctgtacatttcaaattttgatatctatgcagtcagtaagatagctaaaattatttatacacatatttatatatataatatataatgatctttatttcaataataatcagaatgtcgggtaagtaagacatcatcatcatcacctaacagtacaataatgccattaaattttcatatccgtgagattctgggcccttaaaatattttgggcaaatggaaattagctccaattattctcgaacagaaaaagaaataatcaaatttcatgttattttattgctgaaacttcttttccacgcaacatttgacttttatgtaattataaaatatagaagtagagaaaatggaataatcagcttatgcttgtgacattaaaactcttatcatcctttttgaaaaatttactatacctcaaatctatgatattgatcaacagctgtgtttgcattactgaagtccaaaatttttcctgtaacaaacaattaacaaatcatcaaacactatatcttcatttaatgcttaaaaagacaattatgcattacttaaagctagctaacaattattattatttttatttttttaaagttctcacctggttgttttgtaaatgtatcccatatactaactcctttatttccctcattagcagctccctcaaactaccatattgaaacagacatcaaattcttgaactacaatactcttatataatcttattccagttccaatatgcttcctgaataaaaaaataagaaaaaaataaagaaaagggaacgtacctggtaagctgaagaagcagttccaaaaatagaactcatctgggaaattaagctctgctgagaga

SEQ ID NO: 184761 - DNA, 1095 bp, Cannabis indica
taatcatataagtaataattatttaaaatatctaagaaccttagcaaaatttaacgacaaaataaatttttttaaacactattagttattacactttaaataactattacatacaaattgcttcggtgcaccctaaatcttaaattgttattgaatcataaccagaaataaatgggaccttaaaaggaaaaattaaaagctattatttcacaaaaacataacaacaacaacaaaaattacacaaatacaattttacaaaattttaaataattttacaatttttttaattttatttacaaaaaatacgatttttttatattgtaatcttgttaattggttgttaattttttgttaattaaatgttattttttttattttagtgttattttcatattacttttaagtaattttcttattaattttatattgttttcctattaatttttaaaaaattgtaaaaatataaaaaaaaaaaaaaacaaattctctaaatgtaaaaatgtaatagtggctcatgtaattattccaaattaaaatacgttaattatagtatttttaaatataaatttgtaaagtgatattttttcaaaccaattttacaatttcatttcaaaagtgtagtacaattgccacacaaaaaaagtgtagttgagcttgttaattacttgaatattacaagggaaaaaaattatgagaatgttattaaatctcatttgccaatttaattatcatgaaagtcgactatatttataaatctctaaaaattgtcatttgtaaattagaataagtcattgcattattttcacacacaaacttgttgtgacagtcaattttgtatccaatttgcaattgtgaatatcattaattactcttaaaattaaagaaatatccatagttatataaccaagctttcatacctaaaactttcaagttccaaattacaaaaatacagagttcaaattcaaaaatcaatgcagaagacagctgaaaccttttaggcaattatcaagaacaatgtaagttcattacccttttcgcagaggcggcaagacataactcgagagcaagaaacaagaacagaaaaccccgaaagcc

SEQ ID NO: 184762 - DNA, 1970 bp, Cannabis indica
attttttagaagaaaaaaaaaagtgttaaacttgggccataaaaagaaaaagacagttcaaaagggcttgacaaagtgacacatagaaaagaacagtgagaattagaaagggtaaaacagtaaaatcaagtgtaataataattaataacgcaagaggattcggttcaagattcttgggccataaaaacacaaaaaacccaaaaataaacaaattgaaaggagtacgttggaattggaatcttatcacgtgttagactggaatccattaccatatttaattcaatttagaatccaaacttggagtccgccccaaccccatcgcctataaaagggtccactctcattcgatttagggcaccaccataattacactttaataagaaagccaaagaaaactcagccacacgcccaattccaacacaaaaaaccaaatacaaaaatgggcgggtgggctattgcggtgcacggtggtgctggtgtcgaccctaatctcccactcgaatgccaacaccaagccaaacaactcctcactcgatgtcttaatcttgggatcgatgctcttcgttctaatctctctgccattgatgttgttgaactcgttgtacgtaattctcaccctttttatttttaattacactaaattataaccatagctggatattaatatattttttttaacaggtgagagagttggaaactgatcctttttttaattctgggcgtggatcggccttgacggagaatggaacggtggaaatggaagctagcataatggatgggcctaaaagacgatgcggtgccgtttcgggtttaactaccgttaaaaaccccgtttcactcgctcgtctcgttatggagaaatctcctcattcctatattggtttctccggtgccgaagcctttgcccgccaacaggtgtgttttgtttttttttttggagaataatcacttcacaggtgtcctttttctaaatatatataaataattaacagtatctagttcattcgtgtggctctctttcaaagtcacgtgtataatatatatatatatataaacccttttcatcgtaaactgactcacacgtattatgaataataactccaagtttgacagtgtcataatttttttttactagggagttgaggtggtggacaatgaatacttcatcacaaaagaaaatgtaggaatgctcaagttggcaaaagaagccaaaaccattttggtacgtggattctctttctgattttgtgtattattattattaaagtatatgatggtatgggactaacttttctctttttgtcctttgttttgggggctacttgtatagtttgattatagaatcccagccacaggattggacaagtgtagcgctggtgttgacagcccgatcgtgatgaacgggctgccaataagcgtgtacgcacccgagacagtcgggtgcgtggtggtggacagtgagggtaggtgtgcggccgctacttcaacaggtgggctcatgaacaaaatgaccggtcgtataggtgactcgccactgattggtgctgggacctacgcttgtgacctttgtggggtctcttgtactggtgaaggagaggctatcatacgtggcactttggctcgtgaggtgggtgctgtgatggagtataagggcttgggcctccaagaggctgtggactttgttataaagcatcggctcgatgaagggcaggctgggctcatagctgtgtctaataggggagaagtggcttgtgggtttaatactactgggatgtttagggcttgtgctactgaggatgggtttatggaagttggtatttgggaacagtagggctaattattgtgtcaggtttatattattaggtgggctacatatattgggagttaataagattgtattttctttccaactatgggttggtttggtggtgggttaacatattatgtcatgtaaaaatgttgacttttat

SEQ ID NO: 184763 - DNA, 595 bp, Cannabis indica
aattaaaatagatcagaaggttaattgtatatatacaaatttatcatacaagaaagtttcgccataaattatctgataattatttaatactttctttatccaagggctagctagctcttaattagctttctccctctcctctatttgcatttttagaaacaagaaaagcaaaacaaaacaatggcaacaccaaaagctgaaggaactgaagttgttaagattgacattgatgcattagcaagtgaaatggataaaatggtgttggataattttccaatgctaccaaaacatacaactccatgcatctttagagctccaagcataatgtccacacataatccagaagcttacacacctaaaggattttcaattggtcctttccactacaacgaacctcatctccaaaccacccagaaaatcaaaatgagatatatggatgaactcatctcctcatgctttccagatacagatcgtaagagcaaattgaaggatctcatagctgcaattagcgaggttaaagatgaggcttggcaatgctacgaaggatctttcgatatgataataagtatggatgaattttgaaaactttttggac

SEQ ID NO: 184764 - DNA, 2152 bp, Cannabis indica
atgaagtaattttttaatatttttaaaattttaaaaacctattaaatagaccttaaataatatagattgttttcatatataaatggaaacacagtcagagttctttctactttcctttttctatttgtaagagcagagtcagtttattaggtacaaccataataataataataataatatttataaatttcttaatatctataaatactaggaaaccaccatcttccaaagttggaagtatatacgattcacagaaagaagagtggctgagattgagttttccaatcattgtgtcttcttcatctacactcactcatataacagccacccacatctctctctctgtgtcttttactacgtataaaactcaccaatccaccatatctctttgcttggtcactaattttccttctacccaaacactctcttcccaattctattctttcatttttattgaatattcaattaccctttttgtttgtttctctcagattccctttctttcccaaggaaaaaataaatttttataaaaaaaataaataataaaaacaccattattaacactcaccaaacacctttcttttcattctcgcattgcaaagtccatcgctttctggtaatttttccatctctttcaattttgctttctcaagacttcttttttgtgttttaaactcatttgggtttttgtagatttcgttttctgatcgaggagggctttcttcggtttcaattcttgtatttttggatcccttgcacgtactttcatcggtaagactgtatttggtttttaattttgcagatttcatacaaatcttttgttttggattttggatcccttttatttgagtttgattttttgttttttgttctgtgtgtttgcttgtatttattttgtttttcaaccaatgattcaacattggtttcatggggaattggattttactctagtttttatttaaaataatgcttttttgttcaccatataagaatttcatggaagttttggaattgggttcttgtcaattgtatgcaaaagttgttcttattatgcttcatgtgaaggttgtaaaagtgtacaaacgaatatgttgagcttcaaatactttaatcatgaagataataaggagagggagggggttttcagatagtcctctctattattttcttgcttcatggatttcaaaatgaagatttccctcttatattttcatagttagataaaggcctttttgataagaaaggaaaagacataattcgtaattttaaaagtgttagctgttcaggggtttggatacttctaaagacatccctttattctcttctttattagaagatgttaatgaagaagtttaggaattattagaaaatgtttcctaataacagctgatattggttagttgctctctggccaaaagactgtttgttgattggattttgattagcattactcattctttccaagatgtccaacaagggttagtaaattttattctcttccataatgtagctcaaccgcgaaaggtctgaaggccaaaggagtgattttgaatggaaacatgtgtcatacgagcttacattctatttgttaatcatattcagtttcaattgcttgtgtcgagtcttcctatctgaggccatcttgtttcctcatctctatttccacgagttgtcattaactttatcaacacatttgctgtgcgatcttagcaacagatttcgtccttaacatcttgtttgattatgtggtgcccatgtcatcaagaacagaatgtgccctttccccgaaatattttttcattaatgatttctaggcgtcaatcatttcatcattatggctcatttgcttcctagaatgtttgtagcttaaaggaatagtgtttttggcagcttttagattgatttttcgtattcatccatcttcattgttgaaggagcaggaatgggtttatggtttgttagttttatgtgaatataactttgacaggatcttagttcactatcaaggtctaatcttgaacaaaactgctggaatttctctacagtagtagactacacaatgttacaaaatcatcccaagctttcaagaggcttgatttctcccaaaagagtaacttttccaaaaatacaaaacaacaaaatgctctatatc

SEQ ID NO: 184765 - DNA, 6798 bp, Cannabis indica
ggataaaagtggcaaggctgtagcaccaatgcaattttggatggtttgttattttgtctcactttgttacttaagatactgtactggcatttatctcaagctcctacttctatcatatcatcaagatttaatttgtatgacgcccaaagcaaattgaaattcattataagttaatggtaaactttttatgtatcataagtaaactattccaggtagaaagctacactcttcagggttggcattttgttgtcttagaaaagacaaatttttagaaattttaattgtattaaagtaaggctcaaattcgagctgttcgttttgcttttggtgattttttttttttttaaatttgttctttcttgttttaatgacttcaaaaaacttgacctcattaattctttttatcgtcaatttatgcttctgtattgattccacatacttcgtctttttcatttttattgccaatttgttttattgattctacgtaccactttccacaatttaactcactaattttctatgttcacactcagcccacactcagccccgaaagctgactgaacctgatttgtacgtctcatccagcattctcatttcttatgctaaccactaacctataaatttgtcacttgtcctcgtcaacaatcccccttacaataattaaactagtctaattgccagccggtcacacttataatgctgcctaacatcgacttcattttgttgtttcagaaattggtcaaattataattttctgcattgcaatctcatagaaactattgtcataatttcataaaggatttgtttgcgcaaagattgaatgatgttgattgcaatattcttgcaggtcttacgtaaaaagtaccctcagtttggtcagatgcataataatttcttcatgcaacaggtttttaagttctctttgatttgtgttttgactacactccttcctttaattggatagtatattgatcaattcgatctaaatctgtaataggatgctgaagaatgttggacccaacttctatacactctttctcagtctctgaggtcagcaggctccaggtaacataaattattatttttctgttggatagaatataggaatgggtttgctttggcagtctagggatttagcattttcttaactactttaattgatgacatgtctcaaatggcatggcactctagatttctagtttactcacttaatttaatatttcacctggagctgaaacaagtaattgatgagaagagagggccctctaaaagctgtattgctgctgttgtttttaagctattacctatctatgatatgaatgagaccacttttccgcatagaattcaaaccagctttatcaactttcgaagtggtggcatttttttttgctttgcgttgctttagtctgttctaacatgtgtactcattcaaattgtattaattattatcatgttctcttgacagtgaaaacccagatgcaattaagtccctatttggcatcgactttgtaagcaggttagatgtctgcaatgtattattctttattctaactagaaactagaatattctgcagattaaaatttcagtagagataggattgtgtaaactttattaaatgatttagtaatgtggcgtgttgctcttgaaaatttctttacgattggtgtgctgggttgctagggttcactgccaggaaagtggtgaagaaagttcagaatcagagtcagttcacacccttaaatgccacatatctcatgaggtgaaccatttgcatgaagggctgaaacatgtaagtctactaacatctccgaaaataatattattgtgttatttcttcacaatggccgttacagcttgatccttttattttgttcttgtccacacttctttctaaattatatgtgcattttatccctattctggaagatattcatatttcttttcatcctagtaatttatgtgaaatattctttctttgttttattatgtagggtttaaaatcagaactggaaaagaattctccctctttggggcgtagtgcaatctatgtgaaggagtctcgtatcaatggcctgccaaggtaaagatgacttttttctttttagagacgactgcattgttctctgacttgtgtcaaataccccatagaattctctattatcacttttttttggttgtattgaccagatatattaggacaacattcttaactagaggggtagaaaaaagtcttagttcttgatttttacatagcattttttttattgtttctgtatttaaatattttaaagatggttgtttgcacttttaacattttaagcaataaagatatcttgagaagatttccaccatttatttcacttcaaaacaaaattagtagcattggcaagacttctgaattttgaacagtttctctcattgcttctaacttcttttaaaattttgaaaggtacttaactattcagtttgttcgctttttctggaagagggaatcaaatcagaaggccaagattttgcgggtgatgcttattttcgtacctttccttgtgacatacaaatgcataataaaattatgttatttatttgctaacatcattctcccaatatgttgatttccttaatgaggctagaaattgctcatctgttacagtaattttcttacactagctagctatgatatctgctttctcttcttttaatggaaaatgttatcttcattattcatttacgtatctcagaaagtggattatcctttggagttggatgtttatgatctctgctcagagaacttcgcaaaaagttggaagctcctcgtcaggtatctgcttgtttgtgaatttgtacaaacttgaatttttatatcatccatacacaatattgatagatgctcttattctgtgatgtctatttttaatttctgaaaaagaaacttcgggatgaagaaggcaaaaaacttggtctgaaagccaagggctctgcttcaaaagacaatgatgtcaagatggctgaggcagaggtaaactaactatgcacaatccatttacacaatattttgaaggcccatatgtgattatgtgctctaagcatctttttcatcttcaatcagggctcatccaacgaaagtggagaaccatctaattctaagtccgctgaaggtaatagtttctgtaattttacacgggtcactgaatccctcgttctggtgctcgtcttcactgttaggctcattcttctgcaggtggtccatctgagaaggagacacagttgaccggagtttatgatttggttgcggtgctgacacacaagggtcggagtgctgactcaggacattacgtggcctgggtcaagcaagaaagtggtgagttgtttagaatgatgagctggttgtatgcatgaaatatcgtctgcattcccaaattttaaactgatggtgttatcttattgtggcttagggaaatggattgaatatgatgatgataatcccatcccacagagggaggaagacatcacaaaactctccggaggaggtaaattaaaagaaaaacccaaaatattctacatgaaattctagttactgtccaaattttcagataagaaatcttttcttttgttttctgtttcaggtgattggcatatggcctacatttgtatgtacaaggcccgtgttgttccaatgtgattttttccttcccattaaatttaaaaaatcagttaaattggagatggagacggccattgattctattctatacatctatctgtgtactatgattatgatatagtcagagtcagaggatttatattgatggagctcatctgtaccattagacaattttaatttgttctaattgtgcgttatagtaacttatggatggttgtcagatgtttcaattagtagtggtcaaattttgatggtgataaatttgcacgtattatcaagaaaattacagttgaaaagcaacaacccaaaagttttttatttttgtcagaaatattggaggtctgttttttacatcttgaaaaatctacatgaatcgcttattctaaacttatttttattttcattacgaatatttattctaatgattgttcactagcaaccgaacttgctaaaagttgtgcaaatttagaaaacttgaaaattcattaagtatatttaagttagacaagaagactcggggcaacttaactatgtgaaaataaatcatttctgtatatatacataataaatgtttaattacttaattaaataaatttgccaagtaattacttgtttaattttgttcaatgctatgaacactggtatcagtaatattatctcttgaaagtactgaaacgtacgattacgtttggtgctggagaaagaataggacttaagtcgtaaaattgacaaaaattattgtagtgttaatgttgtgctatgaataaatcatggtcaagttagttcttgtaaaattgacaaaaattatgatggtgttaatgttgtgttatgaataaatcatagtcaagttgtttcgttaattctaatgtagattgacttaattactattttttgatttattacttgttttttttttttgagttgctaatgttatactaattaaaatgaacgaataaaacacagtttttagaagtcaaaatatttattgtaatttgattagtaatttcatcacacaaacctgtaagaacttttatctttagctaaatcccaaaagagagatataatataataaaataaatcaaggcttttgaatcagctcagatatgttataaacctaacactaatacacatcacacatggtattgatctattgctgaactgggaggactttgggtatggccgaaacatcaatattacttggcattttgaagtaagttggagtaaatgcagatttctcatcagtggaaatagtgtcaataaggctgagcagaaccttctcaaactcctcaccatcactccattcatggattttggccttgatgagaagtgggttatttgaaatcaagtcccaaactgggaaattcttccttggcatcacaaaatcactttctttcagcttcaagcttgggcaatagtcaccagctccatcacccaaataaattattcttttgtttccctcagtagcttgtattctttctataatcaaaccctgcaaattccaaaaataataaataccattaattaattatgatatggaaaaacatatgcatagtactatttatatatatattatgtggggtcatagtgtcatagttaaaaattaaagagtatgtgactatgtgtatgttcttgtggacttaatgtaatatattttattttttttggattttaatactgaagaaggaataagatcagaaaaagaatagacaaaaacaacagtatatatataaatatatatataccttgcacatgttaggagggcaagtgccagtagtgcatccatgtgaggagtttttgaaatcatgaaaaggttgaatcctaagtcttccttgttcatcaacaaagctgagattggtgttaatctctgaaaagtactccctcaacccaagatgcttcaacattgtttcaataaagaacagattcgcatcactaacaatcctcaattcacatctgaaatacagcacaaaaaagataattataagaaaacaaattcatgaaaagcttcaagaaaaaggaaaaaaaaaaacaaagtgttatatttatatacatacccaagagcataagcggccttaatggcagggacaactctgggatgtatcgggatccgattaagaacttcagcaatctcatcaatggtttttccttgatcatgaagctccttcatcatcctatcctgaaatttttcattttcaacgtacggatcagaaaccaaaaagagaagaaaaatagatccaacaatagaaaagaaacatgtaattaccatgagagagttccatgccattgtagggagaagctgattgaatagatcagtggcacccaattcatcgaccacccaattatcactgtcacattcgattatggtcttgtcaaagtcaaaaaccacaatggtatttccagccattaattaatttcttttgaaaaaacactaagtttgatgaaaaacgacgaacaagaaaacttatatatatgtaatagaattatagaagctaaatatttttagctagtgttgggatgggagtgagaaacagaggaggaggaaactggtttatatagtcaggaaattgggtgtaatgtgtattttggaattaatacgatattgtatgaataattaattaatgtcacgttccaacaatgttcgtataaataattgtagaaaatcgtgagatttgaggactgtttttgagtttgaaaaggttgaccatgcgttgaaacgtattaatattaggttaagggaaaggctaaaaacgcggcaataagggaatattcgagaggaatagaatagaatttaaattgaaacttaaggcacgaggattgaggagagggcgtgggaatattccaaggaaggtcctctcctcacctttgctttcattctgtggctgctacccttgtttcaattaagactaattcaaggttcttctactatattataacaaaaaatttttaatctattgtcatgtcattatgatttatgagaatataaatctgataaaattaactacagtgtatatatttgtatttatagagccactattaatatacttgccctcaagtgacatagtaaactgcatttatcggtaagtatcactgtctcatattcctccaactttcttttctttattaaaatttgttcataaat

SEQ ID NO: 184766 - DNA, 1773 bp, Cannabis indica
tagaattactggtccgtgacgtcagtaaattaactagccaatcactaaatgactattgactactaatcaatatgatggaagaagataaacgtagaaagaagttaggatcatgttggtgaacttgacaaatagcaaagcttaagagcagggttaatacactatgatattcatactcaccctcatctatctaagaagtcacaacccttccactgactaaacccaagtaaatatgatgaagcaaagaatgataagagaatagtcttttggcaaaaggccgtagaatgcaagaaaaaatcaattgaatcagaagtatggaaattcatagatatatgagtattaattaccttctgcaattcggagaatttaaaagccatcttccgacattcagcctccacctccccggcttgggcttcggtgggacaagaccaacgaagatgaaattgaggccacagagtcggtgctaaagctgctgctggaggtaatattggaccattgtgtttcagaggatcatagaaaaggttacagtgtacatgagaactcccttctgcagcacgcaaatcagccaaatatacccacaggcatccagaagcttcagcaatactgcattgttgcctctccttttcactaaattaacaaaatccgctagtttataagagccggggaaaggtaattaacaataaattagaaggacaaagtatgaatattttaggaacaaaacattagaatctaaaagtcataaattcttgaaaagggttcattctcttgaagagcctacagcaattctccccatcttttgtctttgactcaaatgccaaagcattgcttgcaactctaaggatcatttttaaaatttaagcaccaaaaggactgttcgttgaaagggacttgttctgaaactgtgttttatccttcaaagagttcattgcatgtaattttctacaagttctgcatcatgttctacattctttcagagttgtccagtcacaaactacagaccactacagtacaccagtcatttaaaatcatatctaatccctattgtgcaccaatgcccttgcacacttcaagtttctaaataggtatgtgtataagcacagaataatgtgataccccttgaacattacctcaatgaaacatcttaatgtccaaaagaacagtgataaataatattttgttaattgctgaaagactcgctatagtagctagcttgtttcttttactaagttatagattgcattatatcaagactaacaaatatcaagtaactgcatctcaggtatcaaaagggcttacctattacacaagaagtttccaaagcgacatgaaagcatactgtccaagagatccactaagaaagcctagtttacccaaaaacaaaacaaagttaatattacactcagctgtttaattaaattgaagtgtatcacaatgagaaaaaatatacccaccgaggagaactcaaacgcaaaaggatacatccgcatcaactgtgaaacacaatcaatccactgtgacaaacaaaagaggttagatcaataacagatagtccaaggggaaacaaacttactcatatcacatacactcaatttctagaagaattctttatcacaacagcaagtctcatcacattaattaaccccagttggctcatgggattaaacactcttatctcaaatgattcaagcatccaaagtttccataacaattataatagaacaggaagaaacatgtctgatttcttgtactggtttggtgttgtcttgttttttattt

SEQ ID NO: 184767 - DNA, 4844 bp, Cannabis indica
gttaacaatgctcggggtgcaattatggatacgcaagcagttgttgatgcttgttccagtggacacattgcaggtaacttagcaactcaccaaaattcaattaaagatcaatgatgaagataccacttttgcatttaacatcattatatgttcttgaaactggaatatgtgcataacgatagctctccttaacaaaacatatggctatgattataagtttgatctaaattgaaaccagaacttcattctctcctcttcctctctttgagttgagattatgtatatgttgttttgagggtttgaaaataaaatgtgatgggcacaatccatttaagaagaatgcatagaaatcggtaaatttgtatcaaacttctattactggatttcattctcctgagatcttctaccctatcatccaggctacagtggtgatgtttggtatccacaaccagctcctaaggaccatccatggcgttatatgccaaaccaagctatgactccccatatttctggcactacaattgacgcacaggtatatttaattctgtatattatttctccttattttgatattgctactttgctgttatttttgtgtccataactcaaaacaaaaacataaaatggacattgttcagttgcgatatgcggatggagtgaaggatatgctcaataggtacttcaagggagaagatttcccagcacaaaactacattgtcaaggaaggtgaactggccagccagtaccgatgatttggatccacggcatctgagtctacttgtttttgagtctcttcactgctgacataataataagaaaaacagagtgatcatctgataatctctacgttcttgaagatccacaatgttgtgttagtaataagactcatctcattatgaggatggtgtcaatagatttctgtagtttcgcttttgaagtgtttcgagtctagtttctgcattgagattatgctttgtcagtatgtggaagactccaatgacaattatgaatagacgctttctatccttgaatgaatttacaagtctattacttcctttacatgttaagtatgtgttgtgtttgctttactttgtttttttcctactacactgagaggaaggaaacaactgttcttgaactaaacttgcaatcatcatagaatttatgatgagaaagaatgagcatgaaatcctgaaatatctaacaacgacagcattttttagatccgctttgacatttgttatctacaaacaagtaacgacaacttacctaaacaacagtatattagtgtaaacgacaacaaattaaagagaattaacagtgagctaaacagggtaatcaaaatcaacactctaaaccagagaagtagaagaagatacaacattcacagctctgctattccattatgaatcagtgtctataacaactcagcacacattgatttaagtatctttattttgttgaaggaattgtagatccttcatttgcaattgaacagcttctttggacaagatctttggctccggaacgtttaaatcaccgccttgagctattctttctgccttgtcttttataatcttctgtatctcagttttctgtacggttggaaaaactgaaatgagcattacattgagaagattctcatcctcttcctctatagggcctttcccaaaacagcaaacataaatggcttcaagtgatttctcaactcgagcctccatggggatcgttgttgcgccaccctttgactttgcccgtttctgcattacaacacatttatttattctcagtgagaaaggaaccatttttcaaaataacttaaagtctatgcatctttttaattgttcttgtgttgaaaagaaattgcagtcctcaaatggaatttcccaataatagtaagtattaatcattaacaaacctctctggcctcattcatcatggctaagaaagtctcttcctcaaactcaatatcatttgaaatccgaatcctagctgctccttccaaaatctcctcagattttaagagaccagctcccacggctgctaaccaacagcatagaagaacatacaaaggctcccctgcctaaccaaatccaaactcaaatcaaacaccataaatagttcatctcaagtactccaaaaaacccaacaagaatgtcctaataattattagtggagtagactagctactagcctactacatcagaagtgtgttaatggcttttttgtggagaaaaattgttttaaattatgattgtttaagctattatgctacaattataacatgctaattggtaagaatcattagttttatctcaaaaacaatgtgtaactatctccaatagagtaactcgtgatccggtcttataatgtgttatactatctccaataagtagtgtaaaatttgtgttaaatttgactcaaaaaataaacctattcagcccaacttttccgattatgttctaataaaataaacaaaaactattgaattgaaagtatataataactctattaatatataaataaattgtaacaaattatcaattgattaatgagtaagcaaaaagtataaataaaaaaaatataatgtttattataatgtaaatttagctgtagattttatattttttcaaattcgacacaagttttagcacaatcaaatttgacaacattatacactgttattggagatcaatttcataaaaattgaacttaatatatgcatatacacctactccactagagatatcttaataatctcatatatttataaagataagcaaactatgaaattgagcattggtgtaaggcatcgtcctagtattatgttacattaatcattaatattagttagtaatattctataaaatttattacattaaattatacgtacgaaacattatacttaattatactaatattattactagttccttttaacatttctcttcaaatttatatctcagtgaaaactactgccatatttctaagcaaattcaaagactaatagtatccgatcaaattataacaatacaaatataaccccattttcctcaaatagaaaatctaaacaaaaactaccttgcctcttcgactttgaaactcatagaaagctctggaatcagatggagtacacctcttcccaactcgtctccgaaactcggcaaagtcaataatatccccaccaacgccaccttcgtcgcttatgattctggcaactagaccgatcacagggagagctccgataactttgttggcgaagctggaaaaagagttgggagtttccatgtaagctttgacagagaaaacgaggccattagagttggaggaaggggatatgggcctagaagtatagatttggcgaagaaggagtagagaggagggggaaatgggttttcggatgatggtgtgaaaaggggtgtttttggtttggagtgaggatgaggtgaaggtgagcaccaccaccatggctgtgaaaagtgaagctcaggtaagtgttttatccatggaccatggcctctcatttatatacgttatctcatttcccaactctctcagaattatgggccttcgttttactacattacttggggcgacccgacccgtttattttttatttttttggttgaaaaaggaaagaaaagaaaatattctttggttacggtggcacttaactatatttttttgtacgaaagggtacagagcaaaacggtaggaatttaatagattttgtcgtcaaaaattaaattttacaaaacataaaatttaagtagtttaggcgctatatattttataattttttgtgctttaataatgtaattgtaacccgttatcactacaatattatatatatatttagtaatttggcgataaatatcatctttgttaaataatttaagatactaaaaataaaatttaaaataattaattgcaactacagcatacaacaatcatataaaaaattaaattataccttttccagtgtcaaaaccaaaatagtgcccttatgtataattttccaaaaaatttcacttttatggactaaaattactatccacgtgttgtgacaatataatttttattaattagatgagtatagtttggtaagagattcaagcatcatttgatgacaaatctatctacagaaaattataatgttttagcaagtgtctcgtaaatctatataaagaagacttaatacttatctaagataaaaattatgttttattcaaaaggaagaagaagaaaaaaggtaaaatttaatttatggtttaaaaacgaaaaaaatgctcaaaaacgacagcaattggatattgacatcatctgcatatctctctcctccacagtccccattttttcaacacagtaccatctcttctctttattccattccattctcataccaaattataaaaataaataaataaataaaataatccctaaatttcttggaagaaaaatcatatacattcctctacaaaaaggaaagtaggttcttttctattctactccatttatacacacacatacatatatacgcgttaataggtgctccattgttgaaattgaggtccaaagctttttgacttcactgtttggccttctctgagtcttgaagcagaatgggagcccgtcgaaacggcgacgttacgttctctcccttttgtagtttctcatcctctaacaacaccagactcggcaaacacgttcacgacaacgtccatggcaacatttaccttgaccctgtatgtactcctcctcctttttaccatttttgtttaaatgtttggcttgtttgatattttattatatgtatatatctatgtgtatgtgcgtgtgttttg

SEQ ID NO: 184768 - DNA, 963 bp, Cannabis indica
ctctttaatcattttcaatcctttcataggccatcatgggtgttttcgtatacgaaaccgagttcagctctaacatctctccaactaggttgttcaaggccttgatccttgatggggacaaccttatcccaaagattgcccctcaagcaatcaaacaggttgagacccttgaaggagatggaggagctggaaccatcaagaagatcacttttggtgaaggtataatttgattaacattgtattgtatgtatgaaagttttgaggttaatatttggtgtaattataattttgcagggagtagttttaagtatgtgaaacacagagtagattccatagaccaagacaacttgtgtcactcttacactttgattgaaggagatgctttaacagagaagcttgagaaaatctgttatgagacaaagttggtggcatctcctgatggagttggctctatcattaacactgtcagcaaatactacactattaatgatgctgaaattaaggaagaagatgttaaacaaggcaaagagaaggcttctcagctattcaagctctttgaaaaataccttaatgaccatcctgatgcatacaacaactaaaacatgttgaatttcatctcacaatatgtgtttctcaagttccctatgtgtcatctttcttctaataagagtgtgagagttgctacttatcaaatgtattcttttgggggcaaaataaaatctaaaaatgttacaaaattctaaaataacaaatagagattggctgcacattatcgttgaaagttgtttctctttttttctatgaagatgtttttgaaaactaatcaatggctactccttagaagacaaagtttcagtggaaaaacttggctataaaataacaatcaaattgtaacgaacaagtcactttgttgtctaatcaaggcccgccttgaggctaagcgggctaggcgtgcgcctcggg

SEQ ID NO: 184769 - DNA, 5024 bp, Cannabis indica
acagcgatttccacgacatgggttttaatgttgtttgcctcaaaagtcaaacctcaaaaaaatggcaaaaaagaagtttgagctgagattttacaattatttggggctcaacaactattgcgtgatgctattggtaacatgatctcgaattgaaaattgtactaatttaattaaatgtgtggggtcttctaactttaaagcaaattttatttgcatcaaaaaaaaaaaaaaaccttcaaattttaatgtacactaaatttaatttttaattggtactaattttttttaagaaaaagtcttccttctaattacattctaataacttgcacatataaaatgaaaataaaatttatttaaatatcaaattaaaatatgtttacttagcacctatattttaatatgtaagaaacaaattaaagtgtgatcatatttggtatatagtattcaatgtattcccacttgaaaagaagttggtgaattgcaagggtcagtgttatatgtggtgtgaataatgtgcatgcttagaagcaattaggtaggtagaagaaaaattaggtgaaacatgctccattaaaaacaaaaacacacattatttggtttatatttttagttctaatttctgcaggaaaaaaatgcccttccatgttctaaagtttaatttttaacctctttctttgttatgattttttattttttattattttttagcattggagatctttaaactttcttttgttagaaaattatgtgatttgatattaggtatagtggtgtctggcaccacattattttgtaaatgattaataatattctgtaataattattaaattaaattacgtgagactcaacacttaattatatgaatagcgatatgattcaagtaattattttagtatttctcaaaaaatatagtaactatgttttatgaatgagaatgataccactcaaaatttttattaaatgatcacatttatttgacatgcatggaactcatctttgttaaaaacagttcacatgtgtcatgtcttagagtaattgcttaaataaatctaaacttcctttaataatttgtccacaaccgtttgtaatttatcttgctaatttaatttttgaaacacaccaagtagtaaaatctatttagtcctacgtgtgctcactttctcccgaagtaagtcctaaaacaatcttttctcgaagatatgtgctcacttctttctgaaatgagatatttaaaaaaatcttctcctaaagactgcgatttgttcaaagtttctctttaatattttctataaacaaaaactagaagaaataagagaagagactactctctaagttctatttatacatttataaaaattcttaacaactactaaattataaaaactttatatatatttatacagttttttacaattgtataaaacctttcctaaaataaaataatattggacttgatgctgattgattgccaaagtatttatttgaaaagaaaaaaaaaagcagtcgttgatgtaaatatataaacaaaggtgaaatgtatacatattatgtgcacgagtgtgtagtgtgtgtaaaataaataaatatcgaattattattaaaattaacatctttgtcattttaataattaattcaaaatatcaataccttaataactgtatgggtagaagattagttcaatatttaaatagttagctcttgtcaagttgtgcgtaatttggtagttgagataatgagatgactaatgtgttgccatagctattatttacccaaattagaattttctttcccagctactgcccaagctatacagtccctactaacttgttacatatcaacttatatgtgataatatttctttgtcattatcatgcccatgattttatgagtcacttccttttggtggatttggatgaagtgattgttcgtcttagtcggacaatgtccacgcaatgagctgttttaaataaaaaattgaagttttgagctaatatataaatcatcaaaagtggtaaattgtttgatatatatgaggccaagtcgggattcagtaaaggatacctacctaccgataaaatctaattgaattttttgcttagaaataaatattagttttaatattatatattacatcactttattttcataagtggaagatgttaaaatgaaaaaacttttattgatatgcttgagggaatgattaaagaacagtaatactaataacaatagtgtacaaggtatgaggtatcatataacataagccattccaaataaataaataaatatcgaattattattaaaattaacatctttgtcagtttactttgtctccttgcaatcatgtagttcattcataacttgttttggttagacactgttacctttaattttggaacaaaaggtctattagtaattctcttgccccaggaatattataaattatttaaaatattatatttatagatagttagagatatgcatatttgtgtaacacgatgctgtcaataaaaagaacagcaaaaataaagagtatagtattctcacgtatgttcttttgcaaaaaaagaacactcaacagtagaaagtgacaccccataaaggagctgtggaagttggtgcaccactcggaagaaatacatgatagtaaccaaaaaggctcctattagtctgtgcaacttcacgtataaaattatctctaagattttggcgaatcggttgcgtcctctccttcaggagatcatttcgccttttcaatcggcttttgtcccgggtagatggatcgctgagaacagcatcatggcccatgaaatcctggattcttttaacaaattgaaggggaggtcggggtttgtgggtttaaagctggacatgtcaaaggcctacgataggattgaatggagctttttaaagaagaccatggaagccttcggttttgagacgagatttatccagatggttatgaaatgtataaactctgtgtcctattcgatcttacttaatggcggccctttgaaacagtttcgtcccggtagagggcttcgccaaggtgatcctatctcgccatacctgttcattctgtgcaatgaaatcctttctaggttgctcttgaagaaagaagaggctggtcttgtttcggggttcaaggttagtcctcagagcccggccatatctcatctcatgtatgctgacgatctctttatattttgcaaagctgatatgggtgaagtaggggcagttttggatagcatccaggtttacggctcttggtcgggtcaatgcttgaatgtccaaaaatcggcgtacgttttttcgagaaatgtgggtgattctactcaggctgagttggttcagtacttgggctttcggaagttgtgcaaggaggatagattccttgggaacccgattatctggtcgaatagtaaggttaaagatttgaagtttatcaaggaaaagatctgttccaagattgagggatggcggtgtaaacttctctcccaagcgggaaggtctactctgatccgagccgtggcccagagtactccggcgtatgctatggcgactttcctcttccctaaatccctgtgccatgagatggatcaggcggttcgaaagttctggtggttgggtagtgataacaaagatcgtttcctggcgctctgtgattggaattccttatgcttacctttggataagggtgggttaaattttaagaagtttgctgatattaatcttgctttggtcgcaaaacttggttggaaacttgctatgggggaggattctctttggtgtaaggtctttaaagccaagtactggggaaatagggacctaaccttttggaattctaagatgcctagtaatgcatcctttggtgctaagggtattatggccacgagagatctgatcaggaatgaatcttgctggcttatagcggatggaagcaaggttgacttgtggaattctccttggataccgtggttagactgggacatgtttagggctgccttcaatccactttgtgttcagaattccattaaggtgtctactctacttaatgagaatggggaatggttagaccgattgactcataggtggtttgtccccagtgtggctagctctttgtccttgatagggcggctgcatacatcgcaggaagaccatctagtgtggaaagatgccacaaatggtttattctctccgaaagcggcgtataagtctataatcaagtgccgttggggtgagactgaccagatttggcatcggatttggaaactcaaaatcacggagcggttgagaatgttcctttggaaactttgccgagacataatcccttttggaagtcgtctccaaagaatctttgggaatgaagttagatgtattctttgtgggaaggatgaggattcggcccaccatttgttctttaaatgccctctcgcaaaagctgtgtggttcgcgagcaggtgggctcttcgaagtgagattctatggtttgactcgcctagaaacatggttgaatggcttctttcccccggcttcctccaaggagctgatgataatgtttctggggaatttactaggttcgggatttgtttgtttgatgtgttgtggtctgcccgaaactgtgccttccatgaaaatgttaatccttcttggcagggagtcttagctaaggtgaaccatacgtctgctaatctgcgaattgcttgggagattccgagtggtactggttcattgcagcagagtttgacagagatttactctggaaagttggtgctgctggttgatgcagctttcaaggatttgcgcgctgctgctgggattgttgtgaccatttcggaggggtctttgttggaggccatggctgccaattatgcttctgatcatgctttggaggctgagatgcgggctgtaatttatgcagtgaattggtgcaaaggtagggattggaagcagactgttttagtttcggattgccagctgctggtgcacggcatccatgctcgcagaacacccgattggcggcttgc

SEQ ID NO: 184770 - DNA, 3275 bp, Cannabis indica
tgttatactaggcttcttcaataagctaatttagttattttcacttcaggagaacgatgaaagtcgaggatgtgattacttttgttgaatcgataaatctcatgactaaaaaatctacagaggctactgccaaattgcgtaaccaaatcaagattttggagcaagagaagaagcacaatagaaaacgttattaaaaattatttattatatttatttgcctttacatcattttccaacttttatttcgttaaagattatgaaagtgtaaatttatttatgttttatattttttatgttgtcgaagttaggatttaacttcactcggtaaaaatactttttaagtaatcctttgttatggattgtaactattaatatgttgttgtatagtacttgtctatcatattatgtaacaccctactaaattaggcgtgttatcatatttttcttaattgttgtgcacacctttggtaatcaaagggtttaatataaatgtggataattaaaattttcttaaaaaactgaacttttaaaataaacataatttatataattctcagatgccgttgaaaattaacataagtcaacaaaatacttgcgttacaaaagttgtcattacatgtctaataaaaacgtaagtctaatctatcttgaagaccctgaatgctcaaggtctaaccatcttgatatgtacaatcttcacccttagctttaaactcatcccgattcgattctagctcatacctacacatacacgtaataactatgagtcaacagactcagtaagaaaagtataatcataaacataaacatatatccagaccgtaactaggcgctcatacacctactcacgatttgataactgtgtcaggaacctcctcgacaagtatgactaattgcaaatccgacctatactcagtactctagtcacactgatgtggtagcaagaaattcatactatttggaagcctactatatatgtgttggcatctcgatataaatctatatacacctcacttataccctgatatgctattttgatggctactgacatgcacactaaacatgtatacatatatgcaaataattctactaatctcaccttaattttgaatgcaagcgtgccggtaactctaagtggaaactgctgctcgatgaataaaggccttaagtaacaatttacgtaaaactcgtaagtgatccgctaaagaactttcgtggattctaaacttgaaactaatgttttcctatcgatatataacatgactaaaccttacgcattgagaaaattaataaaaaatgggatttcgcgaacagtaccccagaaaaatagtaggccgtttttgagcaaacgacaggccgttttttgtgggttttttgcctgaaaaaatagcatgccgttttactagaaatggcctaccgttttctcagcaggattcccaagattccaaaactcgatcaaaacaatcccaatcttttccaaactttccaaaacttcaaataaggaagaaacaaacttgtttcaacagctaaaaacatccttaaccccttagaagcaaaattacaattgttgggccatgtttgagttcttgaactcaaacttgctcaacacaagacacaaccaactaatcaagcttaaacaaactcctaacaatcataaaactacccagaaaacatcccctaaaaaacctaacatcaaaccaaagctacaacccaaaatcacataatcaaccctaattttcagagttagaaattcaaaggaaactaaagatagaagcttaccttgaccttaaatcacaaaacccttgaattcctatgctgaaatccctattgcttggtctagaataggtgaggaaaaagcttgttttccttggttccatggtttggccgaacaacaggagagagagggtgaagaggtggcgtttgatttctaaattatccttaaccaatattattattattattatttcagcttattaacttagggataactctaaaaaatcccactatcataatcaacgtaacacttaggtaattaaagagactaaatttccccttgcttcactatgaaataaccttacctcctaggggtaaagtggtccaactaatagctctaaataaatattgacattctaaatgtctaattatttagcctcgctaattctaaaatactatacagtatctaaatgactctattggccaaaatgtcgcatcccactgttaccgaatacaaaacataaaaattataaaattttatgtataacatatataatgcatctagaattcaaatatatctccatatttgagaaaatattttcctaaagcctatttcaggaaataagccctaacttctactaagagacatataattataaaataataatcaaatccttaattatctactaattctcataacttaaatatgcggtcattacaattattcccgttaaaaggatttcttccttgaaatcaaatctgaataactctggacataaggctctcaagttggattctaattcttaggtggtttcctctacctcaacgtttcttcaaacaccttgaccaatattataattctattttaaggaactttatcttcttatcgagaattctaactatttcatcatatacgataagtctggttgaagttctaagattcggtaacctttggaatatgagtcaaaattcttgatacaactacaaggaaacatcatgtgtgttgtccatgctgatcataacattaaacgagagattatgaatctaattttcttgagaaactctaaaatttttaggaacctagggcacatcttagccttattccgaaagtatttatctcttttattgataacatacaggaactggcatgttttccactagttgggaatacatctacgtttgaacttcatattaacatatcgtttgctgtttactttgaaaagcagcatcttggccataattttccttaaagtcttacagatccattgaactaactacggatctatatattttttgttctaggttttaaaaataatacttcatactgttcaatattttatagggaaccattctaatcgtactttgataactgtttgttgtatgaaaactaactcgaaggcatagacttgtttcatgaattcttgaaattcatcaggtaaacatgcaacgtatctttcattatcttaataatcccttcggactgacaatgtgcctaagggtacaaagctgcactaaacttagtttttttttgtatctatggcccgtttttgtagtattctgtc

SEQ ID NO: 184771 - DNA, 5940 bp, Cannabis indica
tagattgaactaaagacaaaaaaaatgggagaccaaagcaaaaataatacatcacaatttcacacccacatgactcccaaactcactcctacatcccttcctcaacgcaataaccaggattggtcgccgccggtcgacgaggcttcctccactgcacccacatctactccttcatctactactcaagattcttctgttcatagtaatctatttttttttttttgcatttactttgtttccctgtaaatcattttccttgcgtttcttgaacaatgaaattgggtacatatggtattttattgcttggtttttggataatttatgtctccaagaatcataagataggatgatttggctttgccagctgatgagattgtcttgctgtatgattctccgatgatgttctgagactggcctgtatattttgattgctatgacaatatcttgaatcgggtgcgtcccgattgtttgagtgctgattaagtaccttaagtatctgttttcagaatctatagattgacagacttttacaagaactatattggatttttgcatttcttgggattcatttggtgtgttattgatctatgggctggttttaattgcaagtttgtattgatatcggcaagatagcttataattcttttggtttaatcaactgggtatgtggcaagtgcattgagtgtttaatttggcttctaggtagtttatttatttgttaatgtaatttctttttagttgatgtatgaatatattgtattgtcattggttttgattataatttgtaaagatacgcggtctttttcttcttcaatgcaatcctttaatgcgttggtgttatttgttgattctgttttcaatatcagtagatgattaatttgtgttttttgagcgggttaatgttcaagaattatcgaatttgattataatattttcgaaccatcttgttctgatagagttattccatttctatttcttagtgttgttgcattagggactgataaaacggactttgaatgtactaaaagtggattgtgttttgcagctgaaatgacttcaatggttgctaaggcaggtagttgtagcggccaagtatcttcaccagtagctgttcaagaaaagggaagtaggaataagaggaaatttcgggccgatccaccttttggtggcacacataagattgtctctttacctcaaagtgaatgttcagcttatgaattctctgctgacaaatttgaaattgccccaggtcatgagcaatcttgtgtctgtgactattgtagttccaatctagagcaatctgataatttaaaacttgaccttggcttgtctagtaacgttagttcatctgaagttgggcttagccaacctagtgaggaattagaggtagatgaatgtgaagatgctggttggaatgatcttacggaagcccagcttgaagaacttgttttgagtaatttggacactacctttaggactgcaataataaaagttatgacttgcggctacactgaggaagttgctagaaaggcagtcttaaggtctggccattgttatgggagtaaagacacggtttcaaatatagtggataatactttagcatttcttaaaggtggacaagagaatgatccttcaagggagcattgttttgacaacctacaacagctggagaagtatgtattggcagaattgatctgtgttcttcaagaggttcggccttttttcagcactggggatgcaatgtggtgcttgttaatctgcgatatgaatgtgtctcatgcttgtgcaatggatggtgatccctcgtatacttctggtaatgatgatgctccaagtgggagttcatctactttaaaccaacctcaacttaaagtggaatgtaaaagttcagaattgcatctttgttcgcatagttgtcaatctgaggcacctgctgtagcttcagtacccagcatacaaagccaaaggcttcccttggatgtggtagattggtttcgaaggagggaaagaattccatttctgattctatggataaatctttcagtgctactggaacatctcaatctaccgcgtcagaggagaagcttggaagcagtagaagggtccattctgaaagtagcaagagagaatacatgcttcggcagaagtcacttcacctggacaaaggtttcaggacttatggaaaagggacttcaaggtcaggtaagtatagtggtttgggtggtttaatgttggataagaaaccaaaatctatgtcagattctactgctgtaaatttaaagcatgcttcctcaaagataagcaaggctatgggagttgatgtgcctcaagataatgggaacaataagacttctgtcaatgctgcaacctctttcccagtagcatcaagcctggataccgataatgcatgttcaatttctgtccctaagaaggataatagtcagtcaacgttacctgcagtcagtagtgtaacagcagtacctgtggtcgacacagaagtgtcattacctgcatcagatactcaccatgctttatcagctgccgatactgagctttctctatcactttctacaaaaaataactctgctgctattccaacccattgtactgccgaggcatcaaattctagttatgctggaataccatatgataagtctttggggcaatgggttcctcgtgataaaaaggatgaaatggttctgaagttggtaccaaggataagggaattgcaaaatctgatgcaagtgtggacagaatgggcaaatcaaaaggttatgcaggctgcccgtaggttgggtatggaaaaagaggaacttaagatcctaaggcaggagaaagaagaagtggagcgcctaaagaaagagaagcaaactctagaggaaaacaccatgaagaagctttctgagatggagtttgctttgagcaaagctagtggtcaagttgaacgagctaattctgctgttcggaagcttgatgaagagaatgcagcactgaggcaggaaatggaagctgcagaacaacgtgctgcaacgtctgctgcaagctgtgaggaagcatcaaagagggagaagaaaacgtcagtggagtttcagtcatgggaaaagcataagacctttctgcaggaagaattaacaatggagaagcacaagctatcgaagatgatccaggagctagagcaggcaaagtataggcatgaacaacttgaggtatgcgtgagaaaaaattgtcatttctgatttctataaacttccttggtccttttagtaatcttaagttattgttttgagctcttttctcattcaaaagaaaaatatcacaggctagatggcaacaagagaagaaattaaaggaggaactatctatgcagtcaagttcagtgagaaaagatagagagcaactagaggtttcagcaaaatcatcggagaacatgatgaaatttaaagcagaaaacaatctaaagaagaacaaagatgatattcagaagctcgaaaaagaaatctctcaactcagactgaaaattgagtctccaaaaattgctgcgctccgaagggggaatgatggaagcaatggtcgcaagctggcagatgtcaaaagtgaccagtatcaaaatcaagcagctgcaaagatgaatgaccactcggagacaggcagtgtaaaacgcgaaagagagtgtgttatgtgcctctcagaggaaatctctgtagtattccttccatgtgctcaccaagtggtttgcacaaagtgcaatgagctccatgagaaacagggtatgaaagattgtccttcttgtaggagccccatacagaggcgtatttcagtacgttattctcgctcttaatttttttaattttttatttcatttttgttctggaatttgatttgagtggttttgaataaaacattgtgagactccatatgaaaattggataatccatttgagttccaaattggtctcttcagttcacaacatatgatgttgaaggtacctataaaaacagttttgttgactcatttaaaatgagtctaagatataatattgtaaattttaaagaataccattactctctctctctagtgaaatagatttgcacatcttgagtaatgttttgaattttctttgagaattagtgaatttcttaaaaataaaatagatgaggataatacccttttgacttatgctagggaaagaaggggaaattattttgctcaaattttatgatttcttttgaatcattttataaaaatttcgttaaattgaaatttctttttctaatttctcaaaaaaataaaatctttttctaaaaaatgtgttctctcattttcattagtgttgacctcgcttctagctaacgacagtgagtaaaaaataaagcgattaagtaagataattaaaagaaagcaaaaacagtatagtagagtgagcaccaaatttaaagaggtttggccccgtaagtatggtaatagtcttttctcctagtattcttcttaaaagctcttacaattgatcactgaataactttttctcttagatcacttttttctctctagagtatatttctgcaacaattctctcgatccctttcatagtgaggattttgttataaatataatatataaaaatagatgaggattctgttataaatataatatatattgttatataaaaaaattgaggtaaaattactctagatgtcaaaaaataaaaaacattagtatgagaaaaaataatgtttctgcctaagaatctccctatataaatcgaagtctatttatcatttaaaaaagaaaatataaggtttaataatttaacattaaagaatgaattgtatcataataatgtttattagtggtcttaagtttttttttcattgtttggttccttttaagataatattattgtattcattccattgttataatgaaatctaaataaagggatgagtaattgtgtgtttttaaatatcttcttagctctgccaaagatcttaaaattttagttttggataacgataaagagtctcttgcgatcacaacaacaaggctagaactatgttcgtacaaagcaataataaatttcacaattagaattgaaaattttcgatatctgataattatacttgtttcaaattcaaattttctctttcaaatgttaaactttatcttattttgtacgaacataattctagcattgtggtcgtgatcgaaagagtctctctattgttttccaccactaatatttgaaggcttttggtaaatctaataacatagttgaacacacaagttttttttttttaatttttgatttggctatagtaatgtaatgatacagtaataattacatagaaggaatgaaagagtgaaaaaaatagatagagtgaattgcacaattcatattacattgatatataattacatatttttcaatacattttctcattattaacaacttaaattatattaattaatttgattctaatcaataatatttgttttgtttggctggtcctcttggaattttgttgagaacattgtgttcaaatttgatgtacaatttttgggagtctcgatagagttttgcagcaagattatccacttcatttcgatgtcgttcatacaaacctggaagtgtttcgaagcacaacaccacttcatagttccatccacaccaataaaattaaacaaagttagttgaaattgaaattattaaatgtaatagctagctataaatttgtactttgtatgcaataactctaaatatcatgtattctttgtatgaaaagagttatttatatgtatacaatatacggttaattttattttggattatgtattttgtaaaaaaaattatcgcttgaattttgttttataaaatgataaattagctcctgtaattttttaaatagtacaaaatggttacttgaactcaatttttgataattt

SEQ ID NO: 184772 - DNA, 5196 bp, Cannabis indica
aaaaaaaagaaagaaaaagtcaatatccaagtctcaagacagcaatcaagggacatgtatgaggatagaagtagtaaaagacatttttatctaggctcctatattaaagttgaaaaaaaaatgataatgaaaacaccaacaacaaagactttaaaatacataaatgagattaatggaggagcatgtaggtacagattaaaagtgaccatatgggtgttctttatctttaggagcatttgcaactttaaatgacaccaaggcgatgccactaagaacctgaaaataacagaattcatcatagcagaatgataagataacgatctcataagagcttatgcacaaaattttcttttaaataataatgcaataaaataatggaaatgatgtggggtaaagagcagtgcatatcaaaaatcaaattcattgaactcagaattaaaagagccagatttgcctacacttaaaccaatgactgttacaacatccaactctaaagaacatatacaaactgcacatgctcaatggtcattgacataattgtaagcttacttaacaaggaaagtgcagtaaaacagattgctttagcaaataatcgaattaccagttacatgttaccttttctcaagaaaaatgcaacaagtgttatttatcatttatcattttcaaagttagattaacaaacatcaagttcacattttgtaaacctagtcgaagtggagtcaatccaaggagtacatacagatacaaaactaatttaggaacttctttatttaaaactaattttggaaagcttttctgaggtgatcttagaagatttgcatatgggagaggggacttttcctctcaaatatcttggggttccgttaagaccaacaaaatggcgaagagaagattgtgagactatcattaaaaaggttaaattgaggctagcaacttgggcaactaggcacttatcttatgctgtgcgagctcagttaatccactcagttctgcttggtcttcgtaattactggatgagcatttttatccttcctcaaagtgttattaaagaggttgagaagctttgtagaggtttcttatggggttttaaaggagagaagagtaaaatccatttggcttcctgggattttgtttgtttgccaaaaccgttcggtggcttaggtttcaggaatgggccggcttggaacaaagccatcttggggaaatttatttgggcaataatggataaacatgatatcctttgggttaaatgggttaacaacatttatatgaaagggagtgacttttgggagtatgaattaaaaggagatgttagttggtattggaggaagttgagccacatgaggaagagatattcgaagatgagtttcatggctgctgtcaagaggaaagtttattgcagctaggctttatatggggtctatacaaagggacatagatagcttttacaagtcgatttggagctttgcttccattcctaagcatcgcttcattttgtggcaggtagttcatggcaatttacttactagagataactttgttaaatttcagattcatctagattcttgtatctgtccggtgtgtggcttggaagaagaaagccatagccatctgttcttcaaatgcaggctgtcaagagaggtgcttcagcaggttttttactggtgtggggctgatctttggcctttggattttcttagatggaaggtgtggctggccaatttgaaggctagtgtgaaggttcttattactgctgccacaatatatatgttgtggaataataggaactcttgtgtgcataataatagttgttatactaagatgaaaattgtaaatagtataaaagatatagttatgcatagattgtatagtttaaagcataggaggaagatacaaactgaaaaagccttgattatgaggcttattggttagtttcggctgctggtttttgagcaggtgggttgggagccggttggttgtggctgggatttgtttggttcagttttgattaaagttttgattaatgaaatatcttctttagtcaaaaaaaaaaaaaaaaatataatccggccttctttggaccttggatttaatattttttttcatctagaagacttaaaacataagtatggtataactttctaaaatttagtgcaaaagaagaaaatgagttttccttcatttttagcctactttcttcataaaaaatttcaagaccaacaagtttcagagaactaactaaatcatcaaacccttgtcatagacgagaagggtggttaaactctaccttaggtccttaacaacaaatttagaccaactattactagaaaaaccaccatcacgaaacatctggagaagctgtttcacatagtttcccaatcccaaccgagattaaatcactcagtactgtaatctgctaaatgaaaaaaataaaaaatgcagtatacaacttagtactgttatgaccggagaggctcatttgagattaaacgttatatacaacttttagcgaattcatatattgacatctgtgctttgtaaggaaagaataaaacttcatttagttgtacaagtcatgcaataagttggatcatgtcaaataaagtagttgtttccttggttcactgaaggctcataaacccgattgaacaagctccaatgacattaataatataaaatgtgatcatatgaatatacatatatatgtatagggagagagagagagagagggatttgaattaccacatcggaaatggaatgggcagcatcggcaatgatagcagtactcccggataaataaccagtaagagcttttccggtggctaaaacaacgtctgaggcgaggccgagcttgaatatcttctcactctccccaccagaaccatgattgtgatgagagtgaccaccatgccatcttctgggaatgccgtaaagggggtgaatttgcaaagggttttgggcaagggaatttgaaggagacaaaagtcgagtgtttgaacaaaatctggtgatgcaaactctgtaaatcggattcaaattacggaatctgaatcccataattgatgtccgatcaaaattcaaaacaaccttcctcaaaactggttttccagtcgagtgtgtagtgaacaagagagaactctctctctctctctctgtatggaacagtcagatcagaactgaaagcagcagttaaaattaacgccgttaaccttgggcgttatatcaacgctgccacgttagagtaaagttaccttggtggcgccttatttacgcgctgtttctttctagtgttattagtttttttttttttcttccaccgttccttttttattttatttaaaattttattaattgggcattttcctaaggcactaagagtatttttgagaatctttaaaagaaaaatatttgattacttttaatagatcgctgacgatagacttatctttgtgaaatctaatagagaggagtgctcacaaattaaggagattatcttgaaatatgaggcacttcaggtaaaactacaaatttcattaaatatgaaatgtgtttgggaaaaggattagtgagcattaatacaagtctttttcattagtaatcaaatagttgtatttgtttgactttgaaacacacctcatttattattgacatatatttattgaaacaaccttatccggtccaattgattctgcttctccttttcacaagaaacttctatatatggcgtcatttattttttaaagaaacttctaaaaaagagtggcaattttttaggtaaagagtgttgagtactaagacaagcactaggggttgccaatttttgtgggaaagaagaagagtgagttatttaatgcaattaagacttgggttggaatagactaagagggtggaagcgtagtttgatctcttcggtgggcaaagagatcctcatcaaagcagttgttcaaactattccgtgctacactacgggagtttttctcctttccaaaaaacttattccaaagctgcatagtatgacggctagattttggtggggatgtcaaagaaaaagaataaaatgcactgggaagcatggtctaagttgtgtaaactaaaatggaaatacagtttgagcttcaaatatcttgactttttcaataaagctctccttgggaagcaagtttggagagtgttgagaaaccttagctctttagcgggaagggtgctgaaatgtagttactttcctaatttcactattctggaaggtaaataaggctctcatgcagtgaaaatatggagaggattattatggggaagagaagttattgagttggggtcaagattaagagtaggctcgagaaaaaatattgatattgttaatgataagtggctgtctagaccgtcaaggtttaaaccattccttaaaccagagctccttcatgctatcaaagtggttgacttgagactcgctaatggaggatgggataaggagttcattaagggttcgtttggaacgttgtattaggtcgtattgtattgtattgtattatattaaatttgattatatatcatatgtgcaaagagcatggtcaaatagaaacaatcagccatgctttgtggaagtgtcgatcggtcaaataaacatggaagaaatgaggtatgtacaaagatattggcaaatgggccaatcctaatatccttagctttctttaaataaaaatgatttatcaatatacattctaattatattgtaagatatataagttaaactttattttctttttttcaattttcattatccattaaaaggatcgattttaagaatagggagactagctttatgtctagaaatctaagaccctattttttcaaaagaaatattagtgtagactgtggaatgtgttaagagttattattataacataataattttgtttgagaacattttgctccatctttgcaatcccattccaaagtctctcctcatcttcacacatatactttttagattttacatattagtaactttcataattatcacaatagatcaggaaattcaaatattaccatttgaccattattactcaaagatatcatgtttttttatagttttaatttaataatttcatttatagcagcagccacatttcatttgttctctccatgggtatgttgtcatcaaatcaaaatgatggtacaatgcataataagtgggtg

SEQ ID NO: 184773 - DNA, 2721 bp, Cannabis indica
tttgaattgtgaattgaaatgaatgaacctttttttgtgttgtgtttattggttttcagcaaggagcagatagacccttgtggtttgcttccaaacagagcctttcttacttggatggaaggtatatataaatatttatatatatatatatatatatattcattcaatattcatacatttatttaatcaggtctcaaatggtttaattctaattaagtggagaatgttattacaaattgtatgaacaaccatattatacataacatatttattgttactttgctagttacctccttaattttatatttagacaaatatatcaaaaaatattagttaaacactgtaatacaattttaataattgaataaattttattttagtaccattaaatttataaaaagaaaaaaagtttttaattttaatgtccaacaagtcttgcatacaatacaatcttttctttcttttatttttctcacttcaaagaatttagaggaaattacaaattttatgagtgttttatattttttgtgcaaaaggattatattataggaaaattaaagaaaaaattaaaaaatataaaaaaatcaaataactagatgagtaattagctaccgaaggtaataaggtaacttgtgttgttttttctctttctattttttaaataattttcataataatttttttaaaaaagttatatttttatacgtgaaaattttccaataatttaacctatttgttttgggatttttccaaaaatattagatttttcaacaaaaatttacaattttactatcacacagatttttttataaaaatactaactttttataaaataaccgtaaaataacaaaacacaacaattaaaacaatagtgaaacaactaaaaaataacggtagaataccaataaaaacttaacattttttaaaaaaattatgttcacgcaataaaaagtaaaaaagttagaaatttgacgtgggatgaaaacttcatttgcttttgttaaacagcttaccaggtgactttgggttcgatccattgggcctatcagacccagaaggcacaggtgggttcatcgagcccagatggctagcctacggtgaggtcatcaacggtcgtttcgccatgttgggagccgcaggagccatagcacctgagatattcggtaagcttggtctaatcccagaagaaacagctctcccatggttcaagacaggtgtcatcccaccagctggtacatacagctattgggccgacccatacacacttttcgttatggaaatggcactaatgggctttgctgagcacagaaggttccaagattggtacaatcctgggtccatgagcaaacaatactttttgggccttgaaaagtaccttggtggatctgataacccagcttaccctggtgggcctttgtttaacccacttgggtttggaaaggatgagaagtccatgaaggatttgaagcttaaggagattaagaatggaaggttggctatgttggctatattgggctattttattcaaggccttgttactggtgttgggccttaccagaacttgttggatcatctagctgacccagtcaacaacaatgtattgactagtctcaaatttcattaagattaatggaagatgttgtataatattttgagtagtaacatcatcaccttttgttgctatggacaacgaaaacccttttttgggggatttgtttcctttcttcatctcattgttacattatgtaagaatcttttctattttcccttttctttatcttttgtaattttgtaagaaatgacttgtgaagaaaaaaaaaacaatgaacttagtatatagacatgctcatatgctagctcaaaccaggagtatgaaaattaaaactctattttcagcaatttcactttttttaaatttaataaaattttacaaaatatcttaaatagcaatgaaaaatttcattccagaaataactaaggtactagccagcctatttggattgatcgttgaaatattataatttttacatattgagcttaaggtaaaacaaatgagttttcaaattgaaatttcccacgttaaatttttttaaaaaaaactaacaggtaccctagaattatgttaagaatcagaattaagaaaactgagacatgtagtaaaaataaaaatgaaaaactaatattcattgttttgagataaaattaatcacatgaggtaacagaaagggctactcgaaggtcatttgaggttccacatatatacattcgatatgtttctatttcttgttgttgatgcaatccaggagtgtggctagcatagtggttacctgttaatccgtcacgaatcgaaaatattatctccctgagaatcggttcatggccattgagaagattgcccatgcttaaaacttttctccacgattggttagctgttgggtgtgtaaacatactagaaattactgctcgttcccgcgcccttacttgttgcctcttgtcaaactccttcagcaaagaacaaacgaatcattaagtatattagtgcagttataatatttgattacagaagtgaactaagccaatgttgaacaatttctcgcttagccaatgttgaactacattttaagcatttacatgtgtttctttattaacatccatcagccgcatcagacttcaatcatgcacttaaacttttctcaccgttaaaatttttctgtgaactat

SEQ ID NO: 184774 - DNA, 4098 bp, Cannabis indica
tttgggaaggccttctatgaatctatgattatttcgtcccaaacttgtgctggaagtgggaggggctggagtaatccggtaggttaagtattgaggagtttattttgttgccccaaaaagttcagctgcgatgtgtttataagttttgagcttgcctaaatgtcctcgccatgggacttttcttaaaatcagctaggatgtgtggaattatggtgggttttctttgggatagctacttttgtagtagaggatgtgttatggagagtgaaaacgtagtgttgttgattactgacgtgaatatcatatcatagctgagtaaggaaggcatcagcggcattaatactagggtaattttagtgggggtaatttggtcaagtaaaaaattcattacatgaaattcgggtttcccaatcataatcccaaagctggtgcaactcagtgagtaaggaaggcatcagcggaattaatgctagggtaattttagtgggggtaatttggtcaagtgaaaaattcattacatgaaattcgggtttcccaatcataatcccaaagctggtgcaactcagctttggctctttttttttctgataaaaaaaaagacgcttaaagacagctttggcttttggcttctagctgcaaagagcttaataatataagcacttttttgtttcaaacagtttggcatttagcttattcaacaagtgcttttaagtttctctaaaagctgtctaaatggggcctagatctctccaaagagatctctttcaaatctaaactctttcaacataaccgaaactgagttctaattctctatatatagagaataaagcttgcgcatcaacaacttaattaaaagctactaactaatacaaaaagaacaactcagcctaaaacaattaatgaaagactaaaactgaataaactgctttaataaaacttatgcttggccttttctctttttgtagacacattggaccagggttatcagaaagcagtctgagcaagtgatctggttgtatttgttttttgttttacaagttctgtgactcttgttgatgcattttttttatatataatcaactaagttgcctgcattctagaaaaactggtgcatctcaaggtttttgcactatgtttttgccttattgtcatatgtttgaacttgcaggttttggaagagattcgggttggcctggaattaaatgactatggtatgcagcagagacgcttagcccatatgcgatttttaggagagctatacaactatgagcatgtggattcgtctgttatttttgagacgctgtatttgattcttgtctttggccatggctcaccagaggtattcttctatgtgctcagaacaattgttatgaatcttttttgtttctgacatacatgctttgatgtgaaaataatagatggaatctcttcataccaacggggtttttttcttttaagttttatttatagatgctatttgggatggtgatacagctaaagtgcgatatggaaaatgatttgtgtcatttggggtgtcatatagctaaaaggagaacatggtcttatggacttgtatgtcaaaaatgaatttttaatgacactatgccatgtataactatgtctttgtttttcttaatatttattttgtttgatttttggtgcgaaatatattatgtaaaaatattctgacatggtatctaatattattttcccatctcatagcaagatctactagacccaccggaggattgtttccgcatgaggatggttattactctccttgagacctgtgggcactactttgatcgaggctcttctaaaaggaaacttgatcgatttttaatacactttcaaagatatatcttgagcaaaggtgctttaccactggatattgaatttgatttacaggtatttattgcagtttattttttaatttcatttgtagttgttctttttgcatgctttgatgactggaagtaatattatagcaccgtttatattacacctatattatatgcttgaaatgagaaaacactgaagtctgttatatcccttatgtttttgaaaatgtgttgtatcttcattccctttatgcactcaatttattaccttcctggaatttgagggagatctattgtactgaagctttcattttcaggatttatttgctgatttacgtcccaatatgactcgatactcatctattgaagagttacttagctctggtggaacttgaggagcatgaacgtactctcccatctgacaaaacaagtagtgagaagcactctgacagtgataaggagttctttcaactctatttcagcaaatggacagagtgctgtgaatggtaacgagggaaatggtaggttgcatgatggccttggagacagtgacagtgattctggaagcgggactcttgatcaagaggggcgtgatgaagaagaactggatgatgagaatcatgatgaagaatgtgatactgatgaggaggatgacgatgggggtggacctgcctcagatgaggatgaagtccacgtgaggcagaaggtgatggaagttgaccctcttgaagcagcaacttttgagcaagaactaaaggctgtcatgcaggcaagtgttttttctttaactcttgtggcatatcatttaatgtgttttattctgatgactgtggtgtggggcttgtgtgctggtggtgaatattgattatttctaacgtcaaattaaattaaatgcaggaaagcatggatcagcgcaggcaagaactacgtggtcgacccacattaaatatgatgataccaatgaacgtgtttgaaggatcaaccaggggggttggtggtgaaagtggtgatgaagcattggatgaggagggtggaggaattaaggacgtccaggtaaaagttcttgtgaagcgtgggagcaagcaacagactaggcagatgtacatccctcgggattgctctcttgtacagagcacaaaacagaaagaagcagctgagcttgaggagaaacaagacatcaaaaggctagttttagaatataatgatagagaggaggaggaactgaatgggttgggaacccaaacattgaaccatatgcagggtagcggcagtagaggttccacccgaggtcacttgtgggaaggaagcagtgggagggggggaacacgtcatcggcattattccggtggtggaatcttctacaacagaaaaaagtgaaggttattatgctagaaggctttcttgtttttgccacaagttcaaataggtacagtaaactatctcaatttctaacgagatttgtcgaggctgcctaaaacgaagcggtgccttttctgcaagactgatgtgccgtttcttaccccattctgatgagctcaatagtttaaaaaaagtagcgcttcgggaaaaatgttttaagaagttcaattgccaggtagttagtgcgagacacaatgctatgtgttttcagtttctgatctgcaatgtacctgtgggatttgattgtgtgctgtatagatcctgcgtttggcatttgctgcagtttgcatgtatatatattatgtaagacaaaatgaagatagtatgaccaaaaatctcttgctttgttcttattttagatatagtgtaatgatttctgttatacttgtgtagtgactgactcattcaaaccgaacttaatatgcatttagaatggttgagagtttatgataatgataatgcaataccaatttcatatgaccaattcctctattgtatccatattgttttggacagttaatgtgttgtaatggtactcatcgttttagttgccccacggctacaaatgttttcaaatcgtttcgagtccaattgggtaaggtgtggtaattaaaacaaatctataatgataatgtaataccaaccttatacgaccaattcttgtatggtatccatattgttttggacagttggtactcatcgttttagttgccccacggctacaaatgttttcaaatcgtttcgagtccaattgggttaaggtgtggtaaatttaaaacaaatctattaatgataatgttaatacctaacccttatacgaccaattcttgtatggtat

SEQ ID NO: 184775 - DNA, 2465 bp, Cannabis indica
ttgatgaaatgtctgagagaaatgttgtttcttggactgttatgattagtgggtatattagtgttggtagatttagtgaggctgtgactatgtttatgagatcggttgagatgggtttgagacctgatgggtttaatcttgttcgggttttgtctgcttgtactcggttgggtgatttgaggagcgtggagtggattgatcggtacattatggagaatggtttgggaaggaatctctttgtggctacttctttggttgatatgtatgcgaagtgtggaaatatggataaagcgcttcgaatatttgatgggatgttggagaaggatgttgtttcttggagtacgatgattcagggatatgttttgaatggaatgcctagggaaggagtagagttcttcttacaaatgctgaaagaaaataataaaaccggattgttatgcgttggttggtatgttttcgggttgtgctaggttaggtgcactagaattaggggagtgggcgagcaacttgattgataggaatgagattttgtcggtccctgttcttggaacagctctaatcgatatgcacgccaaatgtgggaacatggttaaagcttgggaaatcttcaaagggatgaaacataaagaccttgtggtctggaatgcagcaatttctgggctagctatgaatggacatgttgaagccgcctttggattgttcggtcaaatggagaaatcagctattcaacctgatgaaaccactttcatgggcttgctttctgggtgtgctcatgctggccttgttgatgatggtcatagatatttcaaaaacatgagtagtctattttccttaacaccttcgatcgagcattatggatgtatggtggatcttctttcccgagcaggacatctaggcgaagctcataagttgataaaaaacaaagccaatgaaagctaatgccatagtttggggagccttgttggggggttgtagactacatcgcgatactgaattagcagaacgtgtactcgagcaactcatcgagttagaaccacaaagctcggggaactacgttctcttatcaaatatttactctgctaacaggaagtggaatgaggcagctaatatcagaacaagaatgaatgagcaaggaatccagaaaactcgaggctgcagctgggtagagttagatggcgtcgtccatgaatttcttgtaggagacaagtctcacccattgtccgagaaaatgtatgcgaaacttgatgagctaggacagaaactgaaagcagcatttggttatgttccaacaacagagtttatgttgtttgacatagaagaagaggagaaggaacatttccttagaagtcatagtgagaaactggctattgcatttgttcttatcagtaactcttcgaaagattcgattattcgagttgtgaagaaccttcgtgtttgtggtgattgtcatgagttcatcaagctagtttccaagattacagggagagagatcattgttagagacaataacagatttcatcgtttcattgatggtttttgttcatgtaaagattattggtaaaacaaaaataaaatacatgctttgtttttttttcttggctaatcattttttactctaaacaaaataaatagattggtacatagtaaactagattaaattcatgtagtcaaatgtatggactaattaatattactaggctactttgtgtatatagtattgtacctaaaaatatgtatataatatatatatatataaatttgataaaattaaattcactccctctggtccaaactttaatcacataatatatataaagccagtttcatatttataaaaactctgtgaaatgtgaaaagcgctatccttaacctcttatcctaattgttgtattaaacataaataattaatgatttgcgattccgtatactaaaccaacaaacacgcaacacaattaagaaacaatatatcgagagatcacaagaattaagtaatgaattaaggaaaacagaaagataaccccaggtttaacaagttcgagccttgtgcaatgttctacgttttggttggaacaacaactgtcatatctttattgatatcagtgttataaaggttacaagaatcctcacaatctctcagagattacgagaaatgtttctctctctagtttagactctctctcaattttatactattacgattttcactcaagcaattatggtctaattcactgacacgattacaaagatttgatagctatttataaatttgtattgttgcttaaattagttctgaaactattatgatacatttgcagtgccttaaatgttctagcacatcaccaacaacaataatctacgttagctttgatgatacgcttccagtacaaacaatctagaagctttaatatggacaagctatctagatacgtacatgtgctccttttgttgaaatattctacaaatca

SEQ ID NO: 184776 - DNA, 2571 bp, Cannabis indica
tgtttggttactgagaaactgagaagattagttaattttactttctctttccatttatgtattagttttcactgtctttaacagcatttaatatgtatttgtgtagtcaattaattgtaaatctcaatgagcacaaaacgatttgagtatatttatatgtgtatatcagttacttattttctgagcaaccaaacgggtttgactttttttttgttacttgtgatttaccttttagttcaaaaatgttatggagtttgatatatgttattaccagactcagattatcgattatcttgttgttccgttagccctaatttgtgaagaggtctgatttttaggtgtttgccattatttatttttttttctgggcagaagaaatgttttgattgtggcaattgatttgtataatctcatcaatatattggattcatttaaacttttttctttttacttttaattattgtgttgtttgttatgaagccgatttgtcattaggagcgttattagtttcttaatcaacggtatgggtggctagtgtttgcttagcctgtagcttatatgatatcaacaacatgaagtggttgttttagagtcagtattttcgtttttcatttattgaacttgatggatttgtgcatttctttttattgttttcgtagtttcttttttcaggtaaatgcttttaccgattttagggaattgtaataatctcttcgtaagaactgatacggttctctgattctatgttaaattgcccattccctaacttgatcctaccatttctattgagttgactccgtttgaggttcctcaggtctatgtaggttagaattaaggcctctcttctacatgacacagataatgtctttatataatttaacctggagaatattttcactaagtttataatttgatttgtattattgtgaattggatacttactttttcttattgttaccattacaaatagaataaatggctgaacagaagggaaaggtggtagcatcttttgagtatgagctctttgaaggagatcctgatcacctcagaactgttgtggctacgcctactccagctggtccatggattgatccttcctcattgaaacttaagtacagagttggccgaggcccttttggtgatgtttcattagctactcatcaccagtcatcactggactttgatgaatttcatgaactggctgtaaaggtgttacacccatttgacaaggaccacacacagaagtttctggataagtttgaggagctattttataagtgcagagagttccgcagtgtttgttggttgcacggtatttcaattattgatgggaaggtgaagttgtgaaactaagttttgagttctgttttaattatgtttctattttttcatatcatgaacatggatttttgtttctaagccataattttattggcagatttgcattgctatgaaagtttatgagggatcggtgggtgatagagtagctcgggtaaagggtggcaagcttcagatttccagcgctttaaggttgtatactatactattctttatgaagtttaccatgtctctagagtacatggccttagaattctattgcttacaggtacggaatagggctagcaaaaggaattttagaactgcattcaatagggactctagtattgaacctaaagccttcgaatattcttctaaatgaaaatgatgaggccattttgggagattttgggatcccgtatctacttcttggaatcccattatctagtcctgatatggttcttagacttggaactccaaactacatggccccagaacagtgggaaccagaagtgagaggtcctatatcttttgagacagattcatggggatttggctgttgctttgttgagatgttgactggcgttcccccgtggtttggaaagtcatacaaagaaatatactattctgttgtgatcaagcaagaaaagccacagattccaagtggtttgcctcttactcttgggaatgtcatcagtgggtgttttgagtatgatcttcgcaatcgacctttgatagctgatatattaaatgcgttggaaaggtattcgactattcaagccttaatgtttttctatttgtgttcacatggattgttgactattattccaactgaatttgcagctcacggaatgctatcgacagtgaagaagaatggtttggttcccgaaccagttcacttataggtcgatcaagttctggtgacactgcatggtatgtctcaaaagatcatcttctagttggtgataccgttcgctcaaggaagccactgaattcctgtagacctcagaccatggatgtccctgaaggcactgttgttagtctagacagcaactctgacagagatgattttgttctggtgaagatcactggagttcggaaccctgttagagtactcatctcaacaattgagagggtaacatctggcctttccaggggtgattgggtgcgcttgaaggaatcccctggcaaacactcttctgttggaattcttcattctatacagcgagatggaagtgttacagctggatttat

SEQ ID NO: 184777 - DNA, 3906 bp, Cannabis indica
aaattaaattattcatggctgcgataaaaataattaattaaattactcaagtaagactcatcttacttaaaataattaatttattttttttttttaccaatatatctcaactaattaatggctgctgtgataattgataaagtgttggccacgtatcacaaatgctttgactcattacatagtcaaattatagaatcgtcatgccaaacgtcatggattttcttattcttcttcctcgtatgaaggttctagcctctaggtaggcttcttcagaaattatagtatataaacaacaatagatacactttcactccattcataaagcatcatagatctttgcatatctgcttttaaagtgagttataataacagaggaaatggcagcttgtgtcgaaaattgcagaagccaaaactcaactaccccatattccttagaatctaataaccaatgccaactgagcaattccttaagcaaattagtcaaattatgtatacccactttgccaatttccactcgtatcaaacctgtcagctgggtcgatgagaagatttcaccaacatacaacttcttgccccaagtaagaaatgaagaacaaaaagaagaagaagaagagttgtggattcagattcaagaggaagcaatgtccgatgttcaacaagagccaattctccacgaatactacacctcatcaatattgtcacacaactccctcgaaagctcattatcacatttgttggccatgaagctaagcaattcaagcctatcaaagataacacttttggaaacattctatagcgttttcatcaaagacgagggaatcagaagagctgttaggaatgatctgaaagcggtaagagaacgagaccctgcttgtacaagttatgttcattgcttattgaacttcaaaggcttccaagctagtcaagctcacagagtggcacataaattttggtgtcaaggaagaacagccatggcaactctgattcagagccgagtttcagaggtttttggggttgatatacatcctggagctaagattggaagtgggttagtgattgaccatgccaatggggttgtaattggggagactgccgtagtaggagaaaatgttacaattcttcataacgtgacattaggtgggacagggaaggtttctggggataggcatcccaaaattggtgatggggtgtttataggagcagggagtaaagttttgggtagtgttagaattggggagggtgctaagataggtgctggttctgttgtgttgaaagatttgcctcctaataccactgctgttggaaatcctgctagactaattggggcctaattgaaagattaggaccaaatcagtactgccacgtgttaaattgtaatatcttatgtcaaatcattgtaagagtgctccaacatcttgttggctagtagattttctatggtaataagttgttgcttccaaagcctctactttcatatgatataatttaattttgcatttatatatcataaatagtgagaaatattattaatgaataataaataaaccgataaatattattaaaaatttaaattttccttaatgtgttttagttaccatttttcaaatcccaaacaaccggagaaacattaacactatgttgggtgagaaggaaggaaattagaaaatagtgaaagtttagaaaacatgatatgttgtttggtattagaagtaaaattaaaatgatgtaaaaataattatttattataattattatagtatctttatttatttattattaaataaatttacgatatttaatatactttattttctcattttctctttcttttgatttttaaaagaattgaattttgtatatttaagaaaatatacttccatctctccttccatccttttccttccactcaaaaattcttcttgcctagtgtaaagagcaaatcaagaagagaaaaaataagaaagaaaaaacaactcatgcacacaaacaagaacaaaagaaaaacaaaatgcaagatgacaaaaaatggttgacaaaaggttgaatagttccatatatagtcacaaaatctcatcccataattcttccacaagcttgcacattgctctagaataaacatttctttactcttcacttaacttttatgagctatattttagttacaaggaaacaaatgaagaagaaaaagaagattattactgcattatataaagagatagtgggtataataatgagttcagagatgaaaatgagaagagtaccatgtggttgttatttaaactataaagattctgatttggtaccaaccaagttgaaaaaaatgggaatatgagattagttgtcccattcaaaatgttgcgactttatattggtagtatccacttccctccaaacattttaataattaaatttaatatttcaatatagagagtccatcctcctaaataatatttatataatataatttcatgcactaaacttactcatatattgctacactcgtccattttatgtcaacaaacataaataattaacaattaaaacttatacacaatagtttttacgaaaattatagcacatcgttccgtatctataatatttgctataattaaacaatgtttcaaatttgattaaattaaacttcatttccttactaattttacgttcattattggcattttcacattaactataaaaatcttggcattaatgccatatctttgatttttcatcaaaattatgttatcaggagagtggggtttcgaatttgaaaaattctctctctctctctctcttaataggaaatgtaattataatacagtaataaactacatgtctatgaattacaattaataatctttatctgccacttttaatggtaaataattttaaaagcgatggaaaggtttcctaattagtcggacagtacagaattatcaggaaaacgaagaaaggaatatggcattttagaaatagtgggccccactaggcccagatatagcagacaaggaaggcccaaagtctaccaatgatacaaaaatttcccgccacgtcaaaaatggtattttatgtaatttaataagcttgtacgtgcacttagttaagagactcccatcaaacccaagaacccgcgcatagcgtgaaatttgaattcagacagcgcccccctgagacatctgcaaaagttgccacgtgtcctcaaccacatccccttcaacctttttcttctcaaaacaaaaacctcttcatatcacttctcccttcttctcttccaaaacctctttgctaagaagaaaagcttcggagagtaccaatggcgtttgtaatgaagccttcttcgcgctacagttcgtacgattcacgctcttcgacttcgtctcacttctcagatccctcttcgtcgacggagttcatcaagcgcaagtcccctctacccgcaaagaactcatcatcctcacgcgctcttgtcaaatccaagccctctgatatatccaagttaaaatccaagccatctgatccaaactttactaccatggtcaagaaattcatggagaagcgttctaattcttcttcatcgaaaacgaaggtggataatcgagtgggtctggtcattccttcggatataattgctgaagatttgaagaagacggcgaggaagggatcgaatttcggaactctgcacaagaaattgtttgggaaaggaacgtcgtcgtccgagaaggagaagaaggaggtgaaggcgttgactgaagtgaaagggaacacgaggacgctggctatggttttgaggagtgagagggagctcttaagcttgactaaggagcaggaaatggagatctccgagcttaagttggtgcttgaaaagaaaaatacagaagtcagtctctacttatatatatatatata

SEQ ID NO: 184778 - DNA, 3620 bp, Cannabis indica
aagaacaattatatagcacctatattgaaatggatgcgctacgattacgaatgtttgattattttgaattctataccaaacattttaaaggtttgttggttttttttatcttggtttttaaatttaattttaaaggtttgttgtttttttttaaactgttttatttttcatgttaagaaaaatattaaccatacttataatttagcaaaagttgaattaaaacattatattgatttataataatagtggaaacttccctttaaaaaaaagtactaaataatgttcacatgccttgaagagctcaagtttgacccaactataatcaccaccgtcgaatctccatataactcgaggatgacgcatgctgtgatgaaaccacaatctcaacggtgacacttggtcgtgtaaaagccacgtggtgaatccacatgcctccacgtgttcatgttcgcttggggctttgtatatatatgtgaagatggcgttctatgctccctcgttatcaaataccaaatgctttgtatttcgagtcgttatcttctctatcagaaaaatctgaacgtgattgctgccatttctgggtctctcgatttggctgaacggttctccactttgaccaagctcagcccaaaatccacacctttgagcttcaagccgattactccgatctctggttatccagcgacgtcgttttctagcaacctctcttgcgcttcgcgatcggaacattcaatggctagccaatcccactccggatctgttcacgacttcactgttaaggtttgtcatttgatttttaatttattactttaaacagttctcggattttctctctgttctctctttcttcttatttactaaacgacatcaatttattttgttttggggtgagcatcatcaaacgacagtatttaaaaaaaatcaagacaattttcttgaaaacgacaatgctttgattaacgacaacattttcactatataaaaaaaagtcaattgctatgtttatattttaaacgacaatttactttgaaaaaacactttctaacacacatgaacgaataacgatcgcacgtagtataaatgacaactaacaagagagaagaaaaaatagacataattgatattcttttcttagtaacaaattctgaagacagaaaaatatcttgccaattgtcatattatattattggatatatgctaaaataataataaattaattaataatgataaatgaggaaaatgagcggcagggaacagaaactgtattttcattatatatattagccttcttgtgactctaacgaaaggtatactttcattcatcgatccatggctagccaatctagtaccacatctatccatgatttcactgttaaggtttgcttaatttttttatttttatttttaagttatatatatatatatattgttttcttgaggaggaatttccaatatattggttattttcattagaaaaagttacctatgtatatattgtgtgtgaattgctgtttatgaacttaaagatcctatgtgattgcagttctcccagtcatctttcttggaaccttgacaatgatagtactttttgttgtttagatttcatatttgaataataagaaaggagaaatgtttttctttaatcttgaaagttaaattgatggggcttagaaaaatatgtgatgtagaattttatggtgtctgaagtagatccaactcaaactatagccaagtaatttttatgattctgttttcagatcataactttgaacatgttgtaagcttgtttcttgatctgtgtttgggttatctgcttcaacattgagttcatttagattgtttctcctttgtctttaatgggttgttcttgaatttattcagctaataaatcttctttacattttaatagttttgtggcaggtgatgtactgtcgtttgcttattctttttcatttttgaacacaagttaaacatgtagtttttctctttttcatctgcaggatgctaagggaaatgatgttgatctcagcatctacaagggaaaagtccttctgattgtcaatgttgcttctcaatggtacggctttgattggctttgattttcacaatcatcttttatttgttctattactactacacatatgcccccgtttgggttaaaaaagcactcttttgtgaagctaggattctagctcctcaaaaaaaaaaaaaattgcttaagctttgccaaacagggccatagtgtgttaccagaaaagatccaaaaaagagccaatttggatgggggtgactgttttttcggtggaagctttacatttatgaaaagtcagtgtgtttgctgatttagcttaatgacggttcctttataatttttggtgcagtggcttgaccaattcaaactacactgagctgagccaattgtatcagaaatacaaggaccaaggtttgtcttgcctctgttatattactctcatttttaattgctttcaacagaaattggttctctcactcatgctataatttaaactgttttagtaaaattcttcccttgagatgatgtttgctagtttttgtctcttttcaactgccataagatgatcctctctctaatgcacggttgaggtctaatagataattttcaactcgtaggattggaaattctggcattcccctgcaaccagtttggagctcaggagccaggaagcaatgaagagatcgtagagtttgcgtgcacccgcttcaaggctgaatatcccatattcaacaaggtacagcaagttccacgagaattaagattttgctttcctctcttttcctgtccacagaatttgaattgttaactgcatcagagttatcgaaacaaacaagatttgaactttgtatgttatccccaaatttaggtggatgtgaatggtgacaatgctgctccaatctacaagtacttgaagtcaagcaaaggtggtctttttggggacggcatcaagtggaatttttccaaattccttgttgacaaagagggaaaggttgttgaccgttatgcacccacaacttcacctctcagcattgaggtaataacaataacaaacattatactgaattagcttctacttgaccaaagtaagtaatctgtaatagatttctggggttttcttgttcttattcttgcattttcttttcctattttgcagaaggatgtaaagaagcttttgggagttgcgtgagtcaactcttagttcgtaatcaataaaggacgagttttagtacgaataagcctctctgtccatgtatttagtggcccccattggtggggcataaatatactcgagctgtattttgtttttatgtattgctgaaccagacttcattttgaaatgagactgatttcgattgtatatcgatatacttgtgtcctgtgtttttatgcatatgagagggtttcttaaatgtccttgcgtgtatgaacttataaatgcaaacttgaacagagtgatgaatacaacaaactcaaaaatttacaaaagttgcagactaaagaatgagaggcctttatttatagatgagagattacaagaatacaagtgtaaagaaaaggttaattgaaaacagttaactgttacaac

SEQ ID NO: 184779 - DNA, 1241 bp, Cannabis indica
tttttttttttttataattaaaccaaattaacttaattaaacatactttaattaattaccatatccataataattatcatctacaagtaatagatcaaaaccaaggcccaatctcaagtgggccccaactaagaactcttgccaaccattcatcatcatcactcccacgatcacaaccgtccatttccactactccatttttcttcgtactattattattcttaatcatcacgacttcatcatcaaaaccttcatcaccccacgaccaatcacaaccacactctctccacattgccgccggcgacccaacattccggccggcgacttctccggccgccgccacgtactcaagcccagccataaccgtcgacgccgactccgaaaacgacgctccacaactctcgttattgatgtcaaacgacttgggcctcgccggcccaaacccaggcccaagcccaggcccattactactaatttctctgtaaagctcttgcatgacctcttctataagctcttctctgatgggaatctccggcgagatttcggcggcggtaccgtcgtcttcctccacctcctccgtcataaggccgatgaactttccggtaatgtcaccgaaggcttctggatcgggtatgggctttgggccgggctcttccatggcccaataaggagagaattagtaagagagagagaaagaaaatgaagatacggagcgaagagaggaaagagtgaacaaaacgctttataggaaaaagtttgtgccacgtagtaatacagtttatgccacgtaggatgtcacgtggataagtatgacgtggcgaattaatgttggggttagtgtggaatcgggtgatggtgagtacagacaaaagtactgtggtcgctcagtttttttatttttttgtcagattggggaagaggaaaagaaaacgagagaggctttattatcgtgtgttgtcagattcatcgttgggatgattttgagccgttggatgattattgtggtttgactcttgaatgatcggacggattagagtatgggttagacgttttggtggtttaacaaggatgaaacggacgaaggttacctcgagaaacatgtttttttgtttttgttgcattaaataccgaaactacccccgcttttgtttttggccttgcacgagtacacttgggacaagtgcttaacattcatattttaagcctaacgttcttgatatgttttttttcttttaattttt

SEQ ID NO: 184780 - DNA, 1926 bp, Cannabis indica
gtttcgatcaatgatggtataaagctcagaacttttatctttctagataaaaataaagtaactttttggttagtttatgaattgtgaattgtagataaaaaaaaacagtacttttctgggtagtttatggattgtatttcaaaatctgggttgcgagaaggaacggaatctaccttttcatttgttaaacataacgatgtcctttattatatgcatgaaatacattttgttccatattttcttggagagcaatgcatttatgtttgtatgtcctattgcgtattttggaagatttctatttaaattctctataaagtgtcatctatggagattactgtctgattctgaactgcattctgaatattttgaacttgtaggggaggttactgacaggggcaacaatagggctagttatagctggaggagcttacgttagtacagtggatgaagcaactttctggtaccatattgtgatttgaatcctaagcatggcagttgatagtatttttaatctcatgcttgtcatttcctagtcactcctttcgtgattactgctatcagtaattaaaatatgatctatgatgataatatacgttcgttttttcctaaggcgatctcgatattcatttgaatgtcttccttaacatgttgctaaaggaggaaaaatgagcggaaacttaactcagatatcctttaaattctataacaatgttactacttttttaaaggatatttatatataattacattttattagttcttgcatgtattggattttcttagtactcttttagtttgtggtttgctgtgacatttgaattactttaccttgaagacatcattctaatcagttaaaaaaagggtttgtgtttctatggatttaaaagtttgataccagtgtaatttgtcgctgacgttgtattatcaaacctatgcagtggctggctattttctgctacaaaattggtgaatcctttatttgccctgctggatccagagtttgctcacacactagctgtctcagctgcatctcgtggttgggttccaagggagaagaggcctgatccatcaaatttagggttagaagtttggggaagaaagttctccaaccctttaggtcttgctgcaggatttgataaaaatgctgtagctgttgatggattacttggtctaggctttggctttgtagaggttggttctgtaacccctgttccacaggagggaaatcccaagcctcgtattttcagattgcgtgaggaagggtaaagttaaaattcttgttaaatacataaaccttgtcataaggacatcagagctaatacagacttttatattcactgtaaaaaagtttgcagatgcgctttaacttgaaatgtacagagtttaactgctttgaagttgtgaaagatatagcatatgtctctgtttatgtgctcagaaattgtcttaatttttcagtgcaatcatcaatcggtgtggctttaatagtgaaggaattgttgctgttgccaagcggttgggtgtgcaacatggcaaaaggaaattggatgaaacttcaactgctacatcttcctccaatgaagatgtaaaacaaggaggcaaagctggtcctggcattttgggggttaatcttggcaagaataagacaagtgaagatgctgctggagactatgttcaaggagtacacacattgtcccagtatgctgattacttggtaaaccttcatgtttactttataaattacagtgattgtattattatcttttttaagataaatgtcaaatcttttctcacaaaaccaatgtttcaactttcaatagaactgtgatgagtgctgacagaaggcatctacaaactgttatttgtaactgagaatgtatagagttaggtagttagtgttttcttgtttgcagcaccttttttttt

SEQ ID NO: 184781 - DNA, 4494 bp, Cannabis indica
gataacaaaccttaatcctttaagctccttgttcatgtcagaaaggatgagctgggcaaagaatacctacaaaagcatgggaactttgtcagcttctaagctaaccctgacaaaatggaaatttaaatccacaattaatagagaccctaataaagaaagtaagcaatcgtggatagttgtcataaaagaaactccaatttcaatcccatttccacccactacatgctgagttcatgagagagtaatgaaagtgcttaccagcccatatccagtagcttcagttcgaaggctagagccagaccaaaatatccttggccctgtaaaacttccctgcataagtagcgcataaatatgaaaacaaaacaaaactcatttcttattctctagcaatactttaaacgaaaatccataacaaaaaacactgatattcagatctgctaaaacaaggtgagatccaaaagaaactactacatagcttgataaaatggataccactgctatgaatgggccaatactgaacaaatgagtatcccctttaaatgaaaacagatttttatacgttataatgaacacataaaagcatatgaatgagtatctatatatgtggtcttcatgagcgcatgcagagacatatcattacaaaatgatattccaagacattgcctagccaaaaaaatatatataattgggaaagtaatgattagttgaacaagaatagagatacctgataatgacctgctaagcgtctatattgtccgaatagataacccatttcccgagtaccaacacccatttcttcggaagggaggtcctagttggtaaacccaaaaaaattttcaggctgacatgaaaaatattcacatttacagaataccaggatcttctcaaattaccttgtcaggacccaaatagcgatagatctcattcatgaaactttggcaaaaccgcattacctgccagcttacataataatacttcagtaaattattatataaagctcctgttattacttattgctattatccaaatcagtaaaattataattgttgttactattattgaatggagatagtgacattcgataccaaaagacttacctcattatcactttttccttttggatcaaaatcacttccaccagctgcccctcctattttgtacggtgatagcgcattctttaatgtctggagaagaaaatatcagtttttaatgaaacatttgtagaactgaatcccctaatctagtgaattccaagtaattgtggtagattgagggatttaaaacatatgagatttttgttttattctgtcataatgtggaagataaatcaaacaaaatacagtagtacctgttcaaatccaagaaactttgcgatacttaagttcattgatggatgaaatcgtataccacccctacagggacctaaggcctgattaaattgtactcgaaagcctcggtttacatgtgtctcgcctctatcatccacccaaggaattctgaagagaaccatacgttcaggttctaacaagcgttccatgatgttgacataactgaaaaacatgtaagagacacattgttagaattctaaaatccctccattaaaaaagaagaaagcagatgatggcaaagccacgtcttttacagaactcactgagaattttttgcaatcactctttctagggcatgaacaacttcttgcactgactgcacaaactcaacctcatgaggatcccttttaagtgcagcttcaacaattgatccagcagtttttgacataagagctacatttaaacagaatccaggtgcattgtcaaagagattgcaatggaacgtaactaataaattctaacatctgcagctcattcaacaattacaagggaaatgtaataggtatacaaaaatcaaaactataattatttagcactggtgaatatatattagcatcccaataaatttagcatgataaaaggttttttgtacaaaaatacatcacacaacaacagactataagaccattactcacaaggatcaatttctaaaaagtttaaaaccagaagcaacatcaaaataatgccatacagaaggaatctcaaaatgaagattagtgttcaaacttcaaagcatactgtacaaacctttaacataaataggtttgtcaacaataattttatccttggaagccatctgaagtcgaagagcctctttgtgaagtaaactgttgttgtgctcttccaatgcactcatctgcatattccggctgccctcatttccataagggttccgtctatgcttcctcccatattctctacaaactgagcaaaaaatccttgctgtcccctccttgacatcaacataagcccatttataggtatcagcccattcctctctccatcttttgaccaccttcttcttcctctttgctggttgtgatttcgacatatcttgatcgtcgctgggaagttgagataccattaccatatgcttactatcatcttgttcttcagccgaaggttctcgaggtgggccaccaataagtggcgtgttagaaaatgaaggatcgtcatcgccaggaccaatttctagatcaatttcttccccaatctctctgaccactaagtggtgcctttgagcctgctgaatcaagttcatgtcatccatcgcagaattcatccctaatccactgactgtaagcagcattcagcatggcaatctttgaaaagcctgttaaacataagacaataaattgctttgaataaactactctaatatttttatgcaaatagttttcaaaacatgacaaatgaaatcttaatcttcaaagtaccaatgttgcaaacttcattcggtgggaattttcaaaataaccttccaaaccaagggcagagttgacagctggcttagctaaggtgagctataaaaagcatgtatcttcaattttgcattataacttaccctgcagtttttttagcagctaataagtgtaagtatacaaaaacatacccgcaaatcgaatccagtaataaaacacataagagtttaattacttagcatttcagacatacaacatgatttccatcctctaaatctaataagagattcagaaacaatcaaccaccaaggtgtaattccataaatacatgtgtccatggaactgcaaaatccttaaatttcctgctactctagcagttagtactcaacttcagttaccattcgagaattcagtctattaaaacaaggtttatcttgacagaataagctaagcaagtaattcattacaccaaaacaaacttatatttatataaactattttctggtacgaaaatcaagaaaacaaagttgtacggatcccaacagccaaaaataggagagtgaagagaccccatttctagtaaagcataatacctttgactctttgagactccccaagcgcaaacaagacaattatcgatttacacaaactttaaattacgaccaaaagagaaaaaaaaacaaaattaacacgcataaagttaattcttttagctaatattcaagaacccagaactacaacttcaacaaattttcggcttttataagaaccatgctatatctttcgattttaaacaatacccagagcctaatttgcaatttaaaggcatacccagaagtcaagatcaagaaagatcatcttttaccgtagaaatggaagagaaaatagatgaagttagcgacactgagttcagactgaaactggcgcttattaaaaaactcttccttctccaaaacttgaattcacagtaaaaccttagccaggtgggaaattcccgaacagaacgagtgagggtgagtgagatcttactccgacggtggataatttaggcctttgatcagattcttcagggagagactgtagatagtttaacgacaaaaaagaaaaaaatggaaactttattcggctgcgagagaaggatgtgagttctactaactgcaattattttcgtgcatacgtaattataattataatttataaattaaaatgctaatttatattaacaaaatatgaaatcacacattttaattgtaatttgtcgcgcgtgttctgcacgctatttttcatttaaattaaaaattataatttgcttaaaaaaagttataattcaactactaccaataaataatttattgtaagaagaaaaaatataaattaagttaaagatatacgttttttttttttatatcatatacgaaaaacgaatttcatgtgtaggtatatttattgttgtagtacagtattaaagtttattgattttttaaaaggaaaatacgtaatgtaaataaaatatcagattattttctaacaccacttaaatttaaagcatgagcatctatgactaattgagtatgagcataatgcaatttgaatataataaatcgttattaccatcattcatattatgtatgatttttttataagacaaaattaagcaatatcattttttaatacaaaaaaaaaaa

SEQ ID NO: 184782 - DNA, 1879 bp, Cannabis indica
ataaaaaaactattaaatttgcgctcatcatgcattgaaataatcttttctttcatttcaaaatggaattgtcattcctctaaaatggtagaaaaatcattctattagaatgacattcaacactttaatatacaaccaaacaaagaaatggaatggagattgtttcctttcctttccatttcatttcattacctctaaccaaacgccagaattggcaactacttacctaatatgcaagagggtcactatttaattacacaaagggacaactaaaaaagtgaatctaaattaattacaattgattttctcattagctattattgactctagtgcaagatggaccatttaggaaaatattaaaatttcaatttttaaatatatttaaggtatttcatgtgataatgataaaagcaaatataggtgttttgaaaaagagacaaaagtcacgttttcatgagtaaccttctcccaaatatatagagaaaaccaacaatgtgttgtacaaaatgcaaacaaaaacacagaaaataaaagaaacatgattagtagagaaaacttctcccattctctacaaagatctaagaaaacctgaattgtggtagcaaatagtgaaacaaacaaaagaattgttttatttagtaagaaagtttaagtttgaggtacttgtaaaaggaaaggaactaacctggagtagcttactcaaaacaatgggccccacaaactgaaatagatcccacgcaatctacaaggagtttagaatcaagttagaaagatttcagtcatcattcatcaaacttaaacatgagaatggttttactaagagaaatttgctgaaaatttcacttttcttatactaagacaccaaattttttacttatgataaaagtacttaaatggtactttttcttgtattttgttggcccttttcttccactttgttaaactgctacctcactttgactctcatattaagccgtcacggttttgtttttggccgccttctcgaaaagtctcatattagtgaagaaggtggaacacttatattcaagacaactcttgcttatatccaaaaagtctcctaaacctttggctctgataccacttgtctggccctatttttcgaccttgttaggccacttcctcaccttgagtctgttttgggcctaagcccttatggttttgtttttgggcaccttcgtagaaggcctcatactaatggagaaagtggaacacttatatctaagacaactcttgcctattcttccaatatgggacttgggttgatacccaaacatatttcaatagtaaatcattaagtttgattttaatgatcatttgttagtttactgcggcaacgagaaatgttaaaaggttacttttattattgttattagtgtaattaagcatcgggtaataattattatagaatatcgttaaccaattaaaaagtgtcgtggtgcaatatgtattatgtattagtactttcacaaagtataggtactttaatcataaatttagtttatttattatttggaataccgtttaggattaaatttctatttttattttaatacaaaatttattttattttatttttaaatcaatgaaagagttatttattttcatattttaaagtatattataaataatgttatggaaaaaaacagttaaagtttttcttaaaggcaaaaaataaataatagaatgttaatacaattgtaactatttacaccccaaaaatttttaaacacaccctattttaataattttaattttatataaaatttatatttataattgtattaaaaaaaattcaactttttttctttcaattcatattcttaaaaaatatgcatatcaaacaaaattaaattatatt

SEQ ID NO: 184783 - DNA, 6501 bp, Cannabis indica
ctacacagagacaaagatcctaaaggaagaagcttcagatgaaagccagcagaataagtcatgtttaactctgctttaagtactgtccagaatttggtgtcccagtaaatgtgattaagaaaagtggttattcttttcttgtcttttgacaatggattccattccaactaaacattgggaatcaccaaactcagacatatgattccatgtcggttgatatattgtactgtagtagtattttaactgagatgagagattaattaaagatttgatctttagacaagacaaggggagaggggagttatccttagttagttgaagttgttttcaaagctaattaatttgggcacccaagtgagagtcagtgtcagtcagagtatacatctcatcaaataataaagaaacaagagaactagagaagaccccatgtaccctactcctactcctactttaatggattgttttcagttttctattttattttgtttgtttcttaaattgattatgtcattggtcacatttggccttacattattacatacatcttaaaataataatattttaccattaattgaataaacagttaaataaatcagcagttttacatgcacagttagtttcttaaacgtaagttggtttggttggattctgtgcaataatttagaacaaaacatcacttacactgttttcattggttgtccttaataatttgacacaacagctgagccttggattttggatcaacctgaactagttactaatcccaaagtttgatttttcttttccttaattttatgaaaaagccaactttaaagttggccacgtgctccttatacttacatatttcctggatccaacaattgatttgaaatcatggagtgtgtccatatttatatttttattattttttacagtatttcatttcatttcatttcatagtgtctgtgatggtgaagccaccacaccaccaccataacttttccttcattttttgtttcacaaaataaaaagtaaaagcagtgtgcctgtgatgcaataattaataattaataattaaaatagcagtggcactgaagaaaggtgagtggaatagcatgtggaaaactggttgtgttgtctgtctggttttcacttttctctcttatagtatcatagaacagatagtcaaaattctctttttctgatatcattccccacaaaaatcaatactaatttacatcttttatagttaatcaaaaaataaatcttattagcagtgtgtaacaaacaaaaaatagaacacaatcaatcaataatgtgatatagagtagactagagtgaaggtggaggaaggagagggcagggactgcaccaccacctacatccttctcaccccttcttctgattcttcttcacttgcccaccttaagctgaagcttgctcatcccgacattcaccttttccacagttgcttccttcttacttgcactctgacctgaactgcttgcattaatccatggatgttgcaggcactgctgcgcacttggtcgcttctctggtgcaaaatcgagaactggacaaagaaactctgcaaactctctggcttcactctctgaaaatctgtatttttcaatcaacagtttatccagtgaccaatattttagtctccgaattcgctttagatcaccgtgtctatcaaacagatccttcgagcgagctcctccgatagctacctgcaaatgcaagcatgtgatacaccaaacaataatatatacatactcacacagccaaccactccacttgaggtgataatcaccaatgacagaatgaaagtagtaacaacaacaaagggaggggaagaataccttccgagggatctttccaagaagttccatcataagagcaaggtgatcctgaaatcatcacagtaaagttcaatggtgactatggatgatgagaatatttatgcacatacaataagatctttttttttcaaccatgaacatgcttaaatcaaaatatggtgacatgcagttcggataaataagtatataaatgacaacagcttaatacaaatttcacaaaggaagatcagaaagtggcaatgattcaaatttatcatgttgaaaaatcattgctttaggaattagctaacactagtaacgaacatcataaactaacaatgattacaaaccatttcaaaacaccaaattgctgcatatttagtctatagaaaatgttttataggttgaagatcttaagtatgaaggtagagaaagcaatccgtacctcgtcctcactaaagccttgtccatcttttggagcaaataacatgtcgccggtagcaagttcaaaagcagtacaagcaaatgaccacatatcaactgagaaggaatatccagattgcagaataacttcaggagccctatactgcctcgtctgaatctcatccatgaactgcttgtcagcccaacaagcatttccaaagtccacaaccttgcaccttacatcaatcccatcccatagttttctcagattttcggagcttgtcctcccatagaagctctcctttcagatatcttggcaactgccctcctagctctccttttcaacttcttctcaataatattcatggtaactcctccattcgggtttccctccggcttttcaataatgggagagtgaccagatctaattgggtctttggaaggatcaatggtgttgaatagaagaatgttttctggtttcagatcagagtggattataccaagttctctatgcaagtaatcaaggcctatcaatatgcatctgcaaatctctctaactttattcagttccatgcctttgtaacggttgtacttgattaggcggagtaagctatctccaagaaattccaggaccatacaaaggtgctgaccatttgggcctgcatgcttgaaatgatcgataagtctaacaatacatttagaatttgaagggtcacccttagcaatggcagaaaggagttcaatctcatgaagagcagcttgagcaaattgtgctgcacttttctggatcttaagagcaacatagctctaaaaaaacattaaccaaaaaaattcaatcaatactagattcagattcaacaagaaatgctcctaaagttttaagtattttccttcaaggatcagtttcacgtgcatgcatgtagaaaattcaagtcactacaaaacagaaacgtataataatgaagatcaaggatctaaaaacttgaattaacagatgattttcggaaaaaggcttaaagtttgagtctttcagaagcaaataggatttagattgaacagctaagatccatatatattagtttatccatcgaatcgatccctaataagttttcaatctaaatttcagggctattcaaataataatccacaagtatgtatgaagataataataataataataataatcgttgaatttgttgaatggatccactcatgatatataaaggaagttccaaaatggaaaaccccaataacgaacaacggtttaccagttagcatccattaatgaaataattaaaaaaaaaagaagatgaagttgagaactttgatcaaggaaatgattaaacaaataaacaaaacagagagagaaagagagaggagtacagaggaggtggtatcgtaggcgagccagacggtggaaaactgaccccaacctagctttcgctgagcaacatagcggccgccgttaaattgatcgccgactctgacggcgtgatagcctccttttctgtaagagtcaatgccctcgtcgtcgtcatcggaccctgatgaagatgaacaagacatctctctgaaacacacctgatcttctctgattgttgatcgtcgaaagagaaagagagagaaaatgaaagagaaagggaaaggaagtttctttctgaaatggaaaattgatttctagttttaactatttcacatattttctcatatactaaaaaaattcaagctaataaccttttcttttttaaaacaaaatatttaaaaaataatttaatgtaaaaacaaaagggcatgaaaaatgtttggtttggtttttgtgtttgtaaatggtaattaatttgtagccttcaacacaaagcctctctttaatttctccacttttctctctttctttttcattttatggttaatacattaattttggttggcttttgctttccaaggtggctcatattcatttccttatatatatttacctctttctccctccactccactccattccattccattcttactttttacttttttatgtattcattattattattggtatgtatgtatgactaatgggggtaatataatagtgtgcaatatggaaaggccatattagatagagaacaaggtaaggtagaagatgatggggctattgtggcctttaaagatcattttctttcggtttgggtgcttcattctttcattaggtgaaggacaacacaacatattatatataaatgtgattattctaatattttttatggataacttccaccaccttaccatacctgctcagctatactataatatatattatattatcatataatcttctcctacattgggctattgcatctttgtttgttagtttgtaatcataatcacaatcataatatcataatcataatcataatcaaatgaaagagctttaactttacatttcaaaaatctaactgataagataatggacaagataacttcccttattctatatcccattcaaccaaccaatcacaaaaagtaaaatctaactcaaaataacttaaaactaaacttaactactaagcattaatttatgctttggaatggaatgtaaaaaagtaaaatgtacaaaactactcactcactcaatcacttgcttgcttgtctataaaaaagaagcataataatggacactttgcagaaaagaactagtacaccacacagcatttcaagacaacccttttcttttcattgtgattcttttgactcaatttcaaaacagatagctctcaaagtaaagagactgcatttgatcaggattcattcagtgggggcaagtatatgcaagagagaggaccaagttccagtgactccaataatgagtccaatagccacaatgaagccatccaagaccacaccaacccaacccaactctcttttgaatacaatcaagtggaataaagcaggcaacacaaaccccagaacaacacacacactgcttcccaccagagataggaaatcagcaaaattaggcacatacaaagccaccaagctcaccaccaaaaccagtccccatctcagccacaagcaataggtggaatcacagaaccttctctccatcacttcataaaccgggttcatcatcagtggtaaggtaaagaacaggttcacacacagaccaagctgcaccagtgtgctcacaagcccctgaccaaaattggtggtgattatgtccctggtttcatcaccaaaagcaaagtaacccaacacaccaaatgacccgtacaacagagcaatgaatgccatgcatagtcccaacactttcccaaatttggctttgtctttggtttcagattccaatggtaatatcattccaataccttcaaaagcgtagactgccactcctagaccatagaagaaaactgaaagccccccaaatgcttgcaaagctggtttttggtttagaaagatgaccacatcctccaccatcactacccccatggcgcctagatcaaccacatcggcaaaaatgctgagaggggccaaatgggtaagggttggaatcgaattcagacccaattggaatgggaaacaagcccagagaaagagggattttggggacacacccagacctaaaaattggtaattgaagaggaaagctagggtattggagatgaagatgaggtagctaacgcagaacccagcttgagctaggacgagcatgatgtcgacggataatctaccgggtggaccgcagacggcgtagcctagatcgccgaaagatgcgattttggagtagcccagaagggaatcgaggcggcggcgcgtggcgatgaggagcatcatgcagtggtaggtaaggaaggcgacggagaagaggacgagagcgccgaagacccatcctgtttttctgaaggcgtaaggtaagccgaggacgccggagccgactatggcgatgaagacgttggcgaaggtcttgaattgggaggagagacgacgaggcttgcccagaagtggggtgtcttctctgggtagagatgaagtggaagagcttgctcccttatcaaataccaccatgattattattattactttctaaggtttgaatgaaaacaagttttgagcttttcgattcagaagaagaagattgtagaaaacattagcaaagctgcaaaggaataggtagaagaaaataaaaatggtgtctttttggtctaaaaataacaagtcaaatccaaattggcatcttgggcaatggacatggacagggacaggg

SEQ ID NO: 184784 - DNA, 1257 bp, Cannabis indica
tgacaaccatagaatgaatctaagccatatttttgttgtatactcctcttgtttcccataagtaccagaatgatttgtaagaccagactaaacagaaccgacacacgaatctcggatcgattccagaatttccggaagcctttggaaatgaactcatgagccatgattatgtatataaatacaaggctaagttatgttggtggtcttacctctttagtgtctgccagaatattacaagagatcaacttctacttttcaaaaggaggagagtgtagttgttgtgttgtagagctatctagaaattaatatataagaaaattagaattagagaaagaaaattaaactaaagaaaacaacgagtaacatcatacgtacattaggtgggtggtgagtggtgagtggtgagtggtgactgcagtagctttgcttggcattgacttattacctgtgtctttttatcaattaatcttgatatttgtttgtttagttttgtttgcaactgataacactagaagaaataaaataaaacaaaacttaatttgctaagagaaagtcgtgtaatgtgtatgactccatccgtgtcattgaaattattttaatgctgctgtacctgtactgagactaaatgatcccatagatgcctatgcataatgcatgggtaataatcaattactttacaattaccattatacccatacgttacttcttcttttttgaatttgttttattttagtatttcatatgagtagtaaatttattaacaaagataatcataaatttctaaaatgttttaatttaatgtatttttatataaatacaatcagataattttttatgttcatttttatgtcttctcatttttttttgtttttccttagcttatagttattttaattttaattatatgaaattaaggttattagtaaaagacttttaattatttatatatttagtacgtatttctttattaatttataatatgcttgttttattttaatgtctaagtacgtatttttgcaagattagtatattgttttggttgttttgtaccctttttgcgatgtgccaatttttgttagtttttatgtctttggtttgaaataatgtctttttgacatatctcactttaaaagtctattatcaaaaaaatcacataaaatttcagatatgactttctttaaaagtataatttaagttttttttttttttggtaatatagtttataatattttgtaagttattttcaattatgtgtta

SEQ ID NO: 184785 - DNA, 6009 bp, Cannabis indica
tttttatttaattaaatcactcgccaccaccaccaccacgtgctattcctttattcctctactccttctccgacccaggtgatagtatcgtacaatacaatctgtaaattcccacgctttcacttcttctgcccattttcattttcactttctctacaaaattttctcttagatcccaattgtacttgtctcttttctttctccaccttttactacttctgctctgctactgaaaaggaaacttctcctacctgtataataaaaaccttgtaatttggataaagaagttgaatcaggttggtgaatgcgatactagaacaaatgcagttgaagcctcatgtttatctggataattggagttggagatcacattgattgattgattgattgatgggctttccactccaccacctcaataacaacaatcttctttcagcagacaccagacatggatctctcactttccgattcagatttagtttagttttttattctgcggagtgcttattaagggttagagtttagagatggctattgctcggttaggccggcaagcgaaacgaccatatgggttctgcgcaaagatgacggcagtagccgtattgggtctctgcttcgtattcgtatggactatgttttcttcttcttcattttcctcttcagtggccgctcgaagagaaagcttcgatgacatagccgaacctgtatcaggaagctcgagtgtacgcaattttggtactaaatctggtaacaaagaagtgaagaaacatgaaaagaaggggaaatctaactctagtttggataaagatgagaaaaaagttaatgggtctgtctctaagtctttccacgagcataagcatgagaagcggaattccagggtagtgcctattaagaaaaaggagaaagagaaaaaaatgttaccggtaaagactacagaaggagaagcgaaaccggcggaatctgaagaaaaagaagaagaggaagatgagtcagagaaggaaaaggaggatggggaagaagaaggattggtagtagatggtaaggaagaaactttggatagagagggtgaagtgaaggaagacacggaaggtgaaggtggtctggttgagactgtggatcaggaaaatgaagaaacgttggaaagtgacgatgatgaatctaagaaaagaggaatgaagaagaaaaggctcaagggtcctttgtttgatccaaaaacgcattataattggaaattatgcagtacaaagagcaaacacaattacatcccatgcattgactatgaaacaagctcttggaagctccaaagctatcgacatacagagaggagttgcccaaaaacaccggtaatgtgtcttgtacctcttccacatgatggatatgaggttccaattcactggcccaagagtaaagagaaggtaaatgaagggccttgttactttgtaattattatttttacttgtaaattgtatagagcagtaggacaatctaatgtggtatcttggcattgcttgttttctacagatatattacaagaatgtggctcatccaaagcttgcagcattcattaagaaacatagttgggtgatggaatctggggagtatctgactttcccccaaaaccaatctgaattcaagggtggagttcttcactaccttgactccattgaagaggtgatttttttacttatttttaagattttgtattacatacgaaacttgtatgtaatttcttaattcgctcctaatatcgggaaaagaagttagtctgttattgatgatgatcgaaatctaagcattcttccctctctatctaacatgtaaacttagaaagaagctaaagggtgatgtaccttgtatttctttagctgaattctagaacactgatagttaagactatttattgttaacaattaggtttaactcttgttgaattgaaaccatcaagtttttcttgcacttgtctacaaatgacttatttatcaatagtaatgttgatttttttaatgatatttagcagttttagattaattacctgtgtattgtgatagacggtgccagacattgaatggggaaagaatattcgggtagtgctggacattggtgttaaggattcaagttttggagcttctttatttaataaggaagtattaacattgtcattgggcttgaaagatgacctagtcgacctagctcaagttgctctcgagcgtggtttccctaccattgtgagcttttttggtagtaggaggcttccttttcctagtggtgtttttgatactattcattgtggcggatgcaccataaattggcattcgaacggtttgttgtttactcaactttgtatattattcttttgtttttttcctctcttaactttttatatgaatatatttgttttcataagcatttgtacatagcacccttttttatttttctgcagggggaaaacatcttctagagatgaataggattctaaggccagggggatactttattctctcaactaaacatgacaacaatattgaagatgaagaaggtttttcctatatgttttttttttgcagatactataagaaagcattatatggagggtttatgtactggacctatatctgtttacttttataagaatttatctactgttaaagtgttttttcttactgaaaatatgttttgtattcctgtgaccccatttaagtcctttttttaaattgattaatttatcttgtgtttaactctttccagctatgaccaccttgaccccatctatttgttggaatattctggctcataaaactgatgatgtcagcgaagtgggtgttaaaatttatcaaaagcctgagtcaaatgagatatatcaattgaggaggaggagatatccacctttgtgcaaggaaaatgaaaatccagatgcagcatggtaaatcttccttggactttccctacagtgtctatgttgccaatcttttgaaatgctgttatttgaggaagatattttcgtctggagcacagcaaagattacttctttgcttttatttaaacaagcattactctgcacgggtttcataagcatcacttcctagccttatgtagcagaaattatgcctgaactctgcacgggtttgatatgggcttacttttgctagttagtgctgcatacgtacatctgaatgaaaaccacctttatttactaattgtcaaccatgctgagatatagctaattttggacaaaagctgcacaattctattcaccaacgtatctcctattttataatattgtactgattatgtggtatttgtaacatttaccgaataggtatgttcctatgaagacttgcttgcacactgttccatcagctattgagcaacgtggaacagagtggccagatgagtggcctaagaggctggaaactcttccagactggttggaagataaagataaagataaattggctgcagacacaaagcactgggctgctattgttgaaaagtcatatcttactggaatgggaattgactggaagaatatcagaaatgtaatggacatgaaagcaatttatggagggtatgtcaaacatttgactaactaatcaacatttcttttagaaggcataaactttttttagcaatgatggaggcagaagagggagctgcatgtcgatattaatgttcccttttttccgtttttatttttttaccgttcataggattgaccatgaagaaaattagtaatgctccttctacagatttgctgcagcccttgcaaggcagaatgtttgggtgatgaatgtggtccctgtacatgcaccagacacactttcgatcatctttgaacgtggacttgttggaacctaccatgactggtgtgaatcttttagcacttatccaagatcatatgaccttctccatgctgatcatctcttttcacggctaaagaacaggttaggctaaccttgtgcagttctttttgtccctgttgttcttttgacactaagattgtttttgccatagaagtttactttctttgccccattcaaattcatactcggaattactggattgatcatatgttttgtaggttagaaaaaagcagatttcaattgttcttgaaggattttggggtatcccaactagggacttcaaagaataagggagataataggcaaaatcatagaagaaatttagaatagaatgcaatagaaataactaggcacgtctgatatttgatattgaaaggtaaaattgatatgaacaaacaagaacaatgaggtatacgagagacctaattctccaagagttactcctcaattattctcatcgtgtctttatcatttctccaagtttcttacttttactatcatattctagatcctcacaccccccagtatatgactcttgtacccttttcattcacattagttcaccaatgccagggtatatcattactggccacccaactttcaccttgttctcaaggtgaaggacagtggaaccaatccctaaatactcccatcccctgtcaaaaaaccaagcaagtcaccaagctcaagagccttcatactgtttatgtcaatattctcccattataagagtgactaataacttcattccaagatcataaagatgagaagtgcgagcagtagcagtacacaacagtgccacaccaattttagaaatagtcttttagaatagagccctcagttcattttgcagcttggcaagcaactcagatcatagtaattgccaccacaaattggttcagcagaagttgaagatttatatacagaaccattagcactttccctcctaggaacctggtccaaaccacttcacttggacgcaaagcttttcatcaccgtcaactatgatatcctccttgctttcgttcatgtcctagtggacttcttgaggagaaagaaaatatgtagttgggataaaagcatagtctgtctatgttttccaaagaaacaatccaaataaacacatagcaaaaacgaagtgtgataggaccaaagccccatcttcagcatatagtcttgtatagcgtcctaagaaagcaacaaaatagaagcccccaaataatgaaatgaaactaaatgctcataggcagtcacccatttaaagtataaaagttttctagagtaaaaaatagacaccctttcactagcataaccatcttctatactcaacctaaaggtctagcataaattgcatacaagagtgggtatgtggggggtttgtggtttggacccatatccaatcataaacaaggttcagacctggttgcacaagtagttttgcaaagttgcatctgtcttcccctgtaaaaaatctaacaagtaaccaatgtgaacacaacctcgtggaatcccattttctgctaccgatgagaggagaaagaaccataacatagaaagttgtgcagacgtatctctcttaaagcaaaaccccaaatgttggaaaaacaatctctgccgtgtacctcagtgagatctagaggtcgcaatttcactacttgtcctccatgtcggtagttgatcttgagatggagaaggggctcatcaaatcttgaggttgagaacaatcagcttccagccttttacacaaaggagatgaagtgacaaaatggatcttaacttaatccctgcacatgaaattgggatgtgggtcgtagcttcatacttagtgggtcttagcttgaactagatcgcagtaatgggcctatagggaacaaatgaaggaagcaagtacccacaaaatagaccccggcatccatgaagcctcaaacatccctacgatgcttgggtgtataaccaacatctcccctgacgttgtcgacgacgattgacgacacagctcctctgccaataggagacaccatggttcccccaaccaactcagaaacgtatatcaaagaggtatcatggctggtgtccagtcccacggatcaaatatgtcgtctttggtgtacacgagtcctcactgtactgtgaggatccgactgcgtgg

SEQ ID NO: 184786 - DNA, 1832 bp, Cannabis indica
tagacaatgtgagagcaaactttcatgaagccctcaccacttctttttcagtccctaaaattcacagcaaactatatttagagttcaaatctagcttctcacatgtatagagtagaatcgaatgcatgttcatcattggaatctcaaaagtgcaaatcaaaggggctagataatcattgctcattaactttcaaattcgacaagaatcaataaacaataatttttcctctctaagaactatttcatccactctctaaatttcttcaagttcttctatttctctctttttttctactttgtcctacatcatcaaagcttcaaaattactaggaaccatccactcaaaatcatttcagctaacaaccagctctaaacagtagcaacactacaatgtaagagcagaaaataaatagtttccaaatcacatcatacaccatgaggagattaagtattaccattttacaatatataccacaaaattgttcatcggcataatcagcaagtagtattagcactgacttttccagcaaaaagaagcctcactgtaatagtgaagttcctaccaaactaaaaaagaacaactccaaaagctgatgtaatgtgatgaatcgcacagcagcactaccaaactaaaaaaagaaagaacttagcaaagatactgtttgatttatttttaccatacaatatttggagactaggaaattataacaatctccatgtagttacccaggagggactcgaacttaatctactactgtttgattgaaataaaaaagtgaagcactgcaaagaactaaattcacattatcatcatcactaaggtacattgaattgatgggtacagcttatcaataacctaactcaaaaattttaaaaaggacaaggaaaagttgtcaatcagacctataaaaccaacaatcaaacgaaagaagtactcgaggaagcatttacctttcagctcaagctatgcaacctacttcaataagatcgaacaaatgtactaactaaccaaaaggtaagaacatcatcgaattaatagaccccttaccaataatcatataaaaaaacccatgtctcaatctcaatgtcactataaaccataacagaaccattattgaaaaacagttgtgcccggataaaaaaaagtaaaatccccattaacaaagcaacaagtatacaacataccatgtaattagtgagagaagatttgccagcattaggggcaccaactatcccaaccgacaaggacttctgatcctcctctttcactatcaaatcctggtcatcatcctcatctgccttctccaaagccgcctcgagcagggctttggcaagcactcttcgtcttttctcttcctcctcctcaattttcagcttcccttttttgtggggttcttccccaaagatcacttggtcggctctcgccctgtattttttgtcccatgtgggttgagccttagcatctgaacccaagctcggtactgtaaaatgactactgtcgaaaactgagtctgcgccattttcagtgtcggaaaagttggtgttgtgagtggggtcgtccttttgaggttgggcagcgtagaatctaagggaaacgttttggtattttggggaaaggactgtgagtgttcttaaagctctcaaagttttcattctcagcatctatggagtgagcatatggcctggccaggcctcaggttatgcttcttcaaagaggtgtatactgtaaaatgaatggaggcttatggttggattgctgctgaggttttagaccaaggggtttttcctgtctcccttgtattttacaataaaaaaatagtaaaataaaatca

SEQ ID NO: 184787 - DNA, 5791 bp, Cannabis indica
tacggtgtttggtctgccctttgcatttagatttatgcgtgtatttaatggcagatttttgtcaactacttgattatttagtaccattaccagttgtattgcactagtgattaaagaaaaattataatctgtgtcaagaagttaattattagtgtcctttcaaggaaaagacttgtctgtgtaactagcttgttcttttgctgcttgtcacctaccaaagaccagaaaatgttgaatagcaagaaatttttggacaggagtcgagtaatttttcgtaaagtggacaaagaatctctgtttatatttggtttattttaattctttgaatatgacaatttctattgttcatttttgttctccatttttttttttttttttttttaaaaaaaatgaataagatattcttgatctgtggtcatgctttaattccaagtaaatatgagaatattgttagaaaaaaaggtccagttcacagcttatattgtcgataggtaggtgatattagtttcattattatgctataagaaagcaatatgtataatatgtaatatagtaatagctgtgcattttggtactcgttattaacatttgatgggttactgtttcagacataaactcaattacaaagagaataaggttgatgactactctagaagaaagcctaatggatttccaactcaaaagcttatggtttgtctctccaatccttcaaacaatgaggatttcaaagacgatactgaaaaatctttatcgaagtcacttgtagggggcaacatgaatatttgtaagactagagttatagcctttgggccttctgagcgtatggttcagcaaggtttgttctatttcctctagtcattttagcctctactagtatttgtattttcttaagttgatgagttccttcatgttattggttgatcttttttcccttgccggaaatttccctctgcttctgcaggaacatcttatggtcttaggtccatatctaggatgatcatgtcagagaagccaaatgatggaactgttgcaatgttctatggagatttagatttagaggagagtgatttcaataatgttgagcacggtcttcccactctgccaaatactgtaagtctcgctgtacaaattgttttagtgaagaggtatatcattttgttgaattactgaagttgacttttctccagttatttggggcaattaatagaaagaacaaaaaatcctgttacaaaaaataatttgggttgattaattttgctctaacctccaggattttcaaacttggtctgatatttgtagagtcaattttcttttagactcttcagattttgaaattacttttggggctacttctgggatttctgcatgtctatcccatgccattggtcacaccacctgtattctctagtataattatcttatgaggagggaggacattgggccataacagtgcctattctcaccatgatagtcatatacttctcctgtggaaagtcaaaaatagcttacaggaaattgtctgtatatatagtgccaattaccaatgtaccatatgagtttatttacttcattttaaaatgttgtagtttctttttctttccatctctgataagatctgctttccgttgacatttgtatttgtttaatgtttggtgcagcattatgcagatttgctggcaaaacagttctgtaagctggtatgtatatcaataatggtttcaaagtcattttctgtcgccatcctcattgaaatttaagtcatgctatctgtttatgcagatggaacgtgaaggatataaatgggagcaacgtgtgcaacctaaagctcacatgactgttaccccgggcaatccatcaaatactactgggatgcctcctaattctgcaggtgagatgcaacaatatgcagaagcagttcctggccagctatccaatgaggctgtgaagcaaagcaataatcttcatacatcccagaatcttctagcaaactcaaggatgcttccccctggaaccactcaggccttacagatgtctcaagggcttctacctgggaattcaattcccccaaggccacaactgttagactctcagccatcacttccacagcaacagcagcaacagccaaaccaattgattcaacaacagcagcaacagttccagagatctatgatgcttcaaacaaatcctctttcaaacttgaatgctattgggcagaattcgagtatgcagttgggaaatcacattgggaacaagtcttctgctctcaatcttcagttgttacaacagcagcaacagcaacagcagcagcagcagcagacatctcaaatgcagagaaaaatgatgatgggtcttggaaatgtgggcaataatatttcaggtcttagcaacgccatgggaatgggaactgtaagggcaactgcaatttcagcacccatgacatctttatctgcaataggacacgtggggcagaacccaatgaatttaagccagtcttcaaatatgggtagtacaataaaccatattcgatctggaccattaccacaagctgctttaatggcatcaaaatataggatggcccaaaacagacaaacaatcctaggtcctcagtcaggcataactgggatggcaggggccagacagatgcttccaggatctgctagtctttcaatgattggtcagactttgagccgagctaacttgaacccaaatccaatgcaacgaacacaaatggggtctatgcctatgggtcctccaaagttgatggcagcagggatgaatatatacatgaaccagcagcagcaacaccaacagttgcaactacagcaacaattacagcagcaacaacaattgcagcagcagcagcaacaacaacaattacagcagcaacaacaattacagcaacaacagcaattacatcagttacagcagcatcaagaaacaaactcatcacttcaggctgttgtgtctccaccccaggtgggatcaccctcaaccatgggattttcacaaatgaaccaacaaacccagcaacagcagcagcagcagcaggccagcccccagcaaatgagccaacgaactccaatgagtccacagctaagcacaggggctattcatgccatgagtgctgggaacccagagggctgtccagccagtccacaattgagctcccaaaccctcggttcaggtggtagcattgcaaattctcccatggatcttccaggtgtgaacaaaagtaactctgttagcaatgcatagtaaacatttcaggctgtggtcttgtttgttatcttaccattcctcacagagaaggttcaattgccattggagagagtaagagaaaataatgcattttgaaatttataggttgggtgaatttcttaaataatgctacagctattatgccaagaaatagctgatgtggggcaagagattcataattaacaactcatattaataagttgtttcaatgaatatttttgaagtgtcacatgatatttgtcagcccgttaagaagtaacaagaatttagattcatcgtggcttgtacagatactacagaagaatagttttatgtaaattgctacgaatggctcgtctttagctagttttgatggaaatgagattttggatggcaggggaggggaattgtgaagctagtgttggaattgctattttgtagttgattttattgtaagtcccttgtaaattctaatcaattaggaagaataccctccctgtatactttaattatttattgtatgatacattgatcgtagttggtgaggttttcttattttaaagtaatactattgaagtgactcttggatatatatttcaatgcacttgttataagtaatgtacaatgtttttcggtttttttttttttttaaaaaaagttatacatttatattttgtgttaaatagtcatcttaacccgaatttagtgcattttcatgcgttaaaagatccatgtattttgcaaattaatgacccgtaaataaagtctgaaggctaaaatatttttacaaatatagtgtgacccagaatggtgtaaatcctaacaattccattctatacaagtatataatcattacattcaattctcacccaaaccagaaaggagaaattcccttatttattattctatccattatagttgtgtgtaatatgataaggagtaggagcttcaaaaaagcaaactaaagctttgagtgaagactctcttgagaagtcatcacatggcttctatggatatcttttagagtaggacacccggaaagggtcatagtgagttcaagctcattcttcagcatttcaatcacagttctaaccccattttctccctttgcggctagcccatagataactggccttccaacctgttgcatattttcaaataccaaagtcaagatttgatcaaccattttatcacttttcaaaagttatgagctaatttagaaagccatatttttgtcaaatgaggattgaacttacaagtacagcttgtgcaccaagggctaatgccttaaacacatctgttcctcggcgcactccaccatcaagaagaacaggtattttccctccaacaccatggatgaccttcagccatggttaataacattaacttagctaatttgactcttcattatggcaagggatagctgcttaactcaagtgtttttgctttagtaactttggtaaaaagcaaatgtgtagttttactcacctcttctagaacagaaatagtgggaggagcataatctagctgccggcctccgtgattagagacaataatcccatcaagaccggcctcgacagccattcttgctggaaaatgaaatggtggaatcatcacatctttgcacttggtaaaactgactggtaacttctagttagtaatatgactaaataaattacttaagagatgaagttgtggtgttaccatcttcatgagtaagtacccctttcactagaattggcaagctcgtgattgatcttaaccactcaatgtcctgccaatattatcacgtattttcagctgattgaaaaaaaaggtacaaagcataggaactttgaatatatcatgtatttcttttttttttgtaataagggtaattagtcacagaacataggagtaaaagttagttagctgataccttccaacaaagagaagcatccattgttttactggcataagcttccaggtttgaaccatcattctgtacaagtacagaaaaagtaatttacagaaaatttattatgagtagtaaatagtaatagcacaaaacatattactttatgaaattacttgtcctgttttcatattagaaaaatgatttgtttcggtctaaccccacaaaataatgagcaaaaatctgaaaacaaagcataaattcgactcacagagtcaacttcagtggccataaggccttcgagattccttaatttaggtgctatcattctgttaaaaaagtgagaaagaatcatgtttaaataataaatagcttattcatcaaaacatatttaaacaaagagcaaatctcatatttacttgttctttatgtctgcctctcttcgaccaagtttaggagtatcagctgttaacacaatagccttgaatccatttctttcagctctcttcaccagctcagccgatacttctcgttgcttataaacctattaagattaatttatgtgacaacaacagcaacaaactgataaaacaaggagaggtttaggagggtgattgagttgagtacatataactgaaagaaccgaacagcattgcagct

SEQ ID NO: 184788 - DNA, 2407 bp, Cannabis indica
tacaccctgctccaccaatgaaaacgccaatgcacacagtcggttgaacctgaaaaaacgcagaaaaaacgctgcagaaacagatgctataacccaatcggttgaacctgtaccaatcgcagaagccgtccccgtcagaacagaaaaatcccagcgcaagactccgccaccgacgtgaacaatccgacccttcttgaacctttgacaaccggtgaggatatagaaaccggacgcaatactccaccgatgaagacgcacgactcggaaacagcaaaacaaaccagacgtaggaaccttcgaaaaagattttttagagagaaacatggaccatgccagctggcaagacaaatttcttaatttttatttttagttaacactttgtaaattattagtcattcatcataataataatttatgaatttaatatttaacacatcataatattaattgattgcctaggttcttgagtcttgactctttgtattattcaaaatttagaggatgtctaaaaattaaaaagaaatacagcattacaaaatgttatccagctttctcttaaaaaaaatagacacgagaaaatgttccctgaaacttatttatcactctatcgattatgtaatatctaaaataaaagggaaaaaagtaaaccaatttaaaatacagtaagagatctccaaacgccaaacaccgaaaatacccatactaatatttctcattcttctatttatttgattttgacaagaaagacaaaaagggtaattatgacttttaataatgctacatacagactattgttaaaaaactaattaggaaaagaaaggaaatccattcttcggaacaagtcgatctaaatcttgagtcctcccagtccgttctgtgactctccctcgaacccaccactctctccctaatgcgtttcaaaacggggcaaccagccactgagtcaactcgctccgatcaaccccgagttagaaactctatttcctccaaggaagtcgctcaccgagtattggaccttttgaattctgagttctagatccgagttactgaatcgcgactcgtaaggatttagggaatggcttcttcggaagtcgattcccgtctgagccaggtggtgtccccagccctagaccgcatcatcaagaacgcatcatggcgcaagcatgccaagcttgctcacgagtgcaaatccgttgtcgagaagctcagttccaaacagcagtctagtccaggtgcggattccgagggagatacatctggcccaggccccttacacgatggaggctcgacggagtactcactcgctgattccgagtccattctcagtcctctgattaacgccgcctcctccggcgttcttaagatcgccgatccagccgttgattgtgttcagaagcttattgcccatggctacttgagaggcgaggctgatcctagcggggaagcggagggaaagctcttgtcgaagttgattgaatcagtgtgcaaatgccacgatttgggcgatgaccagatggagcttgcggtgttgaagacactcttatcggcagtcacttcgatatctttgcgaattcatggggattgtttgcttcagattgtgagaacttgctatgatatatatttagggagtaagaatgtggtcaaccagaccactgccaaggcatcattgatccaaatgttggtgattgtgtttaggagaatggaagccgactcgtccacggttccaattcagccaattgttgtggcagaactcatggaaccaattgaaaagtcggatgtggatggttcgatgacgatgtttgttcaaggatttataacgaagattatgcaggacattgatggagttttgaaccctgtcacgcctagtacacttggtgggcacgacggtgctttcgaaacgacgacggtggagacaacgaacccaacagatttgttagattcaacggataaggatatgttggatgccaagtattgggaaattagtatgtataagactgctttggaaggtaggaagggggaattggcagacggggagggtgagagagacgatgatttggaagttcagattgggaacaagttgcggcgagatgcatttctggtgttccgagctctctgtaaactttccatgaagacgcctcctaaggaggcattggcggatcctcagttgatgaagggaaagatcgtcgccttggagttgttaaagattttgctagagaatgcaggggctgtgtttcggaccagtgagaggtatgtttgaatttgttaatgctgccatgagtactcttaatttggcctgttgtattcgatttatcatcattattacttatcagcttttctagtttttgttgtttgtgaagtctgctacatgtacttattagtttctgtaatacgaggtatcgtatttgtt

SEQ ID NO: 184789 - DNA, 3646 bp, Cannabis indica
attcaaatattatttatatatattatccagttctagcgaagaagatgaagttagttcaacactgaaaccaaccgccatggctctctctccgaagccctaccttctctattcccctctccattctccgtcaccgtctccagtaccggcgaagctctctttctgctcttctctaccgccgccgccgaagaattttgagatctccgctgctctgttcgctccgatcgcgctcagggtttcgtggagagccaagtgtgttcgatcggctactcaggaagacaaccggagtgaatctgatgacgctgtatcggaagatcagagctcgatttcggctgattctaaggtttctcagttgaaggttaatacgacgtcgtcgagcgattctctgtctcttgggattcgtgagcctgtatatgaggtattattactaatcactttatctttactgtgattttgagtatatatagtggaaattgattgagattttttgtttataaggtggtggaagtgaaatcggatgggattatatctaatagaaaaatcaataggcgtcaattgctgaaatcgagtggtgagaatagtcaattagtttccattatcattactttggatgaaatttcttcactgtactccattgatgatcttctttgttaatatgtatatttttcagggcttcgtcctcgtgatattcgaagtgttgacccttcgttgtttttgactaattccgctccttctttaatggtattattatgagattttactatttgtagttttagacactagacattgtgaacaatttcgagaaatttcaaataattcacgaaaataaagttgaaaatagttaattacactcgtttataataaaacagtcagtgaaactgattatttgaattatattctcatcacattaaattatttagaatttcccgaaaacaagcctgaaacatacaataaacactaaaatatactcgtaaggtagtggcaaaagtgattcggctacctaaaatctttcaaatatatatagataaatattatgcacattaatgtaatttaagatggcccaaattcggtacttttctatttggaatccttattttgagtacattgtgagtaagagaactttgaaagttgagctatttgataatttacaggtccgtgaacatgctattcttctaaacttaggctcattacgagctattgcaatgcaagaacaagtcctcatattcgactacaatcggtgagaactttatcttcttgatatagtacttttaagtgttaaaattactaacagtttgatgaactgtatatgtttaatgtttacagaagaggtgggaaagcttttgtagacactctgttgcctagactgaacccaaaaaatataaatgggggaccatcaatgccatttatgcttgaggtttgtgttgtgacagctttgtaatctcagagtgacaacttttcaagtcttaattcaatcaaaacatacatagaagatctgaagacaacccatttcatgctaatttcaggtcgtggaagcagccctactttcaagaatacaccggttagagcagagactaatggatttagaacctcgtgtgagtatggaaacatagtgagtataaatgtttttggctctttttttgttttgttttctttctcttctgtattttttgggattgtttcagcagcatgattagtcatccatgcatgaagtacctaatcttctacccaacaaagacaatgttgggttgaatctgattattgtcatagtcatcatgtatcagttgataatttagctctgatatttctgagttaaggaaaaagaattataatatgatatcatatacagttatgcctccttgtttctcttatttttccattaatttctgtaggttcaaggtctgcttgaagttctgcctaatcgattaactgcccaaatactggaaagacttcgaataagcaagcaaactttggtatagcccatgggaactactcatttcaataaattatctcttagtagcaaagtagagctataatgttgtctctatttatccatttgaaggttgaactagattcaagagcaggggctctcagacaaatgctgcttgatcttcttgaggatccacacgaaattcgccgtatctgtatcatgggtcgaaactgcagactcaagaagggtagtgaagatttggaatgctcagttgcagtagaacagcaaattgctgaaggtaattctaatcctgagatccaacaatatttgtagttttcttctatataaatataataatcactgcaacaaattcaattttggttaactttggtttggtttggttttctttttatgcagaagaggaagaagaaattgagatgcttttggaaaactatctccaaaggttagctctttgcattccttttattttgttttatgtcaactctgtaaaacccagtgttatataatggctaattgttgttgaactttaagataatatattaaaaatttaatatattgttttggaagatatggttagtttgaattttctagcttagcagttatcttgacatggctataaagacacaaattttctacaattgaggttgctctttcttcaaaatttgacctcgttgtttttattacatttacagatgtgagtcttgtcatggtcaggctgaaaggttacttgattctgcaaaggaaatggaagattctatagctgtcaatttgaggtatgattaatgtgatcctaaatagtgaaacaataagcttcaatatatttccattccaagaactattgaatgagaagtatatgcctaatagtaattttaacatggtttttatcagctctcggaggcttgaggttagcagagtggaattgctccttcaagttgggacattttgtgtggcggttggtgctcttgttgcaggtacattaaatgtcatctctgtctcttttgaatgttttttaaaaaaaaaaaattctttttggatatataactataaaggttgttgatgggcttatggctactgcacctgaaaattgattagtctaatagccagaaacatttatgccatgtttggtttggtctaatagtaatcttaatggaattaggattacaactccattgtttggattggttttaaaatgtaatcaacctttacaatgttatcaatattgcgacatttatataaataagcatacaatggagttgtaatcataattccattaagactactaatttaagttgaaaaaacactttgtttccttttacaggtatttttggcatgaacttaaggtcgtatcttgaagaacatgtggtatgttaagctcaaatctttataacccaagttgtttaatcttacttctaaccatttatatcactcacacacacatacacattcatttatgttatttatctgaactgttgtattgtgttatttcttgatgatgatacagtctgcattctggctcacaacagctgggataatcgttggagctgttgtaggatttttcctaatgtattcttacctcaggaagaggaaaattctctgactaacaaacaaagtcatttcattttgggtacttattcttcttcttcttctttttatacaagttcttgctaagatatcttagttaatatgtttaaactcattttt

SEQ ID NO: 184790 - DNA, 3612 bp, Cannabis indica
ttttgggttatttctgaagtgtgatgcccaaggatcaaacccctaatgttttccaaataagcccaagggaagtaagaaaaccagctaacctccctaccaataatcatattttgtccacatctccgaaacgaaggcctttaagcaatcatgtgccgaatctactggttccttataatggtggtttctgcagtgctccagacagctccttgtcaagtccttctagaagtccaatgagagcatttggctctgaccaagtagtcaactctgccttttgggcagggaagccatatggcccatttccagatgttactttagctggatctggccattgctcaagtcctggttcaggtcataattctgggcataattctatggggggagacatgtccgcacaattttttttgcaacaaagcaggggtagccctgagtactcccctgtacccagtcctagaatgactagccctggcccaggctcaagaattcatagtggtactgtaacacctatccatccaagagcaggagggatgccctgtgattctcagacaagctggcctgatgatggcaaacaacaaagtcaccgtttgcctcttcctcctgggacaatctctaatcctccccatttttctactaattcagcagcaacatctccttctgtgccacgaagtccaggtagggcagagaatcctgcaagccctggttctcgctggaagaaaggaaagctgataggtagaggcacatttgggcatgtttatgttggttttaacaggtttgtctgttctcatttaagactgcttttttgtttattgaaagttgagtttctgcgtttgtgattcattgtatgaacttgtttagcgagagtggagacatgtgtgcaatgaaggaggttacattgttttcagatgatgcaaagtctaaggaaagtgctaagcaattaatgcaggtaacttttctgtgagattgtgaccattatattagtctaactatgtagttaacttcttatttgaatttgcatggatatggtaaactcacgaacaagttcataaatttggtgtttggacaggaaattactctactaagccgtttaaggcacccgaacattgtgcagtattatggatctgacgcagtaagtgttttatctttgatctgagacattactaactattatagtcaaacttgttattagtaatcttgtgtttggttatgacatttggaaatgacttgttccttaaatatttcgagagctaatttattaattcatattcagtagctactggctcacaagtatcagacactttcagcaccaaataatggtttttctattaatctaacaacatgttactttggattagttaatgaattattccttgaacaggtgggtgacaaattatacatatacttggagtatgtatcgggggggtcgatctataaattgctccgggattatgggcaatttggtgaactggcaattcgtagttatactcaacagattttgtcaggccttgcatatttacatgctaaaaatacagttcacaggtgaattaagttaatcattcttatacgaataatctgaacttctgaagttatgtgtattcaacagctgcatctataaagttaacaagctaactgggtctacaaatgtttatctttgtacagggacatcaaaggagcaaatatacttgtagacccaaatggccgtgttaagttggcagactttgggatggcaaagcatgttagttctatcagaatcttattcttacaagtggtttaaaagtattgtttttaggaacttattacatatattaaatggtacattatggttgcatgacaaccatggtaactcgtattcagcaaacaaaaatgtacaatgcatatgtaactttttcagttagtatattcatgtacacaatcaaaatgtgattaagtaattctgtatactaatatgaccatatgctgattaagaaaatatccattataaatcaaatcaggcttgactgtaatggttgaggctgcatgatgatcttgtttcttactccgatgtgctgtgcagatcactggtcagtcagcattatcattcaagggaagcccctactggatggcacctgaggtaaaaatcttatgaagttatttttgctgcttgtcttgatattctttcattgtgtatgatcttgattctatttcatccttcttcctgcctttctcccaggtaataaagaattcaactggctgcaaccttgctgtggatatttggagccttggatgcactgttttggaaatggctactacaaaaccaccctggagccagtatgaaggagtcagtattttagattacagttatatgcctcaaatattttctatgaattcaatattgagatttgttcatgttcaaagtgagcttgatcaagctttctcaactttgttttgttgagtgaggatggaaaagaagtatcaaaacctatgtttttgtgaattgttgaaaacccatgcctcaattaatcaaaggcaatttgtaatgtttcaaaacccacttaggcatagctctcaaatctagaaccttttatttagctgttttaacatttgcctcaggctttttatatatttttcaaatgttttttcaaagatttttgtttctaatgtgttttttttcttttaattacaaaactgagtaaaaaaatcaaagtaaatagacatgtagaagtaaaagtgtagttgtttttcttctattcattctagttctgtactaggctactaagtttcatgtttttccttctttttggtcttttgaactactggtgccgtgttattttatttttttccttcttattgactagggttgtgaattaattcttataaacgtatggttaataattgagaaaattgctttgaatcccaataataatctctttggaccttggatgtgatctagtaatatttcactacacttacagagtagaacactatccttcttttcttatttgttatatttgcatattgtggtctgcaggtagctgctatgtttaagattggtaatagcaaggagcttccagcaattccagataccttatcacaggatggaaaggaatttatattacaatgcttgcaacgaaatccaattaatcgtccttcagctgctgaacttttgaatcacccttttgtgaaatatgctgcacctttggaaagatctattttgagtcccaaggcctcagatccctcccctgcagtaacaagtggagtaaaagctttggtatgtatgaactgagaatgtcaaattaatatattgttttgtaggtactaggtagtacctttcttctcaattgttcaagttttgatgatatcataataaaacatttgttcctgtctaaattctgtgcaccctccatttatgagtaaagtagtggatgaaatatgttagacactcgtgtgcatatttattttaatgtaggttcctattgggccttgcatttcaatcttttttatttatgcctcatatattcacttattgctgtcttgtttgccatttgcagggaattggggaagctagaaatttatcctcattggaatcagagagacttgcagttcattcttcgagagtactgaaaactgctcaccattgca

SEQ ID NO: 184791 - DNA, 4182 bp, Cannabis indica
ctatactccaatagtctccattggaaaaacacatttttgcatttacagtctaaattatgcaattaaaacatataaattaatgacaaagcatgataagttgctggcattcatattacaaaaccgtacgattatgcaatatatattttgctcaataccataaagctgaaaccatagagaattataataactttcaatacacaaaaaacaaaagcttatgaattgcaacatagtttgatataacaaagaaactaaccaaaaacaatcataaatatatatatcaaaagaacaacaccttatcttgtcttctgaatatttgccaagtaccaagaccaaaagtaatagctccaggaagaaaaagcaaccattttgaccatctctgtcgattttcttgctctaatttaaaaatacccattaacccaaatacaacaatgattagtaaaaaaccattctttattaattataagaagaaaaaaatcacaaaaactcaccagaagagtgaagagaagatgtcaactgagattgagattgagattgagattgaacggtggaggaaattgcaggtgaagagctgtaaaagacttcccaatgactccgacgaagcttggttatggatttaacaatggtggtggtcgtcgtcatatggatctaacgtaatttcatgatacaaaagtttggttttttattgaaaaaggttagatttttggagatggaagatgagggcttaaggggttttacgtactgatgtattaatgggccttttaacgttgggccagacttcaaaagcccatttaaacaagcccaacaaacatttcccctcacctccaagattttacattagagagagtttagtacgagaattgagaagctcccactagattggccttttcgatttgtactaaggtaaatacatttcttgtaatgaattgggattttctgatattgttttttgttttcaaatatgatgataataaatgtttttgagggtttaaggattgtttctcagcttgttaattttcaattttcagttaataattgtttatattatacattccaagctataaagattgaaactttacatttttttctttgtatatgtaattaaacagtgagactgagagtttgccctaaaccaatttgatttctgtatataaaagttttgaactttactaggagagatttagacccatttgtttgtttggttcaatttcattgttttaattatcattattattgttaaaatctcaggtttcaagccagaaagctacatcagccatagagattccatctgggtttggattgttacaggtttttgattaccattaatgaaagtttcatgagttagattgatttttgagactgagaatattgtgattgtggaaagttaaattgttttttgattagaagatgaatgttataagtacactaagattaggcttaatcatatagagcttcatggtgttcaatttacttttcaaatcccatggatttattaagcttaatcagaaattatcatctacttcagttcttcattcccttttctatttccccaaaatgttgtgttcttgtgctcataatgatttaatgctctctaacccatctccacagtctcttgtgagaacagtttgttcattggtttttgaatctttttatgaacatggtcaaagaatgcaacttcctcctaggcttaatcttagtatagatactgattctttgagccatgaacatgttacaactattgttgcttcactagccgatgagggcggttctatggttgcgttgagtttcttttattgggcgatcggtttatctaagtttcgccatttcatgaggctttacatagtttgtgctatgtcattgattagtaatgggaattttgagagagcccatgaagtaatgcagtgatgttagtgagtttttctgaaattgggaggttgaaggaggccggtgatatgattctcgatatgcaaaaccagggtcttatgttgacaacacatattttgaactctgttcttgtaattgcttgtgaaataaactcggttgagtatgcagaggagatttttgaggaaatgtctcatagaggagtttctcccgattcggttagttatagatctatggttgttggttattgcagaaatggtgggatttctgatgcagagagatggttaggtgaaatggttgacaagggttttgttgtagataatgctactttgactctaatcattagtacatttagcgaaaagggtttgacaaaccgagcattttggttcttcaataagatgatcgagatgggtttgagtcccaatttagtaaactatacttcgatgattcatggtttgtgtaaaaggggaagtgtaaagaaagcatttgaaatgttggaggaaatggttagtaaaggttggaaacctaatgtttacactcatacagcattgatcgacggtctttgcaagaagggatggaccgaaaaggcttttagattgtttcttaagctcgttcgaagcaacaactacaagcctaatgtacatacttacacaaccatgatcagtggatattgcagagaacagaagatgaatcgagctgagatgttattaagcaaaatgatagaacaaggtctcgttcccaacacgaatacttacacaactctcgtcgatggccattgtaaagatggaaatttcgatagagcatatcagttaatggattccatgagaattgaggggttttctcctaatatttgtacttacaacgcagttatcgatagcctcttgaaaaagggtaggatcccggaagcttatagattgataaaggaagcttctttcgaaggaattcgttctgatcgagttacttacacaattctaatctctgagcattgtaagaaaggtgagactaaaggagccttaatgctgtttaataagatggttaaaacaggactcaaccctgatatgtatctgtatacaactttgatagctttcttttgcagagagaaaagaatgaaagaaagcgaaatgctttttcgggatgctattagggttggtttgataccgagtaaggagacttacacttcaatgatctgcggttactgtcgaattggtaacatcactttagcaacacattatttccagcgaatgaccgatcataattgtgcaccggatagttttactttcggtgcactaattagcgggctttgcaaggagggaaagttagacgaagctcgtaaactatacgatgctgcaacaatcgagaaagggttatcgccctgcgaagttacaagggtaacattagcttacgagtattgtaagcgagagaagttctcgtcggctatggctatcttggagaggcttgagaaaaggctatggattaggactgttaatactttggtgaggaaactttgtagtgacaagaaagtagggatggcagcattgttcttccacaaattggtggataaagaccgaaatgtggatcgagtaacgatggcggcgtttatggcggcttgttatgagagcaacaagtatgctcttgtttctgaattgtctgagagaattggcaaaactggtttggctatacaaaactcatgaaaattagttcattgtagatgtaacttgttgtgcaagtaatgaattgtgatactcaattttgattcaatggtgtttaattttattcttcaataaacatgtttattaatattattattatttaaaaaatattttgaaattaattattaagcaaataatttcattttgattaagtcttgcttgttataatgaattttgagatggcttatttattcactttgtatagaaatgtttaatttttgtttttaaataaattgattagataaatttaacaaaatattcatttattatgttaatcctttctttatgttttttttaactaccacttttatttgcacccaaaaatattataaatatatctctaaaatacatatctttaatttatattaattttttaaaaaacttttttcttccttttcatattcttaaaattatacatataaaaataaaaaaatagatatattaagataataaaattaaaataaagaattatatataattcaaaagaataaatgaaaaaaatttacatattaaaatatagttataattttatggggtacaaataaaattctctttaagttaatataaattaaaaatgtcattttaacttgtatat

SEQ ID NO: 184792 - DNA, 2461 bp, Cannabis indica
attttcttttttcttaattggatcggttgcactaaaatttttgtactcgatctttacattgaattaaataaattctagcataaaccgaccaaatcgaccgacgtacactcctaacgagtagttgttaaatttttgttttttaattttttaatcacatttttgtttttaaaaattttatttttgaaaaataaaaatatgttctataatctcttttattttttaattttaaaaataaaaaataaatgtgtgttctgtaagcctttctttttctgagcgagatgtcctttcatgaccaaaaggacctgacctatagctaaattcggagtcgtggttggactctgacataggcttacccactggcttaattgggccatgggtccgttttggttgattttagaactctaaaagtacatgtatcacctgtctaaaaataaaaataatattgtagttgatcatgatatttttagctctattttaaagggtggaagactgagagaattcggtaaagatggttgggctaagacgagtgaaagcagtggtaaattcacaactaaatttacttaccttctccaagtcgtggctttagctccccattgttcgattgtgcccgtactttggaacaagttgtggaattccaattggagcatcacaagatcttacagtggtgcattctctcatatgcattgcctgctaaaataatttttgggactagaatttttggttttgacactatatgtcctttgtgttgctcgaaagaggaaatataatggatcatttatttcactataatgagtctgcttagcacctttgacgtgcatcaccatagagtttaacgtctaatagagaaaacgatgtttaggtttgggattgggtgaatttcctttggggactacattcataagggtttaattgagagaggtaatatgtaagtagtggattctatttggatggctagaaacgagaaagtctagtataattttgtaaaacctttctcgcattatatcctctaattttttaaaattttaccgaatattttgtttctaatctgtcatctccccttttcatgtgaggtttttaatgggtagtctgctcctattatctcattatattgttgtcctgtttttatcccaatatatgtggcagctctatcatcggacatgtggcaactaaagcataagactcgcaggtgctcaaggaaatcttaagtagacttaggatttcagtagatataatcaaatggttcctcttggagctatgacttgatccgggaggatcaaccttttgttcatcttcgggagttgggcaaagtccagcatgactaggccagggtcccaaaggtgaactattaaaagacattaaatgcagcatagaagaaacgtctacggatgaatataaaaagacatgtcagccgaattaaattgttctttggcgattacgcatattcaaggatgtaagtgacggccacatactaaattgtcacatcaatcaaggaataataaggatttatctcgcctaaaccctatgtaacctactacatacacatgtacaccctatttcgctaatttaggaacttgtgtaaggctaaggtggatacttgagacaagagaggtctttttcctctattgaaacaacaataattacctcctaccacatttgaagggaaatctgaaaaaatagagtagaatattctcgataaagaaacacctccacattaaatactagtaacttgtagactaaaactcattaataccccaactacttaaaaatacttgcatttactctcttaatctcgatcaacaatattgattccatattttttatttttcagattatgctacttataactatcatctcctccttcccgtacgacttaatggctgtcaggtaagaaaccaacgtattgaagttgttcgggtaatgacgagatgactaaatttttgcaaaaccctctttgccttagtgaggcagatacttatgaactttggagtctgctagagcagcaggaaatgagttcgttttagtgacctattgtgaaagcacctattctaattcgcccaacattatctaaagcaaaccttaagaaacagaaagttaaatccaagatttttctaaaaacacatttagtcaagttacacaacatttttccctctgcacacgtgcagaaatgaaaactatccaagcagaatgttaccgagtcagcaccaataaaagacgattaagaccatagagcaagaaagtcatttgggcccaaatgtaatctcctttacccatcatattctgcctaaggaaatcaactaaatccacttgtacactattggtgtgaggttatactaataattaatacagaatgtacaagaataccaatagaaaagctatacaaattacaatacttgcatttcgccaaaaaaaagaagggcctttaaaaccagccagccacgagagaaattacttccttcccccc

SEQ ID NO: 184793 - DNA, 4458 bp, Cannabis indica
attcaacttttcatctaatgacttaaaaggaagaattcccatgcaattaattttaatgaacgatgtctacattgtgtatctttagttgattacataaatgatgtttaattaaagttatagaattaattatgccagtttttcatgaggaacacatccttcttaaatttatgcattgtactcttcaactcagcaaacaaaacacaaaaagtttactatttaattaggcaaaccaattaattaagcagctgcaatgcaagtatgactttgtaataatcaatcaattctagagtcactgtttttagttttccaatctcagtactattctagagttcaatatactaaattagttattaacaagtgttaataattcttaacataaatattgtcacgtctattgcttaatgattaaattcaaggcttgaagaaattccctacctacaatgtgataattgaattcagtattgagttttttcctattttttttttcaacaatgtttctatctttctgtttttgtttgtttttattttaaaaaaaaaaaaaaaaaactcaaattttatacatatatagcaaaatacatgaacggcataaaatattttggtggagcattctattcattgcgcttttagttagatccatccttaatgaacggatgaacattaaattgtaacatggcttctcatctgtgaagagtttctctttgagatttcattcctgtacatgaattggggactagatcgtggaatttaatcaaattcatttagagttttagtgtgaaagaagtgaatgttgacgatatatttttatatgcgtttatcgtagttggcccttgacattatatgaagagcgaaaaataacaagatacataataaccatatgtataacatacattgttatattgattctaattctaatttttatacagagcagaatcactttcttttgttccattacaactttttcttgttgtcactaagtgagctcctccacccatagactaaatcaaacttaactgcaatgtggtagttagggaaggaactatgatgcttgcggtagtggctcaagatcatgtaagaaaggtgctttgagttggtaccaagcttttgccttttgctaagacttacaatttgttattataggatgtaattcctttgacataattattaaaactgtcaaggggtaaaactcaaaataaaaaattgataattataatttttcgaaagtttctagatcttttaattttgttgcttataatttagtcaagtagacttttaatcaagatgtaattgataagattgaggtaccatataacattatttgtaatgcctactaagagtgtacatcaaactgctcacaacacaccatatcgcataaaaaatataatttgaaatcatctacggtgcagttgcaatttgcattttcatcaaactgcacaatacattttgcaattttaaagtctaacggtaaaattacaatttgaaaaattacaaaaactacatatgctttaggtttaaaaaaataaccaaaactcacaccgaccgcaccgcgaacacacttatattaactcttattttattgaaatgtcaaacaaagtgaaagggtttgcactttgcaaagactttgacttgcatacttgcatactcatgaaagtggtaaacccgccaatcggagacagaggccaacaatcccatttcccatggagaccactttcgtttctcttctactcctcgccaccatccactcttccctctcatcactccttggagttcatcctctaggtaactaatttcaattaccaatttcggatgttttggaacatacccacatctcaaatattgatttctgttattcaattttggttacagatgagaactactttgcttcccaagtaatcaaatgcaaggacggttcaaaatcgtttaatcgagatcgtctcaacatagataattattgtgattgtgtcgatgggactgatgagcctggtattgttttcttattattgtattgttttcttcaccaattgctgctatgaatattattgttaactctgttttttttttttttttgccctaattgcaggaacttcagcttgtcctaaaagcaaattttattgtagaaacttaggaagcacaccacaatttatattttcttctcgtgtaaatgatcgtatttgtggtaaagcttttttatttacataaccattttatcatgacattctttttcttcttttgttagttacttaaggactgaaacttatatagaatatgttttttgatccttacattgtgggcatatgttgtctgatttgaaccaaaaaagaattttaaaagacaaaggggggtttgaaaatgaatgagtgaatcaaaatttgcattaatcacaaatgagggattgatcaaaattagtagattcatatgtatagatatcatcatctacattcagaaagccgtatgtaaacttattgaatattgtttggaatcccattttcttgttcctgaatgatcttcttgaattctttgtttgcttgttatatttgcagattgttgtgatggaagtgatgagaatgatggcggtatccgttgtccaaacacatgcatcatgggtggaaacatagaatataaaagtgacaatggtgtctcgtttagcaacaatgatgaagaactctcaactgtcagtaatcttggccagaccaaaaagggagggatgaatttggatgacttgattgagaaacttaaaggtatgctattattattccttaacatacatacaatatttgttgaacccaatcttgtatgtatttcagtgttcgagtttttggttattccaggtttgaagatgctgataattcttcagttagtcctcatcggcttcctggtgatcctcaggatgtccagaaagcgcgcagcagtctctaaaagaagacggcgataatagcatgaatctaattgctatacatttgttgcttctatcttgggttgcgtcagatgagaggcctaaaatggcctgagttgtttttttccttcgggattttctttttccctaacagcacctctggtcaatgaaaagtgtcggggctcatcttgatttgctctttccaattgtgagttccgagctgaggacagagcttgaaaggaagtacttggatacgaaataattttgttataagtatgtctcttatacaagagtatgactttgtaataagatcattttacattctgtgagaaatgcaatggagagttgttttttctattaattattggatgtaagtagatttaggaagtatctctcttcttattgccaatataccaggtctttccttccttgtgtttcttgagaatttggcaggtttgtttgttggcttttgctggttgtgtgtgtttggaagtttggaatcaaagaattagaagcctcattcaagggagtgttatttgtaatgagaaggcgatctattacggtaaagtcaatgttctcggaaattctcaactgtagagatcaggtgaaaattcgaaaactgctactatctggtttctggtgaagactttttctttgttgatgcttcttggaaagaagggctgctgctgggtattgcagcagtgtgggtgaacaagcagcaaataaatggtttggtcgaaacttgttcagctcttgaagctgaagcttatgctttggttttggcacttgattgggccaaggaagaaagggtgaacaacaagttggtggtttacattgatgcgcaggtgatgatggtgagtgctttctccaaaaaatctagactggttgattggaaatacaggaaaatttcttgtttagttttaaatgctttaaagagccttgggtcgtgatcatgtttggtttgttgtaatggtaagcataatggaatcatgattatcattacaatattcggtttgcttttaaaagtgatataatagaattacaatgtaacaaggactacattatatacgggaattttcgttacatgaaaaaacttatgtaatgaggattacattacaaaggattatagaataaagttaaaatgactctagtacctctctttatataaatttataaaataaagtagtgatagttttgtcaatttatcacttattttaatattcattctaacaacaaactaaatatggtaatcaattctcattaccatttttattctattacattattgttataaattactattattattacattctaccaaagcaaacatcactttagtttcgatataattcagttttcattgctaatagcgtagctgatggtctagctaaaagtgctacaatttcttgccagaatgttagtgttttcaaaggtaggcacccccacccaactgtggctaaagctggattttggagagaaaacaaggatatcaatacaatctcatagactaaatatattgatcatgtatacaacaccttttttttttttttttttttttttttttttga

SEQ ID NO: 184794 - DNA, 3918 bp, Cannabis indica
cctttcattttgtacctcggatggagcaaaatttattcttgttatataagcaggttgagtcgtcgttgtccccctaaccttctcagtaattctgctgatgtcagggaggaaaggcaaatggacagagtcctgaggctacgtacacgagtgcggggctagttgggtgcgtgggcaagttagacgtgcagacaggttgtccacgggcatgggtcatggcttgtgtggttcctggatgtggatgcatcaaagagatgcataacgcgatttaactaaggatactcacaagcaaaggacgacggggccgccttttgtccttttctgtttgtacagaatattcagtgtcattcatctacctgcttgctatttatggaaacatttcagttctcctatttttggtggtttacacttgcccccagtctaaaagattatttttaagtgatctttttgactgagagtgaaccgccttaccttcctttactgtgggcctcgcccgacgttatatctcaaattgtgtaccaccgtattaatgagactcttcaatagggtaggtgtgcacatgtgacccttcataggcaagcgtgtttgatctgtgccgttgatctcatttcgatcctacggtggtgaactacttatcctttctataaatagcctttacttctttcattcttctaccttaccttcatttttccaacttagatccttcactgtagtttctattccctttgagttttgctaacgtccttagtctatcgaccttcgttctctttgcgactcccgacacaacaggctcatcttaacttatgcctatcccgacaggtatcttctcaaactgtaccagttgtttcatttcttataactttatgttggctatatatgcggctacttatataattcacatagtttgccctcgagtctcctagcagttagttccccactagagcattttcccttctcccttctcatggcaaaccgcagaccatcctacattctcgagggagattcctttatcaaactttcatctgattcgaatggtgaaggtcctaacccttggatgtaataccacctactgatgtccgagcgcttgaagtgcttggacacaatttgtgagacccaggaatgtttggctaagcttaaacaagagattaaactcttggaggatcaagggcatgcctacacgcattcatgtctatctcatcttaagcaactttacgctgacacagcgacctatcttgcttacttaaagtgcatgttcccacctaacccaccctcccccgactactctcccataccattagctgtggaatcattcattcatcaggcagagggcaaagccccctccaagcctagatcgagccgcaaggctctagcccatcgaatgaaaggaatgaaatgcattgcatcccgttctaacctccttcgctctttgcagatatggataagccacgtctactaagcaagtcaagcacatccctccctgcttgcgaccctacactcccatacaggatggctgatgtcgcaagtatagtgactcaagctgacatttggagaacaatcaacgagtacacagtggagcggggtttcaaccccttaccggaggaccgggccaacctaccacctatggacatggtggcttttagtaaatccattctcaaggttggggtggcctggccactccacccttcttcgttgaggtcttggactatttcggcatagctcctctcaagctaatgcccaacgcgtggatcatactgacatgcttcttcatagcctttaaaaagaggtggcaggcagggctcccacggccagggaggtacattatgtgtacaactttaagcataactcttcattcaggagctcgtattatcttcacaagaaagttccctctgatgcgtcagtggcgagcgtcctatctaatgcggggaagcattggaaggagaacttcttttttgttctgaaacaaggagtactggaggtctttcgtatgcctcgtaagtgattccttggcttgtatcctcattaatggcataaccttgaaccccctaaaatgcttgattaactccccctcttggcattgcgtactattatttttcttgtagcgacacgaccttccccgccctaacgcagaaggcgttcaaatctgacttgttgaaactattcagggtggactacaacaggaagctctaaaattatcttttgtccttacccccgcctaaagaaaagcgggttgattcagtcagatgacaagataaaggggggaaagatataatctttgcccattcctccgagcgaggcgggggaggaggccgggaacgacgcaaggtctgatgctactcccttgtaggtgcacgaaggagatgtggcagcagaggaagtagtgatggattccgcaagagaagttctcgagggctggcagtggtcgtgcgctacgggaaaatcattggggggttgtccctctagtgagaaaatggtcgtgccagcggtacatcagtcggagcctgcctgccctaaaatcttgcctaagggtttgctcgccaagacgaagactttccttaaaaagaacattggtgggaaaccttcgaccagttcatccttagggcgtcatttcgatgtagaagaaagagtcagctcagggccttggagttctatgcccttcggccctccccctgacatgtcttaagtgggcaccaaaagcgattttgcccccgttgctaccgcattggccaaacaccaagctcactcagggtcacccacaaggccagctaacttagggagggcggatccctcggtgccatttcccaccccgaaggtggatgacgcccagacgatagcgcctggaagggaaaagagggggcgctctagggggctaaggtgtcaggttccttctcctcaagggggctaggctgaccttggtacaactgactaccgcagaggtgtccctttgtccaccctttctgatataggaggtgaacgcctaatggaggaggaaccccgggtgatctttccccatcaccaggggtctccccttattcatgagcagcaggggtactacaacccgtctcatattcttggtgggacgccatgcatcatcggcctcttattagccttccgatgccagcacccaagacccgagttgtgcctttggtgagggtggttcaggcatcgacgcctccttttcgtgccatggaacccttcttcgggagcagacatgtgcctctcagttatacgggggcggtcgtaacagttcctgtcctaatatttaagggaggattgggatggcatacgggggttcccccactaggcttgtgcgagcaactcttccgctcctctgttgggtgagttttctttcttccatcctttcctttgttattattttattttattttttttgtttgaccatacttcatgcaaatggtcgtcgcgtctcaagaggtggtctcacaaggtggggcctcacggttttccttaacctattacgcactcctaggtgagttggaatctgtcaaaggggaaagggacaggctatccaccctagtgtcctcccacgatgtccgcatccgagaattagagggtaatctcacagcggaaggaggcccaagagcagacagtcgcagaccttgctgcctatggtgactataaggtgacatttaacctgtcccttgacaaagttacgagggagcgagacaacgcccattcccagcttgttgacatccgtgcacagcttgtcgcggatgcggccgagaaggacaaagcaacacgctagatgaagagcgcccacaagaacaagaagaacctcgagcactaggtaggcgaactctagtctcgtgttcaggaattgagggaagaactaaaggcagccagccaaaggtcagctgagcacgatggtgccatggtagaccaggctctgtacaacgtttggcg

SEQ ID NO: 184795 - DNA, 511 bp, Cannabis indica
ttttagtggaaggatagggagcaaaataacagacagtcactgacctttatcatctttgataagcaatattgctgttgctggtgcaagttctaccaacttcttgatggcatcagacgtttttccctttgcaagacactccaaatactttcccaagagtacaaacgttatcagcatggaacttgtttcaaaataagtgggggaccagaacccagtaacggcaccgtatagaagtgcaccaacagagtagaaataagaggctgaagttcccaatgcaaccaatacatccatgtttgttgaaccatttcgtaaagctctggctgcagcaatatagaagcgctttcccacaacaaattggacaagactcaccaatgcccactttaaccaatcgcccatttggaagggtccacatcgccaaagtaataaggaataaaatagtggtatatgtggacaaatcacccgtatgaaaaagacaggaatctgaagccattttatcaaatatcagtaattattt

SEQ ID NO: 184796 - DNA, 1837 bp, Cannabis indica
tcttagaataatatattgctgatttcaggttacaaccagaaataaagtactgaaatgacattttttaatggatgcttcttctttcatcagaaaatgaaacaagagaaaggtgcattacttactggaatcttaacaacatcctctcttttccatcccaaggggttataaactacaataacctacagaaggagaaacaaaagaaaatgatttaagaatattcaaacttctcaagacctgacaccttacttgctatttattaccacattactattctcaccagattttttccctttgacagatcaacctctgatgggggacaatagctgatgttcaaaagtggacactgaacaaaaagaaggaaaggaaagacaataaatacatggaattagtatgctgaataatcttaataagcacaagaaacaattacttgtacaccaaggaacataaccataatacattagagataaatatatacagattaaacatatctcaatcagtataatgaagactacagatggtgtgaatgaataataacttataaattaattaacagaatccaaagttaatgggggtgatgaggagcatctaatttaaagttcacctacaaatcattaacttaagctacaatacacaaatgataatgtagtaccagctgtactaggaaaactgaacagggtcatggttaataagttcttgaaaagagaagaacattaagacagggagtaagttaaacttgcctgttgatactttatagaagagtggttgtaaccagtttttgatgccgaatttgttaactgtgaaagcgatgctgcaacgaccttcccagcctgaaaccaaaaatcaaataaaaaaagattcaaaattacaaactaatatggggaatgagtgacatgaaatcttacctcagagtaaccaattgctattctttttgcataatcatctgcaacatgttgtttcgatgtaccactaactgcatcatgatgttgagcaattgctaaagcatcagcaagatagtctgtgttcggccccactttactccttcccctaaaaaactctagctgccttgctgcctgttaatggatattacaacaacaaagagcatcaccaatttgaaatcccatggtaattggtaattacttaaaaaagatacatcaaaagtgtaccaaatagtaggcgcttgtcactctaacatagcctttaagggctggtctgctagtaaaataaccagtccaatatgcattttgtttgtctgcatagctgagttattgacaggaaagtggtcagtgcaacacagacaagaagaagattttgagtttcgatcatattgacttacgggaagtagtcttcgctctttaatggccagtactcatctgctgcatgttttgcatcagtgtatattgatggggttgagtacagggcatttacacgcccatcctacaagcatgaaaatacaagaacataaaacttgaaaaccactaaaaatgcatgtattggaatgagttttaaataagaactaacttgattgacataatgaataaacttgtccatctgccgaaaccatgttcttgcatattggtactggaaatctgtccccattgtccacatgacatgatttgtacgagtaatgttagcctgaaaaaggaaaagaagaagaaggctgtttcttttctgagattcaacagtattctaccaattgctatttgtgtaaggaagttgatcaaaaatttctagacagtatgaataatgaagtaaagattacttgtgatatagcagcagccacaaattgattcacacgctccatcacattgtagtcaaacaaatttggattatccttcaa

SEQ ID NO: 184797 - DNA, 2579 bp, Cannabis indica
caagaaaggcaagagagagacagatggtcacttatttcttccacatggcttttagtgactaccctcattatatcattattttactattttgtcttctccatctccaagcacttgactaaatccatttaaaatcttttcactatatttctctaatatttttttagtaaaactacaaagccccaactaaggtatggccagccattgtttttcttctgcaggctcacttttcactacatcttcatctaccttacactctaaaaaaggtaccttttttctttttcttctttgcccaaatcatttgatctgggatttgattgagctgcacgacatgtatataatacattggatattaaatacactctttttcatttaagctatttcttctgatccattctacttgatactactttgttagtgtaactcttaaactatttttttatgtgcttttagttgaggagaaatggattggatcttttcccctaaagagaagaaacccagttcatctgagattctctagtgtcactagaacaagagcagttctcaataacaattcaaaatcagtcgaaattcccagacaatggtataatctaatagcagatctccctataaaaccacctccaccattgaatccaaggactcatgaaacagtaaagcctgaagacttgtcccctctctttcctgatgagttaattaagcaggagacaactagtgaaagatacatagatatcccagatgaagttattgatgtctataagctttggaggccaactcctctcataaggttttactttagtgtacacatttctttttggaacttctttccttagcttgatgagaataatcttacactattgaattgactacagagccaggaggttggagaaacttttggacaccccagctagaatttattacaagtatgaaggtgttagcccagcaggatcacacaaaccaaatagtgctgttccacaagcatattataatgcaaaagaaggggtcaaaaatgttgtgacagaaactggtgccggtcaatgggggagttcattggcctttgcttccagcttatttggaattggctgtgaggtgaattaagatttactgttggtttatctttccttgttattatgagattaagatgaggtacttattgttgatatgtgtggtataaataggtatggcaagttcgtgcatcttatgatcaaaagccatataggagaatgatgatgcaaacttggggtgcaaaagtacatccttctccatctaaccttactgaagctggtaggaatattcttcagatggatccttctagccccggaagtctaggaatcgctatctctgaagctgtggaggttgcggctatgaatggcgataccaagtactgccttggaagtgtactcaaccatgttttgctccaccagacagtcattggtgaagaatgtctcaaacaaatggaagctattggtgaaacaccagatattctaataggatgcactggtgggggttccaattttgctggacttagtttccctttcatcagagaaaagctcaatgggaaaatgaaccctgtgattagagctgttgagccatcagcatgtccttctttgactaaaggtgtttatgcttatgattatggtgacactgctggactgactcctctcatgaaaatgcacactttaggccatgactttgtccctgatcccatccacgcaggtaaataatttgtactcattgccaattggttttgatatagaactcggtaagtgtttgttaatgcaatatcttctccttatctgattacactaatttgtttaggagggctgcgttaccatggaatggcaccgttgatatcacatgtttatgaactgggaatgatggaagctatttcgattccccagctagagtgtttccaaggtaattttgagcttaatgagtgtgttgtgaacttgtgatattaggcatagaaaatggtgcagatatgaatgttgtgtgtgtgtgttttaggtgctatacaatttgctagaacagaaggattgataccagcaccagagccaacacatgccatagctgctaccattagagaagccctgaagtgcagagaaactggagaagcaaaggtgattctaacagcaatgtgtggacatggtcactttgatcttccagcttatgacaagttcttgcaaggaaatatggttgacttgtctttctcaaaggaaaggattgatacagcaatggccagtattcctaaagttgtggcctaaagaaaatgaatcatatattaaattgactgctatatttgctaataaatttcctgaaatgttgggttgtcatcgactctagttttctaggtaacttgagactgagagaatcgtgttttgaagaataaaatggttttaacggattttattcttggtaatgttatgcaattcataattaatcatctattatgttgtattgttgaggtcttcatcaaatcgctcaaaccgcaaaaaaaatgcggtttgaatttctttgcgatgcggttgcggttgcggtttgaatttttccttaactgcgcgacgcggtgtggtttgcggttttga

SEQ ID NO: 184798 - DNA, 3636 bp, Cannabis indica
tttttaaaaaaaattaattgtaataatgcataaatttgaacaatggaaaaaaaaaatgattatttttggcaactttggccttagcaattgtatatgtggtgcaacaggcgctgctagactcggaggcagacgaagctgttcgaaatctgttacctgactacgtcaatggcgatttatcagccctctgtgtatggcccgatcaaattcgccactggtacagataccgctggagtagccctcttcacttcattgatacgcctgaccaagcttgctcctttgactattccagtaagtgtgaaaatacctaacccctctttttcaaatcaatgtaattaagataataatcatcgtcttcggttgggacttaggggactgccatgatcaacatgggtcagagaacatgtgtgttgctggtgcgatccagaatttcacttctcagctctcgcattaccgggaaggaacctccgatcgccgatgtaaggaagccctcactcataagagtacatgtctttgttttgatagttataatgcttgatcttgaaatttggagattattttgcttattcatgttctgttcttggattactttctttgtgatttgtagataatatgactgaggccttgttgttcttatctcatttcatgggagatattcaccaggtatgggaatattaattattcgtgatggaaaatgcaaattaatctcattatttaaaataatttagttttatttcattttatcagccaatgcatgttggattcactactgatgaaggaggaaacaccattaatctacgctggttcaaacacaaatccaatttgcatcatgtaatttcatcatatcgcgagattataatatataattattcatctgtgcatatatatgcatatagaattcattttgttaaagtaaatgcttatttataacgcagttaagttcttattcttgtgatctgtcccctcattaatttttttttcttttacattaatgtgaaggtatgggatagagagattgtactgactgctctaaaagattattatgaaaatgatatggaccttctcctacaagacattaagggaaactacactgatgtaagactatttactatactaaatttcattataaaatgcaatgcttgtgaaaaaacaagctcaattgaaaattagtttaaagttgcaaattcattgtttttacatttgtgtatgttgcacagggagtctggtctgatgatgtttcttcttgggaacattgtgatgatcttgcttcatgcataaacaagttagtatattatcctacctttttttttctctcgtcttactccagttctcatacatcatactaaatgagttttgattttgggttttttctctagatacgctgttgagagcataaacacagcttgcaaatggggttacaaagacgttgaccctggtgttactcttgcaggtataaatgcaaaaccatgcatgctgccaatgagttgtttttttattagttcaagctcatggtctaggggtaaattttaaaaaatagttataaaaatcaaattatgttatcacttactagtttctgttcaaaccattttattctgtgcaagataaaataaattgaggtaaacaaatgttatccatgattagttgacagtgaattctcataggtacccctaataataattgagtgactcactcttttttctcttaatctgagacaagcatgctaactgttattagtatcagttggaaataaaagcagagtatctctgttacaagtgggacaagtaatagtttgtcattttgtgtatttttgcagacgattactttaattccaggatgccaattctaatgaaacgcatagcacagggtggagtacgattagccatgattttgaaccgggtgttaggtgactccaacaaaggacttgccatgccaacttaaccaactgataattatgcataagaagattatatctggatattcttcagacttattctttggtttaaaccatccccgagtttagctgaccaggtacactgcgtacattggtttagttatgatgtacctaataatgaccaatcttgtaacttgtaagtgataacatgtgtagattacagttaattccgaactatttgtaaccgattatatgattctcatctttgataaacaatctagatttctcaacatatggttgttcttgttaacaaggtagccagattatgttacaactaatatcaccaaaaaccatgagccatcttcatatcttgaaatggatcatataactccgctgttcaaactttaattgaaaaattctgattaatatgtgaggtatgtaagattgaaagagtactggaaaaaacattgaaagagttatgtgagtactgtagacagtggacaccccattcatccattaaaaaaaacattgaaagagacctgaacaaatattaaaatgttacaaacacatcatcaatatctgaaatcctggcttgggaaaaggtatttaaagaggttcagacttctccctctatctctcttttggtatgaaatttagacttgtatctctattctagttgtgattgggattgcttacctcattacataagctaaaacggtcggcaaccaaaccaagtgtcataattcaagaaaagtattaataggcggctcctggatagcagggcaagggtgcgtcttgttcgatgctcacaacattctgtacaatctattttataaatatgagaattaacttacaagtctaggaaaaaaaatggatataaattaatatatactgttaatttcgtcatggcacacctcataatatggttgaacgccaaggcagccatttaaatttacaaacaggttccaaaggtcaaaagtaccctcctactcaggaaatcctttttttaccctcctactcggggagaagggtgaaaaattcccattttggcttgcgaaataatgtagagaattggcatttgccaaccgagcaaagagaaagaatatactacgtacgtactacgtatctcaccactgtgtccttcctcgaaccccgtgctctattttccaagacgtgaataatatatacatataaatctgataaatctcaactaacttttcttgagtagcaagtcgacatctttgattttatttttttctctttccattaatatattctattctattgacttgagatcaagtgatataatttttattattgcctcctaattatcaccttattctaacttttgccttcaacttccatgtgtctacattatagcacccaaaattttatcctatctcattttcccccttctcttttatcacctttttttttataacaaatagatggggaaaaagaaatcacgtgtttaactcctcaaactaaagaaatttaaaacttcttaataaaaaacgtgtaagatggaagtttcaaaaatatttttatgcattttacttgtactaattaaataaattccctttttccttacaacataataataataataacataaataccccttttttagttataatatgtagttatcatttgggcaattttagcaaaaacaattcatgttttttaaattactaacaaatcagataggatttaaaaattaaatagaatctgcttgccacaaaataaat

SEQ ID NO: 184799 - DNA, 6096 bp, Cannabis indica
tatataaatatgtacgtataaaatttcacttttttggccggcaaagataattgatttagtgtttgaatatggagtactaaaacatcatggagagaagatcttgcttatatatcttaattgaagatcaactttcaatgggaattaaatttcgtagttgatctatatgggcttgctttttgcatggtgggtgactcgtcatcaagtaccttattcatagtatgtaactacaatcgtgataagtgaaattttaatataaagtttcattttttatacaaaaatggaaaaagaaaaattatatatatttatagtattttacccgtacctagaaaaaatagtactattattttcagtttcttcacaatagactaataataaatataactgaaattcacctagccccaagagactttctctaaagagctgctattaggctataatatagttttagcataatgaataccaaatccgctacctcaaccaaagtgatttatgtttattgctctctgataatgatagaacaaaatgttattaatgtaaagaaatgaaataataacagaatagcataacttctaatttctattcatcaaagttaaaaaaagaaagccagaaagatcggtgtctcttaaaactcagaacccagtttatcaaaattgctttaaagttcaagacagaagagccaatttttattaacttgttagattagacattagttctaacataatggaatagccaacgagttgaagagaaccaactgaaaatgacttgccttattcaaaatgaacaaaaataatcaatttcccaatgaccgggtcattgactctatgccgattaagaggtgtacggctctttttaacctcttgccatggcaatcccagatatgtgatctaatctcaggatattttctgaggatctaatctccacatgctatcttcaatgtaatggagttattttctatcctttgttttgtgtatatttctgtacaaaatagctgtttcaactactctccctataatactacctctcccaccgaagattgctccttttcaagtgctttaatcagcatttcaatttgtcttctgtaggcaggcatgaagtgatcactaatcatggtttgtgacagtctcagtttactgtaaagcgatctcggggtgagaaagataccgatcctatcctcttctggctgcccatcatttgagctgttggtgcttgaggttgggctatcctcttctggctgccgatcaacttcacactctgcatcatcagattcggaaggaagataaacaacatgcatgatcttcccagcagggaaaaatctgtgcgcttcattcacttcaggagcagaactctcaggctggccatcacttacttctgccatggctgctgcttcttcttctcttatttcattggctacatcaacatcttctccctctgtctgatcgtagagctcctgctcaatctgttgccacaactcaacttcagtcatgcggtcttcatgtctgttatgccccatcagatcttctccatcactgatatcaccattctcttcaccatcatgaactatttcatcagtacaagaacactcaatttctgaagtccagcctccagatgaagattcaggaaggtcaatattttcaatggtagttgtagttatagttgtactctttattgaggatgccagaagaccgtcagaagtttctgtctccgtagcagatcctgaagagtttaaaacagcagtcgtgcttcgctggcgaggtcccatgcaagaccacgatgacaggcgaagagaaggacgtctccatgctgcctgcgccatgctctgggctcttttcataactacctgttaaaagatcaagagaatgaaaaataatacaatcaaactagtaccctcagtcatctcaacaaactaaagccagtagttgcaatctttctattatcgatagcagcttgaaagaaaagtactctggcacttgaaaggccttaaaacaatgaaaaaaaaaaaagtaatatactacgaaaaattcaaaaaagaaaaaaaagcaacaaaatcacctcatcaaacactagttcaaccaaaagtaaagttctgcttatatttctttgtttatcttcaaatgtaaaatgaaaaggtttacatagcatacaaaatagtgggcaaattatattttattacttcccttcaaatatcatgcaagaaaagaggatcgaccagatgtagcaaaaaaaaatatccaaattacaccacaaaattattcggtatcacaaaaaatagtagttacctgagtaccactggaaactgggcgtaaaatcgcacctgccccagcaacttttgctctagcagtggcaatagatggaaggcgagaacctaaagctgaagcagaacgatagacagtactaagaattcttgtttgctcaatctgatttcttagatcgttcagccaagcagaagctgtcacctgttaagggaacataataagtacaatacgaattggcaattttgaaaaatagataaaaccctacataagcagataaggtaaggccaacacaagtaaaattcaaagtcctagcaaggaagaacttaactactttaaaaaaagttctcatctctacagttttccacaaaaacaagtttactacaacaggtcattaaataatgctcttcatgtttaataagatactccttacatgttacgaccacaatgagtgttaacgagcataaaataaacacatctgaaataaaataagatgaactccaaaacaaaattccaagattacatgatccttgaaagaataaataaaagctgcaaaggtatagatcataacctcaacccgcaagtcatccacagaggcagctgagaaagtaggcactaaatcagctccattgataacagaagtaatgaaatcaccgcctgattctgccaagtcccatgtcatacatgcagctgcattgccatacaaaatcaaaacttttagaaccataagaaaaccattcactagtacaacagttacaaagatacaaataagatatatttgaaggaaattgaacctgcaccaccactaacaagcactcattcacccaactgcttgagtctctaactttgttatggaggagagatgggtagatggagaggggtggagggaaagagtagaagggattggtggaatccattgtttggtagtggagagaaagggagggaaatgagagttggagggagaccttttccctccaaatcccaaaaatgtaatccctccacatttggaatgatttaagaagatgacaaaatgaaaataccaatatcaaaactatcctttaaaaaataataaatattaatgttgaaaaggatattatagtaattttaccaactaatttcctctccatccttccaacccttctcctaataccaaacaatacaaagaagagatactatcctctccatccttcctaaactcaccctccatcatactctccatccatcctactcccctccttcctacaatatatggggacctagaaactatagctattgctatgtaggtagctaggagagacttaacctcagaattgaggaaacaagaccatttgagctactccttttaggttggaatggttacatacattgaacaggctaaataatcctaagcagtttggaataaaaggaaaccatagcagccaacaagaagcgcacaaacctggagcaaatgtcacacaagtagctgttgacagttctttctgctctcgcaatatatatgttagaagtgcggctgtacctccacccaaagagtgccccacaatctgttttgatcaataagattaatttgttacacatgttctactaggaggaggagaagaataaaaagaagaaaatccaaacaagtttaaggaaaattatttagatttaaaaaatgcattccaacactcgtaatttcagcaaagatttaaggattacaaatagctaatcaacaaatcatcgtagatacctttagtttgtaaccaggattttgaccaagtgctttaagaatacaaggagttgcaagtttcgcaatccaccgtgcagctgcaaccattccacaatgtgcataacccaaaactagatcagtaactcctccctcgtgtacaacactgtgatggaatggtaccacagctcctgttgcagcagttagagtatccttaatactatgagttccgcgaataagcaagagaaaacattcagtattgtgatcaacgagaattgtaaacgctggtttcaagatctgcattagaaaacaaggaagttcagatcgaattcaaatgtacaggaacatgtgttccttcccacaactcgaaaagtaagcaaatgatttcttgtaaaaccacttactcctgctttgggttcttgaagaagtacattctcttcagaaaaaccagtctcctccagaaacaaaggaaatggttttttagaaaaatgccaacaaagcgtcaacaagtgcaagagatatctaagttcagcaattatttcgggtccctttagttgctgactgtctttcccaccaaagacactcccaacatgtaaatgaccctgaaaacgaaaaagtgatttaagtcaattctcttcaagatttatgctaaaacctgccagcgaatacaactaaaagcattagtttttttacctgcctctttagaaggaaactgatcccaaatgccaaatccccaattggccacttccctaaggtttcagaataagtaaacctcagtgtctccgacaaggttgaaatcgtctccaaccaagttgcaggggcctgaattaacctatttgaaacgcgttcaattcctatccggggatggttaggcaaactactttcaatctcatcatcatcttcttcagcagaaggtcccgactgtaatttacgattcaatgtataatataagagggcagctgcaccggcagccgtggccattgttgcagtcgccattagcttcaccttcctatcaaaaagagaataatctaatattcaagacacttaaaagaatcaacttcaatttattttctgacattgtacataaagattccaatacaaataacttcttagcttaatgggtaggcagcataacaaagagttagttttttctatccaaacttaaagcttgaaaattctatttcctctactcgtttatgcttcataataacactaaagaaaacaaaagagtaacaaaagcctcctcttttccttcaaaaatcaaagaaattcgactaaaaattcatacaagtggaacgaaaacagagaagaaattaaaacagaaccaaaacagctcaaatggataaccctaaaaatccccaaatgctaaagggtaacaaaatccaacaaacctgaattgaatactaataggagtctgccaaattgaatatgaggcgcgaggaaccgaagaagagaggtttaatggaagttagtgaagatagagtttgattagggaggaagcaaaacgccgccttcaacgtaattttgtgctttttgtatattaataattaatattaaaatacgcgtatgatgagacacgtggcgataagttagtgtagaaagtagcgggaaccgacctctactgctctgcctgtttggtgaggtgtggttctagatctactgactaactactactatttatttttgcttagtttttcactacactttgtgaaattattaacgttgtttttttatcatatatatatatatacaaacaggtgctgatggtgctggtggtattcaatactaaatttatgttttcatttttcccattagaaactttcaaggttggagttagatgaatgtcgattatagtaaaggcccaacattgtgacttactgtaatcaacactcttggtcaattagtgaattatgtacggccaagtatccagtccacccatctagatagagtttcctttcttatctcaagttcttttatcttaggccaataattttattctcaaacttcctaacacctatctaaatagatccttttgtggcagacttacctttttctaaatctagattcattgagtatttaatgacattcatattccatacaaaatactactcttttacaattttatatccaccagatggtggtaac

SEQ ID NO: 184800 - DNA, 3268 bp, Cannabis indica
gaacattcaattagttagtatttgttccatggcctccgtgaatggaacattgatgtccagcttcttcaatatttcaagaattttgaaaaattatttgtccatcttattcttgcggagcctttgaggataagtaatttttatatggtgctcagtgcttataggcaatgtagcttcaatacccgacaggttatcagtaacttgcttcttatctatttcagcctatgcctgtcgatcctacttctctttagctacttgttgctcaacccttgtcccctcatattcttttccacttctcaagaaaatttcttgacactgttcttttgatttaacctttgcagtactaggcaaattatcttattaattttaattttggttggccatatgagcagttaactgtcccacttggttctctaataaggttttaatggaagctctagtctccatcatgaattggagcaatagatctgcttgaatgttagatactccactattgttctgttgttgggcaagttgttgagtactcttttggaatggtggcctatatctctagttgatgaagccttgatgattctaacccgatagctatggatcatgatactgacgacgtccatcagggtagggataaggatcatcttttgaatatccaatggcctgagcttgctccattggaagatagttgacatctacttggcaagtttcataggtgtgaggcccaccacatagttcacaaaccacttgagtctaattaacttgggttgtcatcatctttgtcactgcttccacttgggttgttagtttggtgatggcatccacttcttacataccagctacattctttgcttgacttctttcaggtggccactgttgatttttcatggccatctcatctagcaaagcatatgccttattttcactcttcctcatgaaagctccactaaatgcaacaccaacaagggtacgattggtgttggtcaatctattatagaagttgtgaagttgtatccatttttctattctatgacgatgacacttttttattaagtccttgtatctttcccagacatcacatatagactcgttgtcatgttgcatgaaattattgatctttgatctcaatctttcttccttagcaggatgaaagaacttggagagaaatttcagggccaattcctcccaagtgtggatagaatttggtggcaaagatacctaccagctcttgacttgatcccttaatgagaatgggaacaacctcaatcgtattgcttcatcagtaaccccattcatcataaatgtctagcataagtcttcaaaatatgcaagatacatattggatcttctgatggcagtcccctaaactggattgtggattgaacatagtatggctggcttgatctcaaaattattcgcttcaatggtaggttgccttaatatacgtgatctaacccctgttaagttaggtagaacaaaaacttgttgtagtattttttaatgcaagtatacgtatcgttaacaagttatagactcacaaagagtgagatcggccccacaagaattgtagttaagtactttaaaataaaatttataattctatttgattgttcaaaattaagaaaagattaactctagaacgaaaagcaataaaaacaatagaataaggaaacaagatgcaagtagattgatatgaaaattaatgatgattacaagttagggttattgatttcaattgtatctatctattatggtctaacatgattcaattcttatacttaattctatgtaatagcaggtttactcaagtaatttatagtcttctcagatatataaatctcaattacatgcaaattttttactttcgtgataaattaaacatgtaaaagatattaaacacaaaaatcctataagctatccaaaccacataagtactctcatcctagatagaaatttgttcatacttcagtatagcataattgacacttatttctcatatctcgtataaaaatacttaatatttaattagtgattaggcaattaaagtaattaagtacgaataaaatagaatacatagaaaattggggaagaattaaatcacactaaaaattataaatcgatgtcaaacaatatccatcaatactctaataaactgtttggctactcttgttcatcgtaacaactcgactcatatcaattaagaacaaaagaaaaaaggcaaaaaagaagagaatattgaaaactccatcaaaaaagccttctcggtcctttctgctctctaatttttgtactctctgattgcttcctgaaaaatatgaaagtccacctcttttcattgccgaaaaaagataaaacaaatggaaaaatatcaacttttaggggggtgggctgcgacactggattcttagtgttgtgacccatgtgctcgaataagatattcccttgatattttttaaacatgggccttaactttaaaagctagtgtcgaggaataacgcccctaaatttgggcaatggactttttacgagtttttgcatcaacactaaggcacgcccatgccttggtccagttcgaccttctctgcccatttttagccctttattccttggcatggatttttagtgttgaggcgctccaccaagttttgtaatttcttcacctcaagagctccaatcgcaccaaaatttctgaattttttcctcgaattaattttcaaatgctcttgccccgagaggttatttgtttgaccatgttctcatattttttcaatattgctccatttagattctattttaaacctttaatataacatctaccaaaaacgtaaaattgtacaaaactagagaaaaatttgtttaaaatacactaaaatcaacctaaaaatagtgctaataaaaacctaacacatacattggacctctaatataagaatattaattattcataaaatattataaaccatagtattgaaaatttatatgtctatatattttattaaatctaatggtttaattatatatttatatataattaggtaagtgtttcaagtttagttgtatgtttatatttatgtatgtctaatttgttgaccagatcaacccgcccaatttggacccgcaaacttgccaacccacagcccgccacacgtgaacgggctgatgcgagttcacttttttcacttgaaacctgtgaacctaaaattcactaaccctaaactcggtccacctgttcgatgttcacccctaggaactaggattgtaataggcatccgtggaaaat

SEQ ID NO: 184801 - DNA, 2691 bp, Cannabis indica
ttaggatttgaagtaagttgcactctattaattgttgcaataaataaaaaactcattttctgttttactattatattatcaggtaattattgtatagaaacctaccttggaatcttcattatgcaattcttctattccatgtaaaaatggtgttttctttatcattttcatggcgtacaatgttgatattgtgatgcttatcctgaacatataattggatatttgatataagtattttttttctcactctctttcttatactggggcttctttcagtgacttggtcacctcctatggtcgtcaccttgagatgaagcatgatatgcttcttggcttgctatttgagcatggtacctacgaaaagctttatagctaccgacatcttataaacggcttttcagttcatgtttctcctgaacaggtgaaagaattgatagtttctaatttctagcaattttatgcagtccatttatccttttgtatcctaattcctttgcttgatcctcttgtaatgtaggcagaaaccttaagacgtgccccaggtgtaaaatctgtggaaagagactggaaggtaaggagacttacaacacacactccgcagtttctggggcttccaactggagtatggccaacaggcggtggctttgatagggctggagaggatatagtgatagggtttgtggactcgggcatttacccacatcatcctagctttgctgcccaccatactgatccatatgggcctgttctgaagtacagaggaaagtgtgaaattgatccggacactaagaaaaatttttgcaacgggaaaataattggagcccaacattttgccaaagctgccaaagcagctggggcatttaacccttcaattgattttgcatctcccttggatggtgatgggcatggaaggttagtgctcatcattctgtaaattttggaatctataattaccttacattcttaaatttagtgaaagtaacttcaacgtttcactactatacatcgataaatttgatcaacacttgttcaagacttcaactagtaagctcaacaatgacaattaggttttattgttttttgacgattagggtcttgctgttaacataaataattaagttagcccacccctttctcgggagaaatggccaagataacacacaagtacttagaactaattcattcttagtggcgatacttgtatgattagtgttcacataacagttttatggggaaaaaaaataatgcagttatagtctcatagtttgtagaatctcatgaatacatcaagagtaataatataactgagtcgttgatcagtgtcaggtttatggttgctttcatagtgtgtaagatttgtttccctgaagaggcttgaggttatacgaatattaaaggtatcaagctctcaaaggccctaattttgtgtttagtccttcagggatatctaaatgatgatataagcatacctgtttaatgtgatatacctgttttattgtcttttgattaatcacaccattaatcaattaagaacctgggaaataacatctggagaagcagaaattacagatgtcaaattaggttacatgttatagataaagcacatctacagttttctgttttgtggatactcacttttggtagctatgaaatctttatttaacagaaggaattagaatttgtggtctacctctgttaattataacggtatttattgatatcccctctagtgaaaaactgcaaagagtctggcctattactatgaaggcccttgcatattcttaaattctaacaattacaattgattctgcatatgaattgcatcatcgagatacttcctcttaattgttgtcttttctatgttttttctaagcattgcatatatgttcctatcatcccactaatgcacatgtttttcaaataggaaaatgtgtgataaccaagtcattcatttttagctttgctaacagcaatgctattttttcccacaatagttgacagcattagttttcttttgttaacttcttgccattaaacaaaaagaatcttttatttttagtgcttactcctggtgtttgttggtacttctatctaaatagatatgtatcacacacacacacacacacatacacacatataaacctatttatcttttctctcactgtttcatatgtcagacgtacagctgcaaatctttatctcatacatttttctgtatcagtcatacagcggctattgctgctggaaataatggaattcctgttcgaatgcatggtcatgaatttggaaaagcaagtgggatggctccacgtgccaggttaggaacctaaaagcaacaatttttatttattgacgatcaattcacagagaatattattctaaaggttctacttttctttcctcaccaatacatttagttgaaaatattaggttaacaattttcttttaaattaggatccctgcctaaccctacaatatttgggaccaggtaattaggttaacaattttaaaaaattaaaattctacaaaataaaaagaaaatgtgttattattttagttgaaaatatataatattgtatatggctggtggaaagtcatttcgttattaatggaagattttgttctttttgaaactttctaaatggtaacaaaataaatttaaaatttcattaaatttatttaaaacattaa

SEQ ID NO: 184802 - DNA, 2601 bp, Cannabis indica
gaaggactgcttaattttttctaagtaaccatacccgccaaagaaagaaaaaaaatatattattattattattattattattattattattcttttaattattattattttaaaccatttggtttgtatatatttcttaccaaacgcttggcagaattttagatgttaagaggagaaaaacgtgcttgatgtaaccattatgaattagtttgatcttggtaaatgtttgagagtaccatacttgtgcaaatagtaaaaagtaacatatgcatgaacattaggtggatgtcattttttgtatttgaattttggataggtcaccacgcttttcttaacaattttcttctctctttctattccttggtgtctctgtcttgtctttcctttattatattattgttattattattattattttgtggtggtgagaagaggaaagtggaggagggggggcgatttggtgtgggagggtaggggtaaagtttcatttatgttgtcaggcaaaactagctgttgtttctggtattctaccagactctaacgacaatgatatcaatattcaatactttgacaatgatcatgaatgtccacagtttataatgaatctagatttagaagtagttgtacgcagttgtctttatatggcatcttctagttattttctgactttctagctgttaaatcttaacttttgtttctcttttcgttgcaataaatttgttcgtatgtaatataataatgttacttccagatatgcctcagaatcaactataattcggtatgctaagattgccatgctgctacaaaacaagactgttcgtgatgtggcattacgggttagatggatgaatgtatgttcttgttctttttcgaatttcacttactcttgctcttgttacataatgccagaagttctagtgctgaaaatgcctaaaaattatggtcgtgccaattaaactttaatagtattattattttgctcacagaaaaaggaacacagcaaacgaaggaaggaagaacataacttatcgaggaaaaacaaagataaaaaggtagagctaattgttttgtattgtcatgcctttcgtcgtatatttcttttctagtagaaatatacattcgttcatttttttttgcatgcttggttgttgcagtactattttctggactgtgaaacatgtgctacatttacttagggaagttagtaatatttttggtaaactgagtctaccactctggagtggataattgtcaactttttacaaagttgtaaaaatgtgaagcaccactggaatatttcacatatattatgcaacttatgtaaatatttggtcaccatttgaagcaaattgcatgttcatatatagtatggaacctctatcatctttaactgtacatatgcataaggttaattagaatgtaacaggtggataaagaactagcaatgatatttctaaagtgttagtgaaactctctcttaattgaaatgctattaagtagatttatatatagtattggcctctgagttatatcaattatatcactttggcgcccaagttttaaaatgaaagagtagaccacccgagttattcaattgttgcgatgatagtccatgtatcactaattgtttgttttctattaggaaaatcattattgcatattctcatctgagatactttattatgatcatttgatcactcctgttaactaccttatatattggaacacaatgtctctcaagatatgtaagtaaaaaagtatgagttagttaagcagtatacaacaattttttttgttttccttttttctttggttggtggggggaggaattgatctaattttatgtcaacagtcctgagagtgcaacaattgcatacctcaggccaaccggctatgtaatttaaaaaattaaatgctaaagtgattcaacggttataaaaaaaaagttaagattcaacactgaacaggaacctgctatacatatgctgagtcagaaatatattaaagaatagttactagatagtgttttgcttgtgaaacttgtcaaatagagcatctggataaatttgtatgaacctgtgctttagtgggttgtatagtaagtttatttttatctacattatctaagaaaggtaattctcatggaagaaattgcattgtttcttaggaaagagttgccgatccatctgcaaagtcatcacattacacagctcgatccaatgttcctccttacgctccgccgatgattcctgtggataatgatgacggcattcctttcaaaggtaatttcatttatatctgtttagtaataaaaaagacattcattaggagtaaaattacacacaagacggagtaaaattataactctcattgcagaaaccaaactaccaggaacgaataaacattcacgacagaaaagtaataaaagatcagtttaaaccccgtacaattacaataaagcctcccaaaaccattgagttttgtgactttttgcatccgatactctatacagtgattcttccattataatatttcaatatggaatattctaatgtatggtggaaaaatgtttcaccttaagcatatgcttccatatgggtg

SEQ ID NO: 184803 - DNA, 5532 bp, Cannabis indica
gaccaatttcacacaaaatccattatttccatgtgggtctttattctcttttctggaagaaaactaattatgatgggccaagataaacaaggcccattcagtaataaatgcagagaagttctggtatgttggcgcttctgttcatcaatcaacaaccggaactacacaaagaaatctgagaattacaattccggcaaaggaaattctctcgattatcatttggatttggccccaattatgagtaaaatttcttcaccctcatacaatttcaacatactttgcttaaccatcttatataatatatataatgttttttgtttctatttctaaacatgcatttttctccttttcaattccaaaactttatgcgattcaatcttttatttgtccgtattcgtctgcattcatcgccccattatcgaatttagttgaattaatattgtaacattgtcttttctggcttcttgtattgaccttgatcattaattattgttatttcaatttgtgttttttttttttccttttatgatctgaatgaattttttgtctttttctttgtagatttgggctgaattatgacatgggtattgtgacattcttcactatacgtaaagggttttgtagaatttgagccaaaacaatttaggtgaaaagatatgaacagtaaagcatggagatgggttttgggtttgatatacatagttactgttgcagctatatggatagctgctagttttgtggtacaatctgttgtagatgcaggtgtatctcctttcctcattacttatatatgcaattcattgtttgtgatttacattcccttagttgaaataggaagatatttggaggataattatggaggtctttggttttggattagtaaaaaaagtagtctttccaaacaattgggagagtcagagaataccattcttcttggtgagagtaatgaaggtccaaagactgaagcttctttgcttttagaagttggagaaacaagtcaacatgtagaagatattggttatgcaagagaacatgtattagaagagcttgatggtcctctgaataatgaacatgatattaatgaagtttcggctaagcaaatcgatgcaaaagggcgttggacaaggactagaatggctagagttagtcttttgatatgccccttttggtttctcgctcaactcacctttaatttttcattgaagtatacaacggttactgtaagtatttctgaatgttgtgttcaatgcttatgttttctttttgtgtaatccttgttgtaatatgtgcattatttcttttatgcagtctaacaccattttaagcagtgcatcaagtctttttacatttttagtctcgcttgcgtttttgggtgaaacgtttacatgggtgaagcttattagtgttcttctttgtatgggaggaactataattgtcagtcttggtgactcacaaactggttcaagtgatattgcttcaaaccctctccttggagacatatttgctcttgcctcagctgggctatatgctgtgtatatcaccctcattcgtaagaagttacccgacgatgatgatgataaaaatggtcatcctagtatggcacagtttctgggatttttaggactattcaacctcataatcttccttccagttgtacttatactgaacttcactaagcttgagccctttagtatgcttacttggaaacaaactggtctaatcattggtaaaggtatgtcctttgcttccttcatctgttaaatcttgttctcgtaacattaattccttattttgtctccttgtgtatgttggagacgttttttttctctgctagcatgaccattggttatacttttaacttttattcataaatttagagtgccacttcataatcttgacataggtgaaaataaatattattataggagtttttattttatataagtaaccgtttgtagtagttaagttaaccatttgttaaattagcccagttgttatttgaattcaaataccttacacacaacacatacccaattacttgagctagacactcaggtggctattacagaagtttttctttgatatgacttttatcggttaatacatgtgcttagcttttcaataaccgaaagttttattgcctcttgatttcagaagtttagtggctttttcattttttcccattgttattgtaaatcagatactcatcataacatgttgctgaaattacaagaatctatctcaaaactgatgacacataaaaccccaatggcatttggaatttttttatcattcccacaaatcggttcctataaacttgtactaattatgaactctgtgttttcatgtttaggtttgttggataatgtgctgagcgattatttatgggcaaaggcagttattctgacaaccaccacagtggcaacagcaggcctcacaattcaggtgccaatggctgccattgttgattctctgacgggcaatgcccctcatcttatggattacctcggtgctttggctgtcacaattggttttgccggcataaatattccatctgaagccttttgcggatcaaaagaaaccaatgtggaagaagtagaatgtaaaagatctactttgactgagtatgatggcaacccagaagcaggagttgtttcttgattatgttttgcaagttaaattataccataccgttccattttagagaatcatctctcaaacatattgttgcaatgtatttagctaattagtatatcattttttttttttgcaattcattacatgtaatatttgatacacattaaaacacatatgttaatgaatagtctcaatactttcagatctcaaagccggaaacgaacttcatatctattcttctaaaaccgaaacatatttcagtgaccttacctaacctaacacaatagagtaacttaattctaacaatcattagttctcgggactcaataggtttgaaattcatgtgtccttccctctaggccaaggtcgtagccaccggctttggccctagccgaggggcaatgcagtcccaataacagtgtgggcttgggagacgacctttgcgtagtgacaccttgttgcgacggggctgcagtaggtcctcagggagagctggaccttggtgaggggctggagaacctgggctgtgctggatgtcacttctctatgaatggtgagggatcaacttctgattgtccacgattctcgacaaaattatgtttaatgcattgttgcctaattgttagattttagaaaagagaccattcgctttgtgagtatggtgtgatgactgtatgagattctattatagttttcttaagatagatttatacttataaacgaagattcattaaactagtgttaaccacataatacacaccataaaaattgatttaaaagcgagtaaaccagaattgtttccagttcaattatatacgacgcatcacaattttatcacacagtttagcttaatgttgtcaaaggttttaatactgggaaaaacatgtccccatgtaagaaaatccattgcacataaaaatcatagtgacatttgttgtttaatgaatttgggagtgtgtttatctaacccacaaatgataaacagcatccaagaaaatcattccaacaaaataactgatattcagttttgtgatatcaccgaattcaaatgaccatgtttctgcatcactcttctagttgccaaagctgcagcttcactcgcacgcagggtaccagtcgccataattgcagcaaactcggcagtgatctcctcttgcaccttgcttcgcgcatctcctagaacgtccaccaccccattgctggcagaaccctgctgtgttcctgatttcacctcaacgttctctgaggttttcgacttactttgagagttctcgctagtcccctctgacttctttcctcccgtggatggttcaggtttaacgcttgacgttcttgtagcactaggaaacggtactgtagcaggcctaaattgtggaacttgaggaacagcaccagatctcaatgtcgactccagattctgtatcatgggcactgcaacaaaaggaaaaaggaccgacaaatcaaatgaggagaacaatagagttaataggaatccccttctgcaatatatatataagaataaacacttagttcacacgggagaaaaaaataaactacagtgttacactctattgaagtttctcactatatacagtagtaaacctatggaagtaccggtaagtactattttcagcagtttccttttattttcaatcttagacactacaacactaaatatttccaacactaaggaggaagctgcaacaaccatataactagtgaagttcacatggaaaagaaaaaattaagaaggaacggtgaccttaaagtaaaaccagatgaagctaactaattattcaaccaccagtttgatttaaataccatgttagtaatctgacaataagttcatttttgtttttaagagttcaagcgtttataatgtgttaacagcattagtgtttggttaccatccaatgaattatacgaaaaatcaactgaaacgacagaatcatttctcaagaaaaattaaaccgttatcctagataattatctcacgcagcattataaaaaataaacacatgatagaataacagtactcaaaggaatagcacaatggcacttacacattagtgctcccattggactgctcatgacttcgttaggaaggtgcaagatatactctggtattgtagtacctaccaaaaattgagcaacttcgttgctaaagttgttgcaattgtgagttagtaaactgtaagtttcagccgtgtaccgaggactaatctcttccaaatacgtctcaaacacatctttgggcacatgagtgacacccaaatctactctttttaagggtgttccatatggggtcgatccagccggagaatgttgtataccaccaccaaagtaatactcattgccataaacaacaactccagtgtgcctgacaaaacataaacttcaaaatcagcaattctgtaattcttcctctgtagccacaagcattgatatgttctactctcactcgctcaaaacaaaacttcaagaaaaactcaccaaatgccctcaatggctttccccaaaaatgtggtggatagttgcctagctaatccttggctaaggtcatacacgttaagagtaactttgtatccgtcctgcaacgagtaagttaagattcttaaattttacaagttttaagacaaatgacaaatagttttagaagcaaaattacattgtacacacaaataattaagttccatacctcagccatctcaaattcaaatgtccagaaactcggaagttcagtaagactcgataatggtcccccaaattaactgacatcgaaaaatttacaaaactaattagcaaatgaattgatagaaaaagaactcaattgctacatggttccaacatgggttaatcaaactaaattgacctacattacttaaggaaaaaaca

SEQ ID NO: 184804 - DNA, 2576 bp, Cannabis indica
tttttttacagcttattacctttataataattaattacgattacgatataattagaaagagcaccatatatatacataatgtttaaactacaaattatagaaaaaatataacagaagaaaacactcatcaaccaatcagataattataatatataaaattagataataataataatatgctacttaaattaactattaatttagtatctaataataattaagtaagaagcattaattaattagtagtagttagtgcaacagcagcaggcatccaaagagtagcaaaaacaacattatgtcctttccaagtaagaacaagatgatcttcatcttccttcttaagtccccaaccagcagcatgttcatcaagcatagtcttaacctccgaaacagcttcttctccgaatccaacgctccgaaaactcgcatttctcatcctctgaacccacctactcttcggctcaagcctttccactctctgaactccttcattagcaattacgttctcaatcttccaaccaatatcagcttcgtaccactgcctttgtttactccccttaggaagaaaagtctccaccgtgtcataaggtatccaaagaaagttaaacgcagaccttaatctacacaccaagttattagacgttaagtctgcgtcttcatccactaaaacgaccacgtttggatccaaactccgaatcgatttcaaaaacattgatctcagagaggatgacgatgatgaacagtttatatcattatcattattattactgttgtttgttatgagggtttcttctgggatgtaatgaagcatcatgtgacagttaataacgagagcttcgggggttatttcgtaattatgattattattaactaagtagtgttgttgttggagtcggagatgttcgattagtgaagcgaaaccgtctgagtaagttgaatgaactaaccgaaattctagaattatgtttcttgaccgagcgaagttgaccaactttaaaccgagttcgtcgtatgagatgtcaaggattggtggaacgacgtcgtttgcttctgctgccaccactaccgtcagtttgattacaggtgtcacctgttaattaattaattatatttgattaattaaattaaattcgaaaaatttaaacaaaaatattttttattttatttaatttttcttacattacctcgtagtgtcgggaggcaatggcgtcgagtaaggttgggatctgcatgcagtgagttgagctcaaatcgaccaagtgaattaccgaaaagccctcgacggcttctaggatggctgcgttagcggctgtgaagccgaagcggtgccagggtgtcaagtcgatgaaggtagcgaagtcaatgactgagaatctgtgtggaacgtcaaaaacgacgttgagattatcgtcgttttgggtttgaactgcaacggctgaggcgagcatcttgatgcagctggtgccgatgcgtgcggcgcgtgtgattagggctcggaggaaagctgaggtgagtctctggtttgaatctccgtctggttgagctatgttgttgaggacccacaagatctgttgggccaaagtgacgtcgttggtttcaatggcgttggcgcagtgaactagaagttgctccatgcaattggcgtctccaaaggaggttcctaaggccttggaggttgggaaacctcctggccatggacgatgatgatgatgacctcggtttaattgggttttgttcataataggaagattattacacaataatattggaggaatatttggaggcgtaattgttgtagtagtaggagtaggagtagtactggtagtagtgaattgcatcatttgagaatatatttatgtatatataaatatctaaaattaagtaaaaagaaagaaactaattaagagagaaagagacgagactagtagtgggtacgtctctgggtaatattgggaaaccaaccgaggtgaaaaattataatggaggaaagaaattaaagaagagcagaagagtttgagagaattctgcaaatgaatcgaaagagaaatagacagttcagctttatgtgaggattttgtttgtattgttttcttttctcatgggagaaaaaaaggactggtcatgctcagaaaaatagagagaaacaaatattttttcaaaaaaaaaagaaaaactcttatcccgaaaagagaagaaaaagaaataaggaagaagaaaatataagagcgtacgtagctaagtggtatttattcgtggaaagtcaaattcggcaaaagagacatttcacatagaatttatggacgtatgtatgtaattcaggcttttttttcctttttcttcagtacgtagtgtgcaggagctggtttatgaagggtgcaataaggctatagtatgagtactgaaacaaccttttcattactacaaaaaggtctaatcctctcttcgtatctactttttgctgcttttttctttgctttctgagataataattatagactgagagagatacagagataaataatgtagttatagagagctggtttggtttgatataggccgaagagagagagagagag

SEQ ID NO: 184805 - DNA, 972 bp, Cannabis indica
accttggtgtgaagaacttggaacaagagacttagctcatactcaactactctgaaagcacatttatgatcttcaattttcataaagtactctctgcatgattttctatctttggaagttagaaaaaacccaacaatgagtcctttgaaccttccaaagagaatatgagctgccttgagtaatcccaattcatcacaagcttttaaagtgattctattaagttctatgtaagaatcaagcctagaagaactcccaacaccactctgatttgctttactatctccctgtattggaatttgaagaagtttagagaagtagtttgtggaaacctcttcatagtcaggcccgggatctggttttcgtagagcagtccttccgaaacgttccaagcttgcaaggtaaaaggctcttgtcctctcagtgtacttaatgatgccaacaaagaagataaggagtgtgggaggccatagcttgttattagggagagtgaggtagaaactgtaaccagcagccatgacttgtaagacaagaccaaacaagtgcctaagccaaaactcattatcttcaagagcaaaagaggtaatggtatcaggtccaccaagatggagtaagagaaaagaagcccagaatgcataaatgtcatgatcatattttccatccttatgatcatcacaagatctggtctgttcttgtgtaattaggcctatggaaactgcagcaacccaatcagctagcaaataggctgcccagatgagaatgagtaagaatgagttcttgcagcgttgtctagaggatgcaaacaagactagaattatttgtagaagaaggctcagcataatgcacccccgaaggctccataaatcccataacttctgtattttttctgggattggtaattccatgtttcttttttcttgatcatcaagtattggttagttcaattagttgatttgggtaatcatgattttggtg

SEQ ID NO: 184806 - DNA, 1890 bp, Cannabis indica
gattacaggtcacaaatgcagacaattataacaaaggcttgtaatgagcttggtataaaacctgttcctagtaaaagggtatgcatttatagctttgttttgtttgaatttatgttatgttattatgttgtttggaagatatggtaatattgcaattaaaggaaaatatatcatatcaagtgataaaattttggtgtaaaatgaacacaatgagataagtttctaaatgaaccattttaagaagctttttgttacactatgaaatagtgtaggggcttattagtaatttgaaaagggtgtgaaggattataaatatgtaattgtgtagctactgttggatatggattgaaaaaatagaactttgattcaattgggagattgacattgcctccaagagtgcatttggagatttgtactatctcgaagaggacctattacttttacttttagtttacttaagataagtaaaaatttccagtgttagtgtttgaataactattataataacgattctttttattaaaaagttcttttcaaagtgtagatattatttaaaaaaaaaaattgtgtgtactatgtaaattattttaattgtaaaataacttctcaaaggtctttttgaaaaaagttttaaaattaaaaatgactttgtattgtatccaaacacctttagaaagaattttttcaatagcttatagaagctaaagacaaaccggatgtgttgaaataagtagaaatgtagaaaaagaggtattgaaattagtgtcacaacctatcaagttagctaacttggagtgagattagctaaaggcatagtgaactttgtatggtttctttatattgtttaacattcttatggttgtttgtttcagtgtgtatctctgctgttatggttggatgaaagatttgagactgtatatacgcgtcatcccggctaccagaaaggagctaagccgcttcttgcattagataaccctttcccaatggagcttcccgataatcttttcggggatagatgggcttttgtccaattacccttgtcaggttagaaaatttactccttttttctctctgtgattgaaatcaattctatgttggcatgttttctttgtactgagcttccttttctttgactattgtctgttggtaataagaatatctgtctcatgttttcagctgttcgggaggagattttatcgttagaatcaaaacttgtattcggttcaagtttagatttggatttgctggggattgaaattgatgacaatacaatgataccagggctggctgtttcttcttcccgagctaaaccgcttgcaggtgcatactctgctctactcatttgtgcctttatttcttcaatcttgtgttagttttactctgtaaattgctggcattttctacaaatttgacttagaaacaattttttaaccgagggatagctcaaatggtcaggcacgaagtattctcctataagctcttaggttcgagtcccttttaggcacttagataggttacacaccattcggaaacaaaaccaaacaaattactatcgaaatctttactcattttctcacatgcccatgtactattttgtgtggtttgattatgtctttctctgcttctgcagcatggatgaacggtcttgaagtgtgctcgatagaagtagatgtggcccgagcttcgttgattctttcagtgggaatttcaacaaggtatgtgtatgcaacttacaagaaaaacccggtgaccacgaatgaagctgaagcttgggaagcagccaagaaagcttcaggaggtttgcatttccttgccattcaagaagacttggattcagatgactgtgttgggttttggcttctactggacttgcctcctccacctgtataa

SEQ ID NO: 184807 - DNA, 6287 bp, Cannabis indica
ccaatgcattatccatggccgaaagctgtttagcttcagttcccacctctttaccccaaaaaccatacccatttcacccaattccctcaaaatccataaagctctcatctttaccttctctcccttcatgggcatctctaaaacacaagtctttaccttccagactagtcccactgcttgtggctcagacctcagactgggctcaaggagaggagaaagaaagtgaagaaggcgaagatggtgccacttgggaaaatcaaggtgatttgccttggactggtcaagatagtgagacagagcaggaagaaagctctggtgtgcaagccttttctgatggtgttgatgaggttaaagatggaggagaggaagaagcttcttctggggatgacagcttgttgggtggtggtggtggtgaattctaccctgacccacctgaagaggccaagctttatgtaggtaatttgccttttgatgttgatagtgagaaacttgctgacctctttaaccaagctgggattgttgaaattgctgaggtaaagttttattttttttctttgatataattgggttatgttttaatttgaagtatggaaattgtgtgtttctgattggtatttttgtgttgttattaggtaatttacaatagagaaacagatcaaagtagagggtttggttttgttacaatgagtactgttgaagaagctgagaaagctgtggagcagtttcaccaatatgtgagttttgtgttgctttgttaccaattcttagactctatttttcaataagtagaattatttcaattcccacttgcattgttttataatgctaaaataaattgcactgttatgattcattgcttcttattttataatccttactccatttgtctagaactgaaactacttcaattcctacttgcatcgtttgtacttatctgtaaacatagcttacaatgttatgaatcattgttttttattttgtagccacttaccaatccttacttcaatttccacttgcattgtttgtaagatttatctgtaaaacataacttacattgttatgattcattgttgcttattatgtaacctcttaccaatccttactttttgtctagaagtgaaattacttcaattccaacttgcattgtttcgtaacagttatcagttttttttattattattattttgtaaccacttttactgaagtaaccatgtatctgtcaaggcttttatataggggccatgtctcagtgttttaagcgttccatatgttgtgcaaacaggatttaagtgggagacttttgactgtaaacaaggccgctccaagagggactcggccagaaagaacaagagtgaacgaatcttctttcagaatctatgtcggtaacctgccatggcaagtggatgatgttcgtttggagcaagttttcagtgaacatggaaaggtggtaaatgcaagagtagtatacgaccgtgaaacaggacgttcacgtggcttcggctttgtcacaatgtcaactgagatagaagtgaacgatgccattgctgctcttgatggacaggtgaagatttcatctgggcttttattgaaaacttactctgttaacatttgagttcatataagataaaaccaaaaccgagtcgtgtgtctatagcatttctttgcctgatttactttctatgtggttttcagagtttggatggcagatcaatcagagtaaatgttgctgaacagaggccgaggcgcacctcgttttcatattaaaaagattgttgatccaggattcatatgaactctgcgaattgaatttgaagtacaacttttagagaaagagaaagagagagaggttctacatttttctacctatttgattgttgttctagtaactggaaagcttgatgtagagggatgaaaatctcttctgtttagtttccaaaacctgcataaggttgttgatgaggctagccataattaaatcccatatatttttctttcattgttatagtttaatccctcaaatgcagccaactttttcattatgtacttgtactactcatctttcatggatggtatgctttttttataattaattgttaaccaaacttttttattgtcttctttgtgagtaaaattaataattatttcttttgttaacactgtgcatttgttactatatatatatttatgaagttaagattcagtctttcctaaattaaaactttactgcatttggaatgaagtcaaattctagtgtaagtttatcatcattttgttggtatttgaacttggtcatttttttctattattaaaatagtaaagaaatgaggaagagcattttgcccaatactaattggggtataaatggtatgagttttaaaatgtttaggcaccttagaatctaatagcaatgctcaaaatagtatttttatgttactttgacttatcaatgcagtgtcttataacttttcttactgaagatataaatttgttcaattcatttgctgtgacaataaaaaaaacagaatcagactgaattgaaacatccctgttaaaatttcactctaagtgaaaattgtactttacaatagaagatatgaacttgtgataacctttatccaaaaatctgtacagcgcaaagcatgactgccaagcacatatgaaaagtcatcagaagtctatacactaaactcagtaggtacttcccaaaataatgtactcttttggcttgtgttcaagccaaaaatcatcaaaactatagactcatttttctaacttcactattcctaaaaaaaatgttggcactaccacccaaccaaagcttagttctaagtcttttacaattagtaactattttcatcggttttcgtagcgacgtgcaatgctgatatctactgtgagagcaacctagctttctcaactgcttgaacatagtaatacaatctccaaagtgttatgttactctgcaaaagcaagatacaattaagaattaaaatctaggtaattcagtaaatgtattcatgtgctctcttttctcttcctttacctctttttcaagatctactttaatttcatcagcaggttttttctctgcatgttctacaagctccacaacacggtcaagatttttaggtggcaaccccttaatcatcttttgaagttgtttcttctcaggaatggtcattggcctgcacatcacagctaaattcacatgacggactgtaatgatagaaagcgttctgtttaagctgcagattttgatacaaatattttttaatcacaatgatgtgtaattgatctcaactatatagttaaaagtgaagtagttccactatggttttgaaaagcagtatcgggaactcaggcgttttcccttagccccacaaggtgtaagcattgaggtgtatcaagacgcacgcctcaattcagaaagaggttccatttcaaacggaaaatggtaaaagttctaagcatataaagaagaaatatagacatatgtatagagagagagggagatgaggagggctatgcaatcgtggagagatggagagtgttgtcgtgtaagagggttttagggttatgttttcctatctttgctatgaaaatttgtttaaaaaagaccaaaataaagtccatcatagtcatttaaaagtctgaaaattgcaaggagaaaagcttgtaagaaaaagcccagtcaccccccaaaagaaaaaaaaaaagagccccaacacacaaataaaggccactgttgagatgtgtgcctctagcacctcatcactgtgagacgtatgcctcaatgacagcagatgaggcatagcctcaggtatgttttctcaccaccttgcctagaggattacgccacagcgagttttaaaacaatgatccccacttaaaactacttatggctaaaattgaattcatcattatatgtaaacaaatgtgtaatttacacataaacatagtgaatagccagaatatcaaacaacaataatttatacaaacacagtttaccatcctatagatacttgcctaaatagttctaccgaggatacaatacatttatttcatttaactagaaaatcccaagttaataatttggtatcattcactatttctaagacacttttaatagaaaattcaactgcagtttgattaaaatttaaaattatgagctattagtattatacaccattacctgcacacggacactgcgatattaagaagttgttcaagctgctggtccatgtaccccagctgaaaaacaacatcatcattcatcattctatgaatatagcttttatattcacatctatcagatttgctatcagctacatatcaaaagaaacagaaatggaaaaccagaggagaaaatacatgtacactgtttttatatgtagtagagaaattttcagagaattacttttgaagataactcatcagaaacacccttcaaaatgttgtcaacctctgggccatcgttttctatcaggagctgtcgattatcatcaccgttcacctgaaagatacatataagtgcttaaaacaaactcacttgtaagatatattaataaatgtaaactccccagttgaatgttagccaccttagactcttctggaccagttgtcccattgacagaaatcttattagaatcatttgatccaggattaattggacttgcaactttaggggttaaatgagaaattttatgtttctttagaggaggttggccagtgtcaccattttttggtgctacacttaagcttgatgaatttttcctgtttcttcgatgcattcgaatctcccgcatttgttgaacaggatatagcatctgcaatgaagacactcttacaccagcttaaacaaaaggatcagtaactacaaagaaacttttttcttttaatgagaaatgatcactaccaaaaagaaacttataatacgattgattgggatattaaagtagagaatatgattgtctgaaaacttataactgcttttacttatggatgagaatctttagttagattacggttaattgaattacattgcttcattaaacacaaaataaattgttgcaaaaagttaaataaaataaataatatattaagtccattgatttaaaattgaagggaatatttaaaacccaccattttaaaaggatttaagattacctcttatgatgatatcaaacagcccaatataaaggaatcattttccatatcagtaaatcaaaatacctcattgacttctggagtaagactatttacaccctgaagaagcaatgtcttcaatctttctcttttgaaatcagatagctcatctcctactccattactaaatagagaacaaggagctacaaaatcactctcccctctatcttcggaagacttttttccagaaaaatcggaacttttagaagaagtaaatagctgaaaatcctcaacttgcgttaatagcttttgagcttgacatttatagtaaccaaagtaatcaggtccatctctattgtgttcactggaaacatttctatcttttgacataatagcaatgaagttcttcggaatcacacatgcaaacaaagcttaatgattttaacggaaaaggcaaatgggtattggccaaaaacaaattatctgcacacacaaattgaaaataaccaaattcaaatatgttggtatgagaaaaagctacgaacaaagccaataaatacgaaaaaataaataaaaattgtacctttatcttgaatttctttcaagaaaatcttgcattcactccatcttgctcctacaataagaaaaagaaatcgtaacgtcatagtttatattattggaatttcccagcaaccaaacgaatcatagttgaagaagtttttcgcaataagaaaatataaaccttttaaacgtgaaaaaccctaatgagcgcagaaaaagaaaagggaggcgcaacgctcaaggtttcgctcgatttatggtgaaaatctttccttttgtttttcagagtagagattcaattcatgaaatttattgtaaggtttctcgggagggaaagaaaacaaaaaaagaaaatattttttcggaaattaattatataaaaatatcttttatttattttgaagggaaaattgatttatatgaaaataaattaaatatgaaaattgagaacatcgaagcctccatagctcagtggtagagcgtcagtcttgtaaactgaaggtctgtagttcgatcctgcatggaggcattttttattttaataatttttgttttgtattttctaaaggattttttttttt

SEQ ID NO: 184808 - DNA, 3674 bp, Cannabis indica
gagagagagagagagaagagaggcacgagatctgaaatgcctgaacaaaatgattttcttttggatttttataagtttaacatactatccctaacgatttaaaatcgtccggtatactattattgccgacggtttaaaactgttggctatagtacaccaaacagttttaaaccgtcagggatagagataactcatttttgaatttaaagactgtgactgttttggacagccagggatcctaaaatgactgtttaaaactgccgggaatagtagagtattcttgatgattttaaatagtcacttaactttattagcgacagtcctcagaaaaaattgatttaaaaactaacgggaataaaccctttcgtagtagtgtctccgtaggattcttgatttttggaataagagcaagattgttgtcattaatgccaattggaaagtcacccgaaaagaaaacctattgaaccaacttcaccacatttgcccccacaatatgccataattttttataaaatcccaaactcatcccatcaagacctagagccttcccaagatgcatttgaaacaaggacctatgaacttcatcttccaaaacaggtcgcaccagatcgtcattttgagaagctgaaatcaaagcttgaatatcatcaagcaggttaccccactcagtatctgagccagtaaaaagatcattgaaataatcttttactagctgaggaagcccatcatcccaagtataccaagcgccattatcatcttgctgcttagaaatatgatttgtccttacaagaactcactgccgcatgaaaataaatgactatttttatcaccctcctttaactaaaattgctttgcccgttgcttccaaaaaacttctttttgagttagaatctcataaaacttacatttctcttcctcatacaacttttgtgaatcagaatcaattttttaacgaagcttgtctcaaccgtctcttacactgcaacaatccctccttaaaataaccggtaacactcttaccccaatcacttggaactgccccacctagaaaatttctcaaagagatctgcctccatactaccctcccaaacatccctcactagctgctcacacatgggctcccgtgaccatgatcgttttcaaatttaaattgcttaacacacagagaaataacctgaatacatgattctaaaaaaattagacaatgatttgaggtagacaacacgaccatgcatccaagattacgaaacaagagccttatcaaggcgagcctcaatccatgcatccgtaccacacgaccatgttcccatgtaaaagtatatttacttaactcaaaatcaaacaacccacaattatctagcatacctcaaaatccatccaatagctagttaggatacgccctcccgaccttctctcttctcatcattactccccatattattcaagattactaataatataccatggaggagtagaatgattcttcagagtacaaatcgaatcccaagtatttcgtccaaaccttctattcagctcacaatacaagcctgtaagccttcaagccttcaagcctccatacccccaaccgtaacaaccacatttatgtggtttttcgaataaccaaatacaatagtctcttcaatatccttccagaatataacaatatcaccactatgctcttgagcatcaacaggaaaacatccttcataattaatgtgaaccctgaatctttcagcaacctccttactacaaatcatctcacataaaaaaaaataattaaaattggatttcttttggataataagatccataaagaattgggtcgtctgcatgttcccaagcccatgatgattccagcttagcgtactcattgcgtcaggcgggcctgctccacattccgcccctcgaatattttttgacccctcaatagtatcatggtccatcacctgactaacaactacaatcggcacaccatccccctcaactcttaacttttgtttctttatctctaccaaatcaagaacaccctcatgcgacaatatttcatctacaatcagctcattgacatgcaaaaccctcacgactagctatcacccaacaccttttcgcccaccataaccttacccttatttcgtacaccattgacaaagtatctcctgcttgtatcatcatccccaaccggaaccactgccccatccctctcacgaccctctccggccccataaacacccaaaccattctctcccaccaccaccggagtcaaacgcaacaacatagctccattctccgtttctgtttttagtatttaaaaattacaactaaattttttacataattagtttttttttaaaaaaaattctaaacaattattattaggttaaaaaatttaaaataattaattattttaatataaaatactttgacttatttgattttgttttaaaaaatctataaaatacatattgtttgcttttaaataaaatattttttttaaaaaaatattataatttaagggtgtatttggtaacacttttttaattaattttttgtttttaaaattagaaaagtaaaaatattttccaaaattatcttctataaaatagtttttactttttaattttttttaattaagaatcaaaattttgagaaaatcaaaatttttttaaacagtttttttttttaaattaatattttggactccgatcccaacttagaccttgaaaattgaatccaaacccgggcctagacttggacctatccccaatcttgttcttggacccggctttagactcgacttaaataaaatcaacaaataaaaatgaaaataaaatttacaaaacatatttttatttttatatttttaaaattaaaaaataaaattgattataaaacacatttttattttttaaaaataaaaatttaaaaataaaaatattaccataagtcacctaaattattttatttttaatacaaaaaatgaagatggcttacttctttttttttttacttttttgagaggtggtataatatattttcactcctccctgatcaccacttaattagccttagtgggtttaatgaagatggcttacagtaaaacagaaatgtgaccttgtagaatttttcaataattattatgtaaaaaaagccaccaaacaagacacagccacgtgggagggtccaataacaatagaaaggatgggttaacgtgacaagacgtgattggaccagcgctgacaatacttgtacggagaaccaaacccccatgttgtgattcagagcccctcgtacggacgagccacttaaatactaaaaaaaactcttactatattagggttttttattttattattatataatgataataatattagggttttttattttattattatataataataaaagagagagaggagggttcttttacagtgcccgagggtgctccaaactctccctgcaacctcacgttgggaagactgtccgctcacaactggcaaccgacaagaatgttcggtgtctttcccttcgctcacttggctgccaccctccgcggccaccgccctgatcggttgtcagtcacccaccaccacgtgtcatcacgtgctctctaaaccactcaactttctctgcttgtgcatccataggaagatttttctttttattttttattt

SEQ ID NO: 184809 - DNA, 3355 bp, Cannabis indica
ttaaagtttttctttttctttttctgagatgaatctaacgaatttcattattatgggaacttattctcagttctcttctgattattaattttaattaaataaagattctcagttatctaacatcaactttgattttgtgtgtgttttgatctgtcaaggcttaaaaattttaatactagagatctttgattactattgaggttaatgcatatataggtatatatcttgaaatatcaaattaatcgatacattagttgatctcaaagtttcatttaatataaacgtttttcgatttcttagatttgaggcgatgatttcagtttccttttctctgttttctttattggtttcatcttgttcattatgtctttctattaaaaaatccttattttatggcaaaaggtgtaattctgtcatcattagtcatcagaatttcttgtttttttttttgtttatgtgatgaggatgatttattttattcaaaagaaataacattttcactaaatttaaacttcagaagcaggaaaactttttctttatttatctttattattatacatcactgttcagaaactcccttttttgtcaaaatttggcataaggaaaattaacctcctttggaaaccactatatgtttttttaataattttttttccttttagttttctagtcaataatatgcttaaccttttgttttgtaattgtatccccatcaattttgcagttgactttccattgtcatagctgctttgacaagtttccttttctattccttatatccctcataagaaaagtaaataataatgttcaatttgattggatgttaagtgtgtgtactattattctttttggtcaatatcataagctagttttgattggtttcaggttttcttgttctgaaagtaagcttgacataaattgctcctttgtgatggctgaggagagcatcaccccacctatagggaagaaagaaaagttagttcctcattatctaagagcttctactggttcttgtcatgatttttgtaaatttgggaagaaacatgaagcagaggagttggcaaggtatcctataccgaaaagacttgctgcaaaacttagtgctagtcgacgttcaatagaaactgctgctgattcttcagcgaaaaggaactcctccacggtgaaactcaagaattctcctggttctagaacttattcacctaaggatggcaacatttctaaccggaaggcactgacaagatcacttgatagcctgaatgttgtcaagactgatgagaggaagaaaccatcttcggtcaaacatgaagctgcatctgcattaccttcaaaactgcgaacacatgataccccgaaaactatgaagcaaaagctttcagcttctactgaaaagctggaactgtcttcaaagaaatcttcaacaacaaaagctaagccaaaaagcttttctggtaagaatcaaacttttccgaatttgaattctgctgcagtgaagccattgtcttctccagaatcctctggaagattaaatggaaatggagagacaagaattggcaagagaactgggagtacagtggctccaaaaaaaggactagcatcaccaaaagtttcattgcccaataaaacctctccaaaaaaaagtgttgtaagcttaaacagaaagcagcaagggagcttaaagaaaaatgcttctcctctcgaaactaataatgaagtcagaatagctgagcctacagaatccaagaatggtgaagtcccggaaaaaactctgtatgtcatcaagatggagactgaaaagaatacttcagaatcgaatcagaatgaaacttgtgatgcagaagttgaatcattgccatatattttgtcattgtcacccaagtcttcacccctcccagaatgcctctcttcgccatcttcttcaccgctcccaggaggctgttcatcttcgtctccatattcatcacctcatgaagaggaagaagatgaaaaacaaaaacaagaaggtgacaatgaagaaagagaagaagatgaaatggagtctgagtgtacaataagtgaatcagaggattacactttctcagaggacagtgaaacagaaagcatggagaattcagatacactagactcgaacaacaagatgcgcagaagttcggggttggtttgtgaggaagaagatgatgacaaaggttcaaaattgaagttcagaatggggaaggtggtggatatgcacactgagaatgatgccccgaggaagctcaagttcaggagagggagagtgttggagaaccaaaatgttactgcagacgcgaggagaagaaggtttaagaagagagaagaagttgatgacaccaatgctgaagccggctcagaaaaagtggttttgaaacatcaagatgtgcaggggaagaaagatgctcaaggtttgttcaacaatgtcattgaagaaacagcaagcaaactagctgaaacccgaaagagcaaagttaaggccttggttggagctttcgaaacagtgatatcgcttcaagacaaaaaaccttcaaacacagccagttaaggtggaacaaatcttcttttaattaacatacaaatgatcataaaaaaaaaaagtgaagaataagcttaagcttgtatgggaaagtttttgtattctacaagcttttggaactttgagaaaatgtaaagatagattgcttcagctgacttcattcctgggttggtgagatgtgtagaattgaatttgagttgagttgaatatgagtggtgagtgtacttactgatctttggcacccttcatacacaaaacaaaagggtatatgcgtttgcttctgaatttgatactttctattattatttcattgtttgtgaataaaaacagttaaaagaaaaaactcttatattgattgatgtacttagttcatgaaaagagagaagataaatgcttgcatttgtcttttaataatgtctctcttttaataccagtgagaataaaccataacattacagtggctttttattctttaacaatggcttttttttctcttttctttaacagcactaaaacagtggcattatattttcatactttatttttaacttgttatttcagattatatttgtattttttttctaaataatgttagtcagctcaatgtggggagtatcaaagttggaatttgtagtccataggttatatctttgtaaatcaagtggacaaatgacctattaaattaagagaaaaagaagaagtataattaagaaaaattctaatattttaatgaaaacctatacaatgatgtaattatatatgcaagcaatttgcaaagtcaaactgatatgccttcaatgtttggaa

SEQ ID NO: 184810 - DNA, 1811 bp, Cannabis indica
tatatatatatataaatctatacatgtatatttgtggtattttcaaaagttcactaatttagaatttttggtaattcgataaatacttaaaaaattaagggataatttcacaaatgcacaaaatcaacaaaaaagaaacaaaaatacggtttcacagaattttaaatatttttacgatttttttgattttatttacataagatacggtcttttatgttgaaattttgttcatttgttgttaattttttgtcatctgtatgttattttttgttgttattttcatgttacttttatgttgttttcttgttgattttatgtaaaaaaaacattctttgaacgtaaaaatataaatattttacaaaaaatagtgtcttatgtaattattccaaaaattaacagtaaaataaaataataataatccactaacaaaagaccaaacgaactaaagaaaaagttaactaaaaacatagaatgttggatttgaaaagcttgggtatttgcagcttttttatctttcttgcttcctctagatggagttaaggctgaaaaatatacttggtatattcaaataagctctaaaatcaatactataccatccataaattaccatattacataaattataccttagaagtgacctactttataaatttgggatgttcaatttattaatcatcttttaccttttgaccctattcaaaatattttgagtaacttttggcttttttgctacttaatttatgcattccatgtctgttaaagtattttttaaataaaatgtttagtaaattctttttatgcaacgagatttttattaagaaataatattaatactgacatatgcacctctgttttgtacacacagaaaaatgttatgtatcccaacaacttattattatgtcactattactagataaatatgtgactaagtcattacttgatatcagagtgaaaacaaagaataattaaagagtagtatattggtagctgagatagtacaaattaggttaaaaggattgaagttaagaacatgatatatagattgagtatcaaattaatgttaaattgtgtaagagtagcagttgacatggtttgttctagggttgttgaagaatatataataataggatgaatttgggtaacaaaaaaggtatagtgtttaaccttttaaggtttgaatatatatttttttttaaaaaaaaaaaacacctacaaagacaaagccaaagccaaaaccaaagttaggaacttggaccagaaactttgcttagcagaaaatgaaaatgacatttggtataaagtcacaatctttgatagacacataaagccctctataccatgaaatgacttaatttgactactacttatattatcttttacattattattattattattattattattattattattattattattattattattattattattattattattattattattatttaataagccttttaattaatttactgaccaaaaacagaaaaaattacttgcaagacaagttactcattcgccacctagttagctagatcctcctctcttcctctctctcacataatacatgcaaatatttatttgaaaacgacattgtttcatacttatgattccttattattgttgttgagtaattatgtgaagaaattgtttcaaaaataatagtatgtcccaacttttaacgtaccactaaattaaattatttgcaaatgttttctttttctttttaagatatcattaatgtcatatgactaattattcaactttgttacagataagaatcaattagcctcaaa

SEQ ID NO: 184811 - DNA, 4279 bp, Cannabis indica
tattattattattattatgggttgtgtttgtatgaagctaaagaagtttagatataatgaccctaaagttcttgcttctcatacttattctaagccatttagatatgaagaagaaaatcatgaagttcttgcttctcaaacttattgtaagattttattttcattaattttcttttaatttttcttgggttaattagttcttaattacttttttttttttgcagttactataaatgaagttgaatttgtacatgagcttttcaagaaattaagtagttctataattgatgatggtttaataaacaaagtaagttttagtaaaatttacatcaaaattaaataaataaatatatatatatataatgtattaatttattcactaaatttatttgagtttttctttaggaagaatttcaacttggtttatttgggaatagcaaaaaacaaagtctttttacagacagagtgagtagtagttactagttaccatttatgcttaatctaatctcttcaaaagcttagcatattacttatttgttcttgttcatatcttaacagatatttcaaatgtttgataccaaacaagatggggtaatagattttggtgaattcgttcgatttctaagtatcttccatccaaaaacacctcaagctgaaaaagtttcatgtatgtaattttttttttcagtaaattagttacttgaattacaaaacatgtaaccattaaccaaataagtctttgtgttaaatttttggtaataggtgcttttcaacaatatgatttatggaatactggcttcattgaacatgaagaggtaagtaaaaaattgcccttttaaagactttaaatctaaatgattttaactctttttttttaaaaaaaaaatgatgaaaaaggttaaggagatgatcatggcacttctgaaagaatcagatttgattctccctgatgagataattgaatcaattgtcaaaaaggtgagaactttagtcaccaacaagaattttcaattgatcttaatcatgttattatgtagttaattagttcattactaatcttttttggttttgtaattttgtatagacttttgaagaagctgattttaaaagagatgggaaaattgacatggaagaatggaaggaattagtggctaaaaatccatccttattgaaaaacatgacaattccatatttgaagtaataacatcttcatattattattatgcaaagtgtaaatttctttggctagaattgttcttctctttactaatgagattttgtattcatttgttattgtagggacattacaactatgttcccaagttttgtgctaaaaccagatatagaagacaacaacaataacttctgaaatttcgaagttatttcgaagactagatttagaatttcgaaagcttcttatcgagctcttcaatggcgtatctcgtgataaagttaaacttcattaaatttgtcaaactaaccatttcaaatattaaaatttgtaaaataacctcatttaattactctatgaccatgatgatcacataatgtaaatctatggttgtttaaaaatttttgtaaaattattttaccaataaaaattttcataaaggttatttttacaaaacactcgaagattacagccaattggtggcaccaaagaagaagcaaattcctaaaaattccaacacatgaaaattgttgcaataagggcaatttatcatagtggaattgttctcctcaccttgagttgttgcctaacaatagaagctaagaacttgttggaaagtccatgattcatagatggtttgaacatttagacacattaggaagatagtaatgtatgtaataattgataccaattgagatgtaaatgatggaaatttctcatatgtatctgtatttatgtaaaggaaaatcctttgaccttgttcaacatcacaaaagtaggctacactgaatttttatacaacatggttttacattctaagattccttgtgaatataatttggaaaagaaagctcggtaaaaactgaaaaaccaatgcaatgattttagcagccacttggaaaagaattccaatcttctgaaacctcttctgcattataccatatcctgtagattcatgggatagcatgtttttgagtaccggccgttccaaacattgtcggcgatgatggcgttcactgcatcggtaggatgaaactgatcccaccatatgtagttagaagcatcagtacaagccatttctggtgaaagacacataatccaacctttgtacttgcctaaaccacaacaagcctcagtagtcacattgaaacctgaagaaaccaaaggaaaaaaacctcaatatccagcattagatgcaaacactaacacaatttaggctgtaatactcaccataacttgcagggttctttagtatatccatggcaccttcaagcacatcacagaagattagattggaatttcgaagcttcttaccgagctcttcaatggtgtatctcatgacaaagttaaactccattatcatgtcgtttatctcttctatacattccccatttcggctaccgaattgccacaagtagtgaggactacagcctattggtggcaaccccattataaccatctttctagcttttaagttgtacaagttctgcaccaaaaaaagaagcaaatttttaaaaattccaacacataataagggcaattaacatagtggaattgttctcctcaccttgagttgttgcctaactatagaagctaagaacttgttgaaagtccatggttgatagatggtttgaacattagacacattacgaagatagtaatgtatgtagtcattgataccaatcgaaatgtaaaagattgagtttgagattaaatcagctgcagcctgttctcccatacttaacacaaatttctcatatgtatctgtgaactgttgaatttgttgtgtaaaggaaatcctttgaccctgttcaacatcacaaaagtaggtactgaataatgttttctagattctagggttctttgatactaaaattgaaagaaaacacataccaattctgatccacttgtgaatatgattccagctccagcagaagcataattcactccatgaagcatatcaccaacacttccagattgcccaagaaagcttggtacgaatggaagtcccagatgagcagctaaacatggaattcaagaacaaaacaatcaatgaaacatttcatcaaacactttcaaaacaccagcttttgatataaatcaaaatcccaaactttaatataaaagcatttctcttcaagaaaatcacactgctttgaatttagggaaagtgacccaattcaactaaaaacataaacgaagagaaaatttcaatcttttccaattttttctcagtaaccaaacagaaaagaatcaagaaaactcggttttaattcaaaatcaaagaaatatttcatcaaacacattctaaaatcaaaatcccaaacttttatacaaagaaagtctcattcaagaaagtgtttcccttgaagaaaatcacataatcctctgagaaaaacccaattcgactaaaaacatcaccaaagataaaaatcaaatctttacaactattttctcactaaccaaacagaaaagaacaaagaaaaccctcaactcaccaagataatcaacggggattcttccattggagaaacggccggttgggcggtgagtatcgaaatctcggccgtagggaaggcgatcagctctagcaagagtgccgaggaagttattggtgcctgaatcgacagaggaatcgcctatgacgaacattgcagggaccaatggaggaggatgaggaaattgggggatggtaatgccggtagttggatacacagaaattgaagacggtaaagttgtggggttaatggaagtaatgagttcttgagggtattgtaaagcttttgttagtgcaaaaatggaggagatgaagatcaagatcagaggaggaagaacagtattagcttccatttttggttttggaagaaagaaaatgaaaatcagttttggcgggaaatatgacagttaatgccgttgtgacttgggctttttttaaagacagcccaaatccaagcccagcccagcccagcccactcattcaaaaatacaatgatttttataaaaatactgaatgttggataaaagtttacaattttactcacatagaatttgttacaaaaatacagtcttttttataaaacaatcctaaaacaacaaaatagaataatt

SEQ ID NO: 184812 - DNA, 4692 bp, Cannabis indica
gatattaaattatactaattaaatggtacataatgatgtttaggataaaaaaaattaatgtggaaaactatatgaaaatataagaggtataattaaaaatatatatataatttttttaatttattacatgctatattgtattcagattcttgttaattaataaagtttgcatatacaatttactaaaattatatataaaaaagataagaataattccattactttgattcttgtagactaaccaaagtatttttcttcattccttcattcatggcaaacatagtgcaaatagtttcatttgattcctcagccaagtcacaacttcacttctacattatatgctcttttcttttcaatctctcttcaaaattttcaattttccaacctaaaaagaaaaaataaagtttgaaaaagaaaaaaaagtctttttgtgttgatccaaagacattttcgttagacacacacgattgtaattataaatatgttaaaattaaattaaattagctaaaattaaacacgattttttatataaacaagtaaaataaatcgagttagattatatcaaatccgtttataaatatactatttttaacataactaataaataagtcgaatttgcattttatatttacttataatacttaaaccacaacccaagaaaaacacaaattatttagtaagtgattttctccaacaataaagtggctttggattccagctcaaatactacattttaataaataataatcatcaaaatgataatgaaatctctttatattattattattattattattatgaatgattcttaatcataaaaatagactaaagagaccaattgtccccactcaacagctggtttccagtacatatctattaaaaaccacaacttactccatttaacctaagataatatcactttgattgcggggcctttattattatttttatttttttattcaaaaattaaaaaaaaataataattttttattatttttccagctaaactttgatagcaacttaaaatggtgtcattttcactaatactattttccccaaaaacaaaaaaaataaataaatagatttcccaacttaaagtttctacctttattatcaaagatcaaatctttcttatgaaaaaggtctaaagatgaacactatgaactataagaacaaacacaataattaatgaaatctctcaatgaatcagttgatcatgatcatagtattaaaaatagtaagttcatacacaaaaaagaaaagtttacattggtaaagttcttttctttgtttgagtctttacagaaattggacatttttgctggacccctttttgttgttgttgttgttgttgaagcaaattagtaaattctctaaggtttttttttaatgaggattttcttgaaaagaatccaccaaagaattgagaataataataataataaaaaccaataatggatggaacctagctcaagtgattctttcttcttcttcttcttcttcttcttcttcttcttcttctcactcaaactggggacttagctctgttatatacacagagagggcctttctctcctgtggctttggctttgggaggcctcaaatgagaaaatccaagagagagagagagaagttaatccaaaataatcttaatctatttttttttttatattactatagctcaattttcatttgagcttgagtcaatgagcctgcaaaaacaaaaatgtaaagattagacaaatttgaagaaaattaataaagttgagttttttatttcttgggtgtatatgtattttatttttataccttgaagactgtgctgttcaatctgaccaaaacccatttgaaccacactttgaagatcatcctcaaaaaaagtagaagtctgacagaattaaacaaggaaaaaaaaaaaattcaatttttaagattattatgtaaaggagaactcatttaatgaatgacccttaaaaaaaaaacactcacctgtggttgttgttgttgggcatgttcagcaaatccagaaggtatttgcatgtttgttgaagctctatgaattgaaccatttaaagggtttattgagaattgagcctctaaagaagaagattgtggtggcattatttgttggtgattatatccaaatgggaatgctgttgttgatgaatctaatggataaaggccatgtggcaatgacccacgagactgaaaaatctgaaatcatcatatatatatatataaatcaagttaatattacaggtcaaaaatcccaatgggttgaaaaaggagtgtttataaagtttaattacctcttttgatagaagagcttccatgttgaaatccatccttggattaacagttgctaatttcattgaaagaaactgaaaccaaaccaaaacacaaatttagtaaagaaaatactaatcaaattcaactttttagaagcttaatatatattaattacctcaacttgtcgttgtaatgattgaacataatttataatctcatctagcataactgctttaccagttacctgcaaattcagaaaccattttcttaatatagtaaattaataattcaatcatttaaatctctgaaaaaaaatgcaatctttttaagtaccttgttgcaaccaggaaccagatcctgaagaaacttcatcctttcactgattttctctcgtctaacctgtaataatcaaaatcaaagacatgtcaatggaaattgagcttgattaatcttgtataaaaatgagttaataataattaattaacaaggaaatcttactctttcagcaagactatggctatcagtagcttgtcctcttcttgctctaacatggatataatcctttggtggctctggtggttttgaattattattattatcttttgtttgtttctgattcaaatcttttgaccctttaacaactccttcattatcattattattatcttttttacttcttttcacattatgttgttcatcattctcaattgcttcaacaacctataaatataaaatcaaatcaaattgtcaatataacaaaattcacaaaatgggaaaagagtaacaattacaaataaaccaaaatttaccttagaatctttaacttggatttctttggattttcctcttgaaatggctttccttttcttattaccattattattattgggctcaataatctcagtagctttcccagttgggatctgatcagaaacagaagatccttcccttgaatcgccattttcaggggttgaagaccttgaagatccttgatgaggttgattggttaaaggtgaagcctttgaaggtggtttaatgggatcaattctagggactgatctaaaaggcaattcaccaaaattattactattatttccaaagcaagagaatttagcagctctagctgcaaaaccagggtcaccagaaaagggagctaaacttggtggattagggatatggaaattaggtctgattggattgggatctactgatgatgataaattgagctttggtggtgaattcaatggagtagcataacatgaattgttcctactgttgttattactacacatataagattgaggagaaatctcaccagagttacagatattacccaatctaccgatcaattctctgatcataattccatcaccacctccattaaggttagggtttgaaggagcaacaggtgaagaaacaattgaacttaaagctgattcaaatgggtcgttctgatccaatgattgttgctcccaatttggtttgaaaagacaatcagaaaccgaaatctgctctgatgatgatgaattcagctcgttgttgttgttgttgttgttgttcgattgaatttccatacagtacttgaatgattccatagcttgaaaaaaattataaatttctctatatcatcgaaattaaaaggaacccaaatgagaaaaacacactcaaatgaactaattcgagggaaatgaaaaaattgagagacccagaaaattttctcgggaaaattgaaaaaagaaaaagactggttttttttgagtgtagtgaaaggagatagtactaatgacgattgattatgatgatgatagtgaaatggtgcttgagtttcactcaaaagaagaagaagaagcaagaaaatgcagagtagagagagagagagaaagtagagaaagaaagtaaagtagagagaaagtgagataaaagataaagaaaagaaaatgtctgtttgacctttatataatatgttttttttaataaaaaaaataattaattaattaataaataaagataagaatatttaataaagcaatttgtgcaataaatattttaatttaacttctgattatagataaatattttattttttgacgactataataattaaaggggaattactctatatattatttttttaactttttttttaaatttacggtttgggtttctaaagtagttgcagcaccagttacaataggaatttctgtacgattttctgttgcaatttaggttgcagcgctagttgcaataggggtttctgtacaattttctgttacaatttaggttgcagcgctagttgcaataggggtttctatgtaaaatttcgtaaaaatataaaaaaaaactgttttaaagtgtaaaaataaaaatatcccataattaaattatatttttataattttcgta

SEQ ID NO: 184813 - DNA, 7176 bp, Cannabis indica
gtatacattggtcaactcaccctaatcatgtgcaaagcctcacgaggcctaaccattgaatttccttgaccagaactagctccagaatgcatatttacagggcttggcatcccggacatactggaagaaagcatgctcccagaattcaacaaagatggtgaagccattccctgataccctggcctagaaattggcatgcttctattcatcccacacattatgcccatagcatttccaccagatagcatacgaactccgcgatcgcttccagaaagagcaccaggcacaggcaagctggactgctgaatatttcgaccagctattgcattattatattgttgtaatctttgctgctcttcaacaggtaaagatgaagctcttggagaattgctgtaccgaccatccctgaaaacattttaagagacaaaaaagagtttaaaaaaatcaaaagaaagttcgaatatctatgtaatgtcaagctacaagatatcatattacctgacagtagaattaagtgcaacagatggtgatgacaagttagaaccaagaactacaccggaagatccttgtaggggtgaatttacaccagaagagggaagcaatgaagcaacagcaccctggtttggtattgctaaaccactagaatgagaactttgacatccaagagggagaacatcctggtttgatgaagttgtatcacatagatcaaggggccttcaagagagtgagaacaaaataatattataagcattccgcaacatgagaaattaaatatgagtcatcaatagaagtaccaagacatgtcagaattttgaaatcaaagagaagaaaggaattagtaatgataccattaacatgcaacaaggaaaagcaacttacgttaaaacacctccactaaggttatttgggcagattggggcaagagccattacatgagaattgtggactggtgctatttgtttcaaatcctggttttcattcttcacaaaatcataatataacatgtcaatgttgcagcctgtgtctaaaacttaaagaagttgaaaaattcaaatattcgagtactaaaacattttttaaatgtcttggggtaaaagaggtcccaggtttgaagctttgcctcgtttaataaaaccaagtgtgctaccagatcaaaaatcaagttcatttttttaagtcaaaaattaattccattttaatggttggacagacagcaaataaattcggctgtatgaaagaacgattaatattacaacctgagccttgcggtaatgcagcttctgaccaatcttaatgattttgtcaaaatgagacttgagggtctcgtcctccattggctctttcaaacgttgaaataactgcctggcactgccctgcttcaacaacaacagccaattaagaaatgataataatgattttcccagtgattatggtctgactcgtaaattttaagtcttgccttgggaatgcctggtaatgtcgatggataaggttgagatgaccctgaatcttcagcactgtcagctccatcacaagaccccttgtccattaatattttgtgacgctctttgcattcattaggcttgcgaaagatacactgtgtagcttggacatgttacaaccagtaatacaaataaaaagagaacgaggggcagggaatgtagataacagaaacttacaaagtaaagtttacaataaccaagaggaaaaaatcaacaaaaaattgcaacgtcgccaaaaaataaagaaacgaaagacaagtaggtcattctcaccttaaaatgcaatgtactgttgatagcatcacttatgagctcccaattagggcccatgtcatgtacgagaacaacaagtgcctacaacaataattttactaagacacaattcgaccaaaggaaaggtttatatatataacaaaagaaagatccgtactaacctggtcttcaaatagtgaccaaggacttccagaaccaggctgcatgacagacatctgcaggaggttcaaatgctcaagtacatgataaaccaacaatacaataagctaaaaaaaatataaggtaaatattcatttggtacttgttatttgatacctgtaatttaaaatcatacatattggataccattaactcaaatttaatcagtaaaatttcattaatatgactaaactgccatcagctacgtgggttttaaattcaaatttaactacttaaactgagggatggttagacatgttaataaaatttgttgaccaagtttaagtccaaggtaggtaccaaatatgtacgattttaaattacatgataccaaaaatgaatgagagcaatattgaaaacataaggtaccaagtatgtatttctataaaacataggatatcaaatgggtaagcacccaataataatatcaccagaacaaataaaatttcctaagatactgcccataacacgacacccttaagtaccttcagaaatttggcttttcggcccctgtcccgaccagtgccaccaatcaatttaataattttagtcgcgttagatatattattttgagatgccactggagaaggaatggaaccacccattgtagtgatattgtcaaaagtattctctattggttgtttcagtatctttggcttcttggcattgtgttgggcatataaatctagaaaagaaaatgtttacacataaaggatacagaaaataaaatgttttacaaatgactaaaagaaataccagcttgagaaagactttaccacttgtgccattagattcaaaatcgattacttcccatcctttttttggaaggatccctctgcacattaaatggttccattaaaaatctaattaatgctatagaaagtttgcaatgtgaaacatgtaaccgacaaagaagtaaggttagtgagatcataacagcatttgagctacattatcattttatatatatgtacatcctactactgcaagaccaaagctaattgaacaaattaaacaagcaatgtaagaagatactctaagcaatatttttgattacatgttcaggcatggtagattccagcggccatccctggtcatatgcggacacctgcaaatcagaaggcaagtgacttgacaagtgataaaggctgcaaaacaaacagaaaatgactgaatgttgaaatatgtaccaaatgctttgccttcttcttcttcttgggtttaattgaagtttccgcacagtcatacggtaacatcttatcaaaattgccagaagactcaacttccatacttttctggaactgggacccacctagcaaactattctggtcttcctgaaaagaatttgtatctccactagaagcatctgtcttcatctgaacctgaacatttgcagcaggtgtagcaccaaaaggactaataaccctctgcctagtagcagtgcgcatacgttttgttggaattgaacccacattgagattagcaggcctctttcccatcaacatggactgctgagttgcagagttgctctgaccataagtaaaatcagctcctggttcatatgacctcgtgtataaaacaacatttttctttttcttctgaggaggttttgatgacttgataccatcaccagctccaggcaaataatatgtgcttgtttctccttcatcctcagcatatgcattctcttgaaaaccatagtctgcaaattaaaatttcgaatactaataagtcccacaatagattcaaggcacatcaaggcagcttgtagaatatcagctatacctgatacagcatcgtacatagaggtctccacctcttcttgcatgctacttccagttttctgaaattttcaatttgctaattcagctattttataaccaaatacatttaatcaagaaacaaaataaatacttaagcaatggtttcaatagagatatacacacacgcgcgctaataataataataataataataataataataataataataataataataatttaaaaatgtatacttatattcctatcatgtagacacaagaatttcacataatctgagattccatagaaactcccattccatgggtttctcttttcttttctcaaatgaagatgcctactagtccttactgccaaactatgatcgcctttgcatgccagagagaagagcaaaaggaaaaccatacagaggagctgacatttacctcaaactgtacaagatgagcttcaatagattttctgtaaatttccattgcgccagaaggaactgtatagaacaaattctcctgcaaagccaacatttgatgcagcaacttatcaagagaaagctaaaataacaggcttgcaataacaattgatcactctggaaaattcactaaaagggaaacagaaaagaattagttatacttctgtaagatgatcctcccagcacatatcctgaatgcccaaatcagatacccgatcaggtgttgctggtgcttctgctttttgtgtgagaccacaagaactgctatatttcaagaatctcactgcgtaaccctgcaaagcaagcgaaacatcctttctggaacattgattttccaattttttaaattcctcctgcagaagaccagaaaatgtatcaacaaatataatagcatatgaaggtatgaaaaaatatacaatacatcatcgactgcttctgtccagctcatgcatactacagatataagtgacatttatcaaacataagacatagacacaagtaatgttttaagatatcttatctgaatgagaatagcaaattcagaaaaactcagaaatattttttttcgaaatgtaactttaaaagggacacaggtttatctaacagcttaccgtctacccaagatatcctactttggagcaaataaggtgctacctaaactcaaatgtcaacaaaggcaagaatacaagttttgaaatacataaaatgcaaatctcatttcataaaaatgttaatttatctgaatatttcacagtattttataaatgttgatattttatgagaaccgtataaaaagaacgaacataacaaaaccaatattttataaatttccatcaacaaattaacagaaaaattaaactaaaaaaattcaagcaacatacctctacaatgtcagtttcttcattcttctctttagaaacatctttcactactttatactcgcatttatctgaaaaaacactggtgtcaccactttttataattgcctcagctgaatgccaaaattgcatgacagtctttgccaaggcatgagcaacttcttttagcctccaacgttgctgttgttctttaactctcaactgagaagcaaaagcagctcggtgacatacttgtgcagctgtctctatcttccaaatgcgctcctataggcaaggataataaaagagaaacctcttacacaaggatgaataaagttgacaaatatatgacattcgagatacccaaaaagaaccaagcacatgacacatctaaaaatcatacctgcgcaaaatcattggccaaccatgccatttcctcaaggacaaaatcccaatgagctttccgacgattctccgagggcatagaacgaacagataattcagcaatcctcttacgcttggcctacatatcacatcatgtcatcaatttacagcttagcaattaagaaactaaaaagttactgccaaaaagacacttctatatcaaagtacaacaggatccagaacctctataattcgagcctcttccaaaatagaatcttcatgtgccttgtccggaactttcaagctgttaacaggagttgtttgaggaccaattgctacactagaatccatctccgataaggcagtaccaggctgttcatgcatagagaaaactaaggggacctcgcaaattactgtagagttctccttttggatgccagatttatcatctaatgattcactcacttttccatcagcttctggtaacgtagtgtcgctgtttttaacatcatccgtagctgaaaccttaacttcatttggaaattcagataaattttcttggctgtctttatcaatattgactgcagcactatcagattctttttcacaaatagaagagtggtcatcattgattacatcatcattcactgtttccatctcatttttatccattactatttcagcatcatccgggttggctgtcccatcaacaactgatgcattccccattgatttcccattaacatcagtattggtacacataacactatctttatgtacatctaatcctacgctatcttgggtccaagaagactgagaatctaaaccttccattcctactcctgcattgctattttgaacttcagttgatatattgttgttctctctcgttaagtcactaaatccattcggctgaatagttgtagtttcctgttcagtatttattgtaggtacagaaggtggacattccaaacttgctgaaacccgctgttccctttctccaatatcagattccatagaaacaatttcggctggaatttgatgagcagtggctcgagaaggttgattgtgttggatgtcaagtgaaattttgggaagtgtgacatcagatttaatttcttgcaaactagctttagccagtccagtttttacctctggggcccgctcaccatccaattctgtatccaattttttactggaaacaacagctttaggaataatatcgccatttgaacttgcagatttaaggctagaaatagatggcgtactctgctcctttctattatttgtttcaccaatcttgctcttggcatctcttaagcctccacgaacaggtaaaacagatccttgaccactccgattctgaaccatatcaactgcacttgatcgagcaccatcacgattcgatctagacctattcctacgagcataaggacgaacaattgctgaatcttctgattccttggcattttgagtcccatcaatttgagatgattgttctgatggggcaatattattcctccgactaggacgtaaagaattcctttccttttcaggcaaaccatggtcaccatcaaagagtaaaagattatcagcggtgttaggttcactaactgtaggaacccctggcctaccactactatctacagaatctccatgtggtgacgcagtcaacgcaaaactaccttttgcttcactgataaccaaaaaaa

SEQ ID NO: 184814 - DNA, 6677 bp, Cannabis indica
ttttttttccttacagaaaagtttctgtatttgtcagtatatggcgattttttagttatatatatatatatatgctaaattaataagaaaacagtagtaatgggaataggagttgaataatgtttaatggaagtttaagaaaattattgtgcataggaatggcctttcctcatttttttttgaggaatagcaattccaccaaaatggtggatttgaatggcattctaatgcttttatattttaaccaaacaaagatttggaactaaagtggatttcttctcattctttcctttttctccaacctaacttaccctaaatggtattgctgccatcacaagagaattaatttggaatgcatttcttgatccttcatctgctaattgtttgccgaacttttaatcaaccctaaaaccttctccatttaggagagtgacctcttgaattttagcttctattttttgtgcccagtggttatcgataattttagcattttgtatgttaacaattatctattagttcttattcctttttttaacaaatgtgagaccatgtattggtggattattttctgatatatgaaattgttgtatatattttttcatgcttgaagctacataatttgtccttcactttgtttctcagtggtccttcatatggttatcgaggaaaagttgtccttgtgtttgagggaaatgggtcctcgaaaattggggttagatttgacaaatcaatcccagaaggcaatgatcttggtggcctttgtgaggaggatcatggctttttctgttatggtgatttcttggcacaattattttttccttagcttacactttgatgtgggtttacttgcctgttgttagtgtgattttagtttagacttattttatatatttactttgcagccaatcatttagctcgttcggatagttctgcaggcgatgatgttgacaagcttgctatcagtgaactatttgaggtatattttgttagtttttcaaaatttctgttgtttttagttgtatttgttaagatgaaaggtgtatcatctacaggttgcatcaaatgagagtaaaaacactcccttaattttgtttgtcaaagacattgaaaaggctatggtgggcaactcagatgcctatgcaattttaaagaataagcttgaaaatttgccagagaacgttgttgtcattggctctcatacccagttggacaatcgtaaggaaaaggtatgtgttaagagtgtcactatgttagcttgtttataatagcattggaagcctattgatatatcgttgagtgtttgacatagcttgttgatctttccagtcacatcccggtggtcttttatttacgaaatttggaagtaatcagactgctttgcttgatcttgcattcccggtatgcaatccatttagcaagtttctattgtatattttgctcacattttgtcaagaatttattattaattttctcctgacttgttggtagtaatactgacagttttttgtgatgcatagcttagtttttttccagaaatgtttgacttattactaaaaatgtaaataatatcctagttggactgtgctatgctaatttgattttcctggttgatttgtagcttatggattattattgtatattttagtttattttttgaaaaaaattgacatgtgttttactgccttatgtccaggacaattttggtaggctgcatgataggagcaaagaaactcccaaaacaacaaaacaactcactcgacttttcccgaacaaagtggcaatacagctgccccaggtatggataatcatctacgtaccagtataaacataactaaccatggtgatgaattatatttttatggactcgaatggagttgttttacaaatgtggtactcgcaggatgaagaagtcctttcagactggaagcagcagttggaacgcgatgttgaaactttgaaagcacagtcaaacattgtcagcattcgatcagtgagtatattgtgtcagactaatgaaaatattgtataattttgtttagttgcacatgcttttttaagtaaaaaagctattaaaaaatagggaatgcgtcaagactattctcatgtcaccattatgtcatttggaatggctcctttattttatcaaggagaataggtcaagttcaagtataagtatatatagcgcagcaaaatggatattagactttagtgtgcatttagtcggtacctgtactttggagcagggggaacttgtatatagtgcagcaaaatggattagattttagtgtacatcaagtcagtacctgtgactttagagcagggtggattattaagggttttttattgatcaagttataatacaggccgatgtatttattcatcacgaggttaaggtttttttcttttctttttggttgccttttctattaaaaaaatataagatttctaatttatctaccttattaagtcgaatattatttacgttggagttgggatattattgtggagccaaaagtgtcgcactgttaccgctatacaaggatgtttacaaaacaccaatcctccaaattcttattcaatttactatgttgatgatatgttttagtatatagtagaatctatcctacaaaccctaagctgtggaatatttactcaatagcattgtgtttcttgctgctgtgttatgggtctttatgaactactggtgctttgcaggttcttgatcgggttggcttggattgccccgacattgagactctttgcatcaaagatcaagcccttacagttgaaagtttgtattcttgaatccattctggtactgctactttttatgccagttttcatttatgttatttccccttatgctatttttaggtgtggagaaagttataggttgggctttgagttatcacttcatgcattgttccgaagcttcagtcaaagatgagaaacttgtaatatcgactgaaaggttgtcatttttttttctttgtaattatcctattttatgatatttattgattcattttgaatattgaagtttagatacatctctatattcttcatgctaacctccgtatttggtttaatactgcagtattacaaatgggttgagtattcttcagggaattcaaagcgaaagcaagtgtgttaaaaaatcactgaaggtaagcaatattattgttttgtgtacttccaagacctctcgggggcagaatgttcttcctccatggactctttcacaatcctccggcccccatgctatttctgttttggttgttttgttattattattattatgcctttttggattgtgatctttcaaatgttttcaggatgtggtcacagagaatgaatttgagaagaaactattggccgatgttattccaccaagcgacatcggtgtgacttttgacgacatcggggcattggaaaatgtaaaggacacattgaaggaattggtgatgctgcctcttcaaaggcctgaattatttggcaaaggacagttaactaaggtaggtggcctgtttcctacaatttcgttttctaaattatattttgatgtgcactcaggtgttttcctccttgaattgtggttggcaaatatttttctggtgattatcttattgcattatgtttatttgatatgccttgtcatgccacagccttgtaaaggaatattgctttttggcccccctggtactggaaaaacaatgcttgcgaaggctgttgcaactgaagctggtgccaactttatcaacatatcaatgtccagtatcacctcgaaggtaattaacgaatatcagaagtttttctttttcttgtgcaagcatgtacttggaagttgtatgacaagttttatttatggttgcagtggtttggtgaaggagagaaatatgtaaaggctgtgttctctttagctagtaaaattgcacctagtgtgatatttgttgatgaggtcagttaaatgcatctgtgtcactttattctctcattgctctcattttagttttctttaggattctacttgcctaatcatgtcgctgcccataaaataatggatggttattattgtaggttgatagcatgttagggagacgtgaaaacccaggagaacatgaagctatgcgcaaaatgaaaaatgagtttatggtgaagttgggatggtcttcgtacaaaggataaagaacgtgtactggtacttgccgctaccaataggccttttgaccttgacgaggccgttattaggaggcttcctaggaggtaaaaagatcctttctttttcttttcatttgattttttggccaattttatttaagcattaattgataagttcatacttatttgtttgcaggttgatggtaggtttgccagatgctcccaacagagaaaagattattaaagttatattagcaaaagaagaattagcaccagatgttgatttggaagcagttgctaatatgactgatggatattctggaagtgatcttaaggtttcctattgattttacctaatattatctactatttcattttccgtttgttttgttagagaataagaattcattcatttaatcgtgtatttaattgcagaatctatgcgtgacagcagctcatcgccccattcgagaaatattggaaaaagagaagaaggttagttgtacttacaattttacactgtttgcatgaactatggaagttgaattgaggagtatagcttacattggttgtctgtgtaacttgttatctcgattgtggaatttggattctgtgcatatggtgatttttgtctttgttacttaattcaggagagagcttcagctgtgtcggagagcagacctccacctgcattatattgtagctccgatgttcgatcactgaagatggatgatttcaaatgtgctcatgaacaggtaagacagtgttgtatattgctaatagtgagatgattgtttgtgaacttatctgctgcaacagcaccctcgttgggttgcgtcaggtgttctattgcattaactttttgttgatttgaatgcaaaggtgtgcgcaagtgtctcatcagagtcgacaaacatgagtgagcttctccaatggaatgacctttacggagagggcgggtcgagaaagaagaaatctctaagctatttcatgtagaggaagaagaagagttggttttttcatgtataggggtgcggcagtgttattcttggttctttgtcatggtagaagcgtggcagagttggtggtgtttggggcctattatcaatggaaatgccaattgtaggtccttttgtataatatacagggctctcttcttgtttaatattttttccgcccgaaatttatttattttctaaaagttaatgttagaaattttacagatgttaaaatcaaaagtcgtttaatcttttttttttttccaaaggagaagacttggtcctgggcctttttgcctgtacatatacccaaattaatctattaatgaataagaatattatttcttttttggtcttcgtgtattgtatttttctttaaccctacctatggtagagggaacagatagatgtaaagtaaaatttgcagtgaaaattctgagttaaagaaaaaaataaagagatttaaactaggctaattaggaggttgttttttttcttctatcataccttttggccttttttgggcatgagtgcggtgtgatttggtcggagttgtatttatttttattgatattgtgtggttggtttttctttgttctttgatggctcgttatcaagttactattagtggttgagaataataagttctctatgactgaaaaggttgttagaagtgtagttacttatcttgcataataattgagtgactgaaaaggttgttagaagtgtagttacttatcttgcataataattgagtgttcaagctatgaggttgaatgaacttgttgtaacaaattttactgttgtgtcttctgagatgtaagtgaaactgaaaaaatgtgttcttaaggttaattgtgatgctgcaatcttttttatattattttatttttagtgtttttatcaaacaatttgaaaattagacgaccgattatttgacttgtttttctaattctttaccaagtccatgtagctgagacattcaataaaaaagttaaattttgatattttatatttttacgttggagacctagtgcttacggtaaaaagactagtttaactatgagaataaaaggcaaatttgagacacaataggaaggacttatgttgtcattatggtcttcttaagagaggcatataaactcttagattcagaaggccgatgcatttacctacgtgtcaacgagaagttcatcaaaaagttttccacttaaacaaaagggtctttacctatggtgtaaattgcgcacttaaaagaaagaaagtgtgcaatgagctacgcaattcttgatctcgttcctggtacgtaaccaatttagtttataactaagcccagtcacacaaaaaaaaaaaaaaaattatctcctcacaaaaaaaaaaaaaaaacccacaatgaactacgtaaggcttgtatctcattcttggtacgtaggcaatctagtttataactaggtccaagcacacacaaaaaaattatctcctaaaaaaattagtaaagaactacgaatgacttgatccctt

SEQ ID NO: 184815 - DNA, 4104 bp, Cannabis indica
attacagtttctttttaaacaggtccaaaaaaaaattataatgaaggttgtcaagggtaagggggcaccaaaaagttcaagggatgctttgaaacctgtggatgacaggttagttcaattgtttcatttatttattttttctttgcttgttttaatttggttagtttagattattttacttattacgcaaccatgtaaaagagactaagagtatatcttttgtagctctgtatttatggatatgttcatggctactgttgagagggctggcttaattatatctgatgttgtagaaaaccctggaatattgttgtgaccgatcaaatatatctttttctttttcagagtagttgggaagagaaaggctactgctgtccaagctgacaagagcagcaaacgaaaggcaaagatggaaaagaaagccaagaaggaccccaacaaacccaagaggccacctagtgccttctttgttttcctgtttgaccatctatctctctctaatatgtttctttgaaaagtattgaattttgctaacttttattgatttatttgaccatgaaacttattgtggtgatatagtgaggaattcaggaaagagttcaagagagataacccgaatgtgaaggctgtatcagctgtaagtatatggctgttgcttgttcttctgaaaagaaaaatattttgatttatggaaaattgatactcatccctgtacatgtttacctgaaggttggaaaagctggtggagagagatggaaatcattgactccggctgtaagtgttctgagttttgttgtttcccactttcaatttaagcactttaagcttttgtaatagtaatacaaatgcttgaacagctgcagttgcttactttcttattattgatcctttttgtgattgttctttacaggataaagctccttatgaagctaaggctgccaaaaggaaggtcgattatgaaaagcaaatgaagacctacaataagaaacaggttcgtctgttcattctaattactggtttttatttaaggttcaactttcatttttggaattattattaatcttgactctgcttgtttgataacaggagggtatggcagacgatggcgatgaggagtcggacaggtcaaagtctgaagtccatgatgaagatgaggcaagtggagaggtgatactaattatatatgctgcaatttatgcatttatgacttaacatgaattggctttaagcatatagttgatttttgagtttactccatggttaaccaggaagcacctccagaggaggaagaagatgaagatgaagacgaggaggaggaggacgacgatgaatgaaatcatacacgttttgagtatggatggttaatattccaagaacaagatgctatcttttatatgtccatatattttggttcttagcttgccttatggtaaccttttgaagcaaagaacatgtggttttactgccttgattatccttactttagtgtgtgtataaacaaaggcagctttctttgctagtttatatatttacatggtaaattagctaatctaaaaagtaaagaaatatctctgcatatgtatgctcaaagatttcattacattttttttttacctaataattactatgtttataggcacttgattcttttacttttttttttcaccgtaatgattcttactcatacctaggctatctctaatgtgtgggacctgtgggtgtgcaacttcttattacacctattttttccaatagacaattattaaatggctgtaaacatgatctaattaatgtaattattaacatcttcgattgaattttgggaaaaagcttggaaaggaaaacaaacgttgtgtaaatttttttgaactgttgaaatattttttaagcagaattgaatgattaattgcaaatgatattagagagaatataatgcttctgacgagcaccacaaaacccttactagttactacagtaactcttgtactgttttcttttcattacttattccaatgtctaaaaaggtaattttattctttttagctggttttaaactcttcagaatcaataccaccttgaaaagtcatttattattatgctgtttaagttggtcttatctaaaaaacaaaataaaaaataaagttaaaagtcttatattatctggacaagactaaacagaactatctcatgggaaatcaatctagaaaagcagccgaaatgtcacaatatcatctctcatttttctattaacaaaaaaattaatcaaacaattgagctaaaaaagtaaaatattccaatgacagaatgagaaagacccagtaaaataaaaaagaaaacatatttacacctttcaaaatgtacccttttgaaagtttcaagaattatatacaatcaaccaaccaaccagatattatctacttacaaattatatcccaacacaaatcttggtagtagaatatgatgctgtgaagaaaggtttctacttctcatcgttgtggatcacaggacacaaaagctggatcaggaacaataagaggtagcttatcaatgtacttgaggagcctcatgagattttctctagagattgaagacaagtcaataatatcagtggaacttgtgtagatccaaaggtcacatgaattgacccttttgaggctgtcccggcagaagggacacgattctgagcgtgttcgaccacacatgaaactttacactatttaatcttctcttacactcaactttaagagttagctctactataaaagtatacaaataagctaaaactaaagagaaaaaaagtacagcattctatatgttgtatatctttaatgcattaatcaaccaaaacaagcatatgggacaacaaatatgggaaagttttgaccatatgtttgtttcatttattttgtccacatgcttggttggtcaatggtcactcactgtatatagagaaaagtatataaaggtgagatgttgtttagtgttttttacataccaatctcggtagcatttcatacacattgaatggctgcatttgggcaaaacgaccttgctgctcatctccatgcaaataccacattcttcttctctttcggcctcgatttcggacacctttcctttgtggaattcatcttttttcttgtacttagaggcacacatttccttctgttttctttcttctacttctgttattcccttttcaagttgcaataaagaaggaaatatgacacctgttcttgaggacagaagaaagtgttgctaataaaattaaacatactatatttgtatataaaagtaatatgtaattatgtccaaatacagattcttcatctatacttaactgtaaaactcttttagagttgctttcctttcttgaatagacattgtagtctttccattctcatatgcctgtaataaattaatgtactaatcaattattatggaatgttaaatgttaataatatataagtcccactaaagatgtaaccaaaataaactcaaataagctttatttttgaccttgtatataagaatcctaagcaaacccaaggcaccagcgaggtgacaatcagtccattgaacaagaaatagaaaaaattgagctgcagggctgtatgacagtctcatttgaaggcaggcaccatcatattctctagggtaatcagaggccctgtaaagaaaataaacataagaaagtgtgtgtaggaaatacatgacagaatactctacaatgcaacctagaacactatattgattaagcaataaagccaacatttgatcaatagtgaacatgttctgttttcctggttttgaaagtgaacatgttcaatgtataaattgtttgaaatcaatgaaagttaattaaagaaataattagatagaataaaaccacccccaaaaaataatctaatataagtacaagtgcatatatagtaataaaaaaacatattttcaagtactgactgtatgagtatgaattaaatagaaatagggttaaaaaaaaaagccaaataccccatcaaactcaattataagatacttctttttctaaagagagagagagagagagagagagagagagagagatccattataagatactac

SEQ ID NO: 184816 - DNA, 3646 bp, Cannabis indica
gtatcactagccaatcacaacacgacataccgagaaggtgctaggcaccaatcactactggtgcctaataacaatgctcataaataataatggttcctacttcaatgtttttttgcttgaagagcacgaagacaacaaccccactttaaaacactgataatgtagaatagtattagtgaagcaaatatgcttttgaaaattcctcaatgagagacaaaaatcgtgtaatatggaagtccgatttgtcccacatactcttggttctaagaatcttcttcactttgtttttttttataggttggatctagattttacctcaactactttttataaattttgcctaaagaaggtggaataaataaattatctttctctacctataattaaaccttatgtaattttatttgtataccttatccaagaattgaacacttaagtagtagtagtagtttattctctatctgactacaccaacattggaaactactcatttattacaaaggagatattttgtggttgttacaaatacaatcatgttctctctctgaataaaaagaaataatattataattaaaaactatactatcctttttgtaatataacatgcagtagaagtagatgtattgtattaagtattaacacaatctacaaaagttacacgagtagggaaaggaattgaaggttaaaatggcaaaaccgtagagacattatataagacaattttttttgagtatttttattgacaaagacaacaatggagttttgagaaggattagccacttcttatctagtgtgaaaaaagtgtatgaattcctctctttgttgacatctgtgattaagaaccttttttaaaataataagcgtggcagaagaagctttgaaactcttttaagatgggacacaactaattttagattgtgacaattctggtttttggactataatgaaaatggtgagatcttttgtggttgaggcacttttggtctctacttgctctctagaaaaagttatggttcttggtcttgggctatgttcgtttggttgaaaaaaacgaaagtagaatatgaagaaagtataatcaaaagaataaattgtcacaagaaaaggaagaataaaagtaatgaacttgaatgagtaaaggaagaaaaatgtaaggatattagaacaagaataaatttccaaaggatgtagtagaatggccacaacacactaattccaatcaaacagcaccttagatcagccaaataggtttggttgggtgaaatcaatgaaacaccattccatttctttgttacaaacttttttgattgggtaaaatgggtgaagaaagtattttttttttctacaattattgattgatattacttgataggacaaataattcatacaaaaaatacaaaacatccacattgtagttgcaggcgcaacaaataaaatatcgcctctcattttatttttctctttcttcgccactaataattaattaaatgctccttttcacactttatgaaaatataaaataaaataatgatataggcatgaaatttggtatatggtaaagaggtacccaaaataaatcccacgctccattacccctctagtgtttggtgaaactaagtctaaagactcacaatgacaatcatgtttggatagtcttcggcggcaagccttaaaaatgtcagatgtcatcattgttttatatgcactctcatcacttcactattttccctctaaaaacaaacaaacaaaaatatcatcacaaatacattatcagaaaatttgtgaccaaaaattgatcatatgggccagaaaggaaagagatgcaaaataaaaagaatccatttatatatatgtatatttaaataacaaataagatacaagcttaaaacaaattaaaattattatatactttgatttgtatctctaattttcctgtatttttacagttttgagtacaaacacctcaagttgcttgccaaccaaaggttggacttttctgccttaactttatagatacagtaagagtagtaagagttgaagaacacttcaattgaagaaccaccattaactatcaagtaatggaaaaagaaaagattgaagctttttctgatgtgcttaatccaaagcttctcaccaaatcattggcttgagattgagaaagtggagctggccaatctcatattaatggatctccatcttgttacaatgatttttaacatgaaacaccaagaaattgttatcagaagagcaacaatccgacccccaaaaagaccagccagaacaacaacaaccagactcaaataaacccaattcccttcaacctcttcatttttttcttcttctttatcttctccttcactaaccaaggctgattccattccatccaaagaagaaaccccatcattacgaaagcttcccttaatgctttcacatctttgctcttcttgttcttcaacctcatgataactagacccttcactacatgtctccaacatgttaacaatatcatccttagatttactcttactatattttgaactacgcaacttcttaggcactaagtttttgataatctttgccttaatctttgatctcttgctactcttattcttttcaagagtcatcaccccacttgggaaaacagtttcaccatcttccatggcagaattctctttcttcacacttgtattgttcagaaaaccccatttcttatcacggctaagtagctcaagctcaggaccatcgactaagaactcattctctttcatcataagatcattcttaacctcagaaacctcaatctcatcatcatttgaagattttgagtcaatcctatcaagcaattcagccacaacagcatagctctctccttgatttttttacatttaataccaaacaatccttttctgaccaaataaagctcgcaacccaattcaccatagatcttaatcttaccttcattttcgaacaaggtttcaagaaccgaacagagctttttccaacatattcgagaaacaagagaagaaaagcagacaatgtgaccccaaccaccaatttcttggtactcaaagccaaaaccaccactaagaaaaccttcaaaaccgccatgagtagagttccaccgcagacaaactcttcctcgacccggctctcatctcgaattatcgattcggattccggttctacagaagcctcctcaattgattccacttcctccaattcctccgacgccgaaatcttcacctcctcacaaatgggttcgcctcgaacagagcttttctccgaacaagaatccgaattctccttgatcggatcaaaattcgccggcaaatccgtttcgaccctgttcgaatcattaacattagaaacaacaacaaccttcttattatccttctttttcttcttcttagaattagagtgcttctttaaacgatcacgattcttaacaaaaaggtctataagagaggttgggaagccagtctcgaccacaagagaaccaccgcgtttcggcgactggagatccgcaacgatacgggaaattcgggtcaccttagatttcttccatggaagcggcatggttcttttatgggtctgagtttaaattggagaactgggaaaagggtggtggttagtttttttttttttt

SEQ ID NO: 184817 - DNA, 12425 bp, Cannabis indica
aggatctgaatgagttttgcttgaatccccacttccaggatcttctttatcttctggaggtgaactcaataccataacgggtgcatcctgcttatcatcattttcttcaattacaccttgcgagtctgaaatccccacttggtcaatatggttcggtaatgttagattggtgttagcgaagcttgagttagtcctgccagaggctgaagaatgatgcgggcctggatcaacacaagatgccactaactgaagcacttcaggggaaggggtcaatcccatgcttgttttcttctgctggtttacgtgcactggtgaggatgatggaatcatcaattttaaatggagtggaggaaagttgaggtcagactcaatccttgatattgcttgtggaagcaacgaaagtggtggggccaatggagtgcttggagcattgtccccaggcacagtgctttggaagtcctggctagttccgacaatatctgatgtaacctgcctcaacagctgtgactttcgtttctttttcttctttaacatacgccttggatcctttgggaaaggaggaggagggccaggaatcacaaatggtggtatacttgttttatcttccccatacagtaaccgaactgactgtgcaactgccgagacagtaggaggtagctcaggatctgggggctttgctggagcacttacagcttctcgtagccaatgaggtagcttgtcccttgaagagctacttccagctacatcttcctcctttgagtgcaagagccctctcctagggtcagacatcaagcctaaactattggattcaccagttcccaaattattggtggaatcacgcaaaagtttcagtgatttatcaagaagactaggtaacttgccatacttactcccaacctgttcatcttcctttcgctttgcatcatagctggatgagtgattcacaccaattgaatctaaacaattagcgccataagaattaaggagaaatggcttctcaactggtgcatttgaagatgtgcctggtctgtcagaaggcccagcaacacaatctccagacatatttgcccgatatttatcatgcatccatgttggaacaggggggaattgctcctgttgtaaaccacttctatctgatgaatcaaaatttggcaaggtaggccctagatctccaaaccccaatttcatgtctgtcatgtgaggttggaattttggtggagtaacaaatctactcccatgtagtgccctcgccatcattccatcagaaataccaggaaataaggaagatttgttagactttgttgacttagttggttttgatacaggaaaagctgatccatctaagatcttcagttgttcctcctcccacctggctgataaatcttcagaacttcgatacttcgaaaactttaacctggggtctctgagcattgaatcccaattgccccttccatgcctacgaacaccaatccacaagaaatctagttcatcttctgaccagctatcggcttttgattttttcttaagtgggctgcttgatcctgaaccagttctcatcattatgttttcaagtaccttcctatgattttcaggaaatgatgaaaacatgctaggcatatgtcccaaacccagggatgggggcatctctctttctggttgattatatctcacggcatcttgtgaggaaaattttaaatttggcaacaatggcatagttggaagttcttgcaaagagccactcgttgattcttctcgcccacccaaagacaagctaggtaagaagtcgagatgtgagctcagcatgctcttagatggaaatgggaatcgtgggaacaatttctcatcaaatggtaggttaggcagtggcattctaccctgaaaatcagagaaagtagtatgaagaggattataaaagaccagaaacccaacctagggcagttgaaatataaagcaaataaatcaagtctttcaatcatgcctatataagtaatgctcacttaaataaagaaaatccaatcagagcaaagagtgtaccagactaagtggaaatcggccatcaggaatgccactcttaagatgctgttgtgaaacatcttgtgaagcattaacttctgtctcagtcaaagtgccagagtgtggaggtagactaaatggaaactctggtctaattcctgatcggttttgtttgccatttgatcttgagaagttcttatgtgatgattccatttgattagcattgggagcacagagcccaagaactggcaataaattactgttgaatgttgagttagtgtaatttgttgccgggagttggtggcttggaaggaatatgtctggagaaggatgatcaagaagattaatacaacgatcagcatgaccactaattttactctttgataaccttccaagtcttaaaggtgatcccgacttgctcataggagcatcaaatttcttatcctccaaatcaattatcagtggtttctccacagaagattgaactaatccagaagcttgttcaccatcaaaagcattgattgaaggaaattgaggggctggttcatggggtgatctgtcaataggattagattcttcaactgcattcctcttagcaagacgttctttttgtctagcacggagcttggcactgctcaatgaaaagaagacagtaattataagggcctgatgatgttatctcatattatactcaattgaacgttacatgcatgacccttttttctcttatcaatggaatcatggtaatagttaaattgaatgaatctgtacttttttattttgattactgaaagaatctgtacttactattttgttttcagtgctcgtccagcaggtgtgtattctcgttcaggctctggctcaggctcacgctcgtcaccaccactctgctgtaaaagaaagcaattaaagccaacactgatgcaggaagaaactaaatttgaagcagcaactatgaattaaaattaagaggaaagagggtacatatttagagataattcaagagagaaggggcacattttttaataagtgtatacaaaatcagtggagtattactcttaaaagaagaggaaacaacaatattgcaacgatgggcctatctataaacatgtctttattattctattaagatcattaattccaaatttttactagtacgcatttgtgatattctgtaatactcacatgcataaccaataacaaagaaaaagaaacactggaaaaggacaccaagtaacaagctaactcattaataacctcgttatttatacagaataataagcacattgggttaacagctaacaagaaaaatatgcaagaaaataagctataaagacttgtcaactttccagcaaaacatcaaataaaattttacctcactcaatgtttcactggggtgtggagcatatgcttctctatatgaaacagctttccgttgccgcttcccacgaccaagagctgcttcctcctcactttgatatttttcccatctaaaagttcaataaatatgcaaatgaaagtgagcagaatctcattcatttatatgtacagaaagaagaaaattaaggaaagggaaatggaaaaatttattgaagggaaataaagtctgtgaagggatgaaaatcaagctacttcaagatatcaatagcaaaataaaacataaatcaaccgttttccaaaacctactcaattacaataaaaccataatccttaaaggacagagaagaaagtgataaagtacacttgtacaatttcttctcaagaaagaaagaaagaaaaaatgttagcagaccacataatacatcacatataaatagagaatccaagaagaagcttgctacctgacacgcaatagtttgtcccactcgttttcttcagtgacaatagctacattctcctcctttctctcagagctttgtgctgagatatcatcaagcgtaccagggggagattcagttcctacttgttcttcggttggttcatcattccactcaagggactggtcaaaatataatttggaaaagacataaagcacaagtaaggaagtaaggatcaaaagtatctctagtttctaatttctaataaataagaattatgcacaagtttcattataaaggttatatatgactaagttggaaaacatctgccaaagaattggtgtctcattagtagcaagttaaccaaaaagaaaatgaacaaaaaaacaagaagttcaaagaagtaaatataatccggtgtacaatcatagtaaatctttgactgcttcttgtcaccttctatcatacttattataagtgtccctcaaatgttgatattcactttttgatagactcctataaagggtgtaaagtgggcaggcagtagagggggtacatgggtaactgtagtgatgggtagtggaggagtaaagtagtatatacatataggagaagaaaggattccgaggcatgttgattgtgattttgtatgagcttttctctaaataaatacctcgtggttctatggttctagcattttcttatcaatttgttcaattaaatatccagttttctattggctattttccaacctcttctatctcccatatgtctgtttttgcctattcactttgctattgagttaaggatccctacctgaggtctaccacttgcattcactgagtcaacataaaattagataatagcgtagccaaaaatcaaattgacaaaaattaacataccagttcaattcataaatctgaagaaagaaagcataattccaactacaattaacataggtgatttgaaaactactggtacaataggatggttctactaaatgggtgaattttcaagatctgactacataacggagtcttgtcttacactaagtgatcatagctagctgtaatttcaatacatgtctgcaactatatttgtgtgtgtttttatatgcttatggtttttatctttgggaagctccaatttagcttgtaaccacagtgttcctctgccataagcgaggctcctgaacaaagttagggaggaggccattccaaaacaaataacctctctctttttcaaaacaaaataggtgaagtatgtaatagacagccattcattaaattaaatagaacacagcatcttttagaaaaagactcagaataaatacatgcatcaggacataagatcagacatgcaacacttcagtgcttggaaacagatatctcctacagattttaatagcttacctttactgagccaagcatgtcgttctccaaatctccctctgcaacatcaattgatccagactgtagatttgaccgatcaagtagcttcaaaattgcattttcatcccacacgatcttgttactgttatcggtacatttatcctggtacacatctcccaaaccaccagttctctttctatgcttatgttcaatatctacagatgcttcatctttgttaacattactttcacctgcatcttttgtatcttttgcgtctgtgccaattgaattgttaaaaagttcttccgtcccccattttaaaatgtcctccacttctttttgagatccagacttattaacaaacagttgatcgagcataagtttcctctttgcaagctgcaagatacgctcttcaacactggcacgaactacaagtcgatataccaagagtctctttgattgtccgatccgatgtgcacgattcatggcttggatatcagcgtgtggattgaaatcagaatcatagataattactgtgtcggcacttgccaaattgatcccaaggccacatgagcgagttgataacagaaaaacgaaccgacttttatcttggttgaaccgtgcaatagctgtttgacgatcagccacagaaacagagccatccactctttcaaatgttttctgtccaaattctatagtcaaataatcttcaagaatatcaagtaattttgtcatctgggaaaagattaggactctgtgcccttccttgtgtaaaatcctaagcatcgaatgcagcaaagtcaacttggctgaagcttttatcctcatctcatgaaggaattcagctgatccagaatcaggttctgttcctggtataagatatggatgattgcagacctttcttaattgcatcacaatatttagcattgattgttgtggaactcctttcccaatatttcgcaatatctgataattcttggtgagcattgcacgataatattcagcttggatggatgagagctcaacaggaaccattctttcagtctttgggggtatattttgcatcgcatcttttttaagcctacgaagcatgtgtggagaaacgagtttttttagttcatcaactttttcggcagttgtgagatcattaaacttctcttcaaatgaggttagagaagggaacgacgctggctgcaagaaattaagcaaattatacatctcaccaatattgttctgaagaggagtaccagtcaaaaggatgcggtgttggaaagagaatgaatttagcaagctgaaaagcttacttccagaattttttaagcgatgtccctcatcaactatgagaacttcccaaggaactccacgcaaatgtgaagaatcagcaaggaccatttcatatgtagtcaaaagaacattaaatttataagcagccattttattatttgagtccttcacatcactagcatgccattcatactgccgaatcatggctctggctttagcacagccatgatattccacgacatttaagtaaggagcccataattgaaactcagccagccaattaggcattgttgatagtggaaccaagaccaaacaaggtagaatagctttaaactcaatgtacaaagacgaaatgaaagcacaagcagaaactgtcttccccagacccatctcgtcagctagaatcacatttttagacttatgccagcatttacgcaaccaatttagtgcttcaagctggtggggaaacaataaacctcctttcagctccttaggctgctctgtgagagtaggtacatcagtttgctgatcaatcatctcccttggcaccatagaaacatctttttctaatgtttggcactgaaactgatgatataattctatcaaatgaggatatttcttaagaacaggctcctccaaactttcccaagtgcattcatcatacggcagaccagtccattttacaaaagcttcacaaatatcattagatgatcgaagagctattatcctctgtggttgcttccattgttcctcacagatatttataaccgaagttccatactttgccttataattttcaagtttccttttagccatgactttcagctgagactcagggacccaaacattgtgaatatgggattttcctacccacttaacaaagaactcatacagaacagtccctccattagcatatgcagattcaagcacaatggtttcctgaattttgtgctcagcaacatcactacttcctgattctatttccactacatttttctccttgcaagagagatatgtttcagaggcttgtggaacttcttcagtatcaacattttccatatcagtatttgtattttcctctgtcatcaaattttcatttgttttccctgtcccatcagtagacacagcagattcattctgccctttagcagtcatggtggtagattcagtattctttgaattcttcactaaatccacctctttccctttttcaccttctctgctcacagatcccttatatacattcatttcatcaactctaatgtcgtttttcatgcactcttcctcatcaacaatcttcatatcatttccattatcctcgataacaaaatcaacagcctcgacatctaattcatgatcataagcagaattccctcgagataatctattttgggattctgaaagtaataaatcatcagcatctgtcagtgataaatgccgcaaagagtcgctgttattgcctagaactcgacatcctagaatgcgatctacctgtaatttaggtaagataaaaataaaaggcttgtcaaaaccaaaattacttatgctattcgagcccatatctagcctgttcaaaaactaaatgcaatgagttcgtattactcctcaccggcagagattcagatatagccttatgttcagatgtaagagagtcagctacacgatttcctgctttatccttaacagaagatgggtttttagcatcctcaagaagtttctgctacagaataattaatgtttagcaatatttacagaaagtataaagataaaagtgatactgatattataacaaaaataaattgagtaacaaaacaatgacacggttgtattaaaggaataatcacaacgaaaagagatcctacactcaaattaggaaagcaaactgaaagcacccagcaagaaacaaatttagaggctgtaatgcgagatgcaattttaatatatttttcctttaccatgaacaacaaaatcaaaaggtaattaaactattcaaggctactagaatcagaattgagccatcatgagataaagagtaacttaagacagcatttcaattgatatacaccttttacaagatttgcttattattttcctgcacatatacgcacatattggcacaccataattggctatacatttttcaatttatattgacaccatagcctaggcctatcccaaaccttactcatgttattgttctatagacaaaaatatttcctccaaatcacatgcacacaatatcagaaacagctgaaagaacatgacacaagaaatttttgtagtgaatgtgacattagatgtgaaatacttatttcaatctcaattagaattctatgggaatcagctttactccaaagttggtttaggaatataataagataactagatgtgagctgatagatacctcatcttcacagggaacattcgtattattgttttgaacgtgttccttagacaaagatacagaaaccccacggttaaccgatttcttctttctccgaaacttattatttccagaactggctgtattttctttcgacccacgctgtttagaaatactagcaacactttttcccttgtcagacttgcatttctttcgagtagtatcattcttagctttatgtttcctttttctagcctcagttgtagcactaattgcaaggacaacagtgtttccttgaggctcattgttacatgataagctgggtttaacatcaggaaaggcttcatcctttgcttctgatattgcaactttagaatcagaagaagtttctttagcaggagatcctgacttcttatgtgtgatagaatccattggagacttcttatctgtgcaggaatccataggagacttctcacattctttttcaacctcaacatttacagatggcaaagtaccatccaaagaagcatcctccagtaaatggtctggcttggcactgccagacatatctatttgagaggatgctggtttactttcaaagaatttaactccttgagttgaaacagattttcctttctttgaagaccttttctttgcaataattgaacttccaaatatctgggatattttttctctttcagatgacttgattacagaagctgattttgaattaacaatctttgtccttgctcgtttagaaattttatctaaactaccaggctctaacagatcaccattctgacagcttggacattgccactttcccattggaatacgcttcaaatgatgaacaaagtatagtgatcccaattagaaaatcgaacaataaaaatatattataaacaaatcaatagaaaaatagaacgtaccttaagtggtggattaagacactggagatgataggtacgaggacaactatcacagcataacaaattaccaccaaggtcacagaccacacactcgaagaaatactgcatcagagaacattggataaaccaaaaaaaaaatcacgaggtcagtcaataattaaagtaatcacaattttgattatttcaaaatgcatcatagagcaccactctaaatccaataaactacaactaattcatttcaaaaagttgcaagaattttgatgacgtattcacaatcccaaaatgaaggaacactgagttgattacttacactaaacttagacttttcaaacttctgaaagttccacataaaccaaaatcacaggcatgtggcacacaaaaaaaaattccatagtgtttgcttgcacacacccaaaaacgcttttcatattgacgttgaatgcatatattgatcgctagagtaaggcttttagcaggacttcttaaatatcattggaagaaaagaattgacaactacataatgaaaattagaaatggcgacaccatatataaaagcaataactgttaatgcatatgaaggtgccaaacacatttccttaaaaatatgcctaacttcccaaacaaaattttcatgttcaaaaataaaaataaaaaagtatttacttatttaatttatgttggaatctagctcaaacataattttaatttgtcaatttacaaagagaatatcaagcccacattaattcctagtatcatcagttatgtaccgaaaagaataatcaaaacagcttagctggcagaaccatgtgttttttttttttccttttttggataagagaaaaagaagatggggaaaccatctacattacactctagatagcctcaaacagcttagctggctaaaccatttgatcctgacaacgtataaaccagctggcaaaaccatgttagtcacaataaaagtaccaaattgaagactaaaactaaaatgctagaaaagcttagtaggtggaaaaagaaaaatcatagggagaggaaaaaagttgtatgttctattctaatcaattcaattcgaaaattttgagctagcaaatagattaaattttcaatgagtcatggaaaacaaataaattataggaaatgaaaattttcaataataagacactcaataaaggtttgtaatgcagatgatttccctaagaaaataaaaataaataaaggagtaaactcaccccatcatttcccttcttcttcgatgtatatcgctcgttaagtatttcagtcttcaatttgcgtttagttgagatatttcttgaagatcctgatgcaactgaaccgtcttcttttccattagctagatcaggtccataaggaagctttctgcgtttgcgcttcaacacccaatttctattgatcattttactattagatgaactattttctttcatctctcagtactacttcttatatgtatcatctacaatgacaactaactaattatgactccttaatcgttgagaagtcaaaaaatctgagaatcttcccagcagttttgtgtattgaaatggctaaccaattcattcctgcactttaatgttcacaagtattaaaatcaaacactagaataagataacaacccccataaaatataaacatgtatgtttgcaattgtttgtgaatgcaccatatatacacaaataataatgattaataaaaatttcaagaaaaattataatggtgctaacacagagatatacagtcaacaatagctagttagttgacttaaataattttgatagatttcaatcattaagaagaaataggaatgtggaagattagccagaaggtaatgactccacaaacgttcaattcaaataatatgttaataactgaagactgtcaaaagtgaacatttattcaactgctaccatggaaccgtgaagaagacagtgtgataacctttatatttaatttacatttttcctgaacagctaaagtaaaaataatcagattattcactgacgttcttgccttgcatgaaaatcatgtttgggtaattgcttccaattcaaaaggctgcaactaaacctacaacacctatcaaatctaagaaaatgcaatgcccaatcaagaagaaactactagataagaaaaggaaaacactaaacctctatttgggttctctgtgataacaagtactatgataagaggatgatcataacataattagcatttcaagcttttattgatctccaaatatttaagagtgtcttgctgcttcattgaatatggagaagcgaaattaccatacagtcaataaatatatagttgatactatcagataatgccattgcaagtagaacagctattgctctatgctgaatggaaaataaaccttttttgaaagattaaaaaaagtcaataacttaagagttcatactatccattttgactcaactactagtactaatctccttgcaataagaaaacaaagatcaataagtaccaaagtacaaggccacaggctcaatgatattaactctaaacaaattatcacacaaagtagcctctacaaatctgtaattgcaaaaacatcttccaagctaga

SEQ ID NO: 184818 - DNA, 4203 bp, Cannabis indica
attttttgaccttcaaacgggaagaggaagccagggcatataagctttgatatgtcatacagaactttgaaagtaaagaagcctttggagacaatcttaggaatatcgatcttttgaatctcaagaacttcccctgcaaacctcgctagtctctccaaattccctttagtgattgaacgagcaggtagattaagaatacgtccactgatagggaactttgtgagacaaatttcccaattcggaggagtgccattgaatctttccattatcaaaataccattgttgagaaaccaaggattcttggccaagatcctattcaaatctttagtcgatttgaaagagaaaaccaagaagcttgctgcagtcatggtgaatttgattttgacagtccattctttgtccgaaatgccccagacgcgtccgagaatcgttctcaatagagaacgactcattgggcgattcgaacaccaacgtcccatagcacagagtgcgtttacttcagatcccccagcttcattgatttcccagccgtcttcatcgagcacggtcaaattgttggttctgttcagtagatcttccatggtggtatcaggattcatcatcttcgtaggcttttccagcatctcaggaaggctcttctccaagagagagcaaaagtagtattctagcatgtatttccgagcacgacagatttttaataaaagtcatgaattttttataatctatctattattttaagagtaatgataaatacacttttaatttgtatacttaaattacgtattatgatgtatatttaatttaacttatcataaggacgtgtttgggagtcataagagcgtgccttgtcgtgttatactgtatataattatattcaaaagggacaccaatataactgcaataactaagaaaacattcttaagaattaaaatttcaaattctattttaaaaattaaataaaaaatatattacttaattaaaaaataacatatatatatatatatatatatattgcacttagcatcacctaattaaatttaattaaaaaacttaaaggtacattaacatcaacatattttcttgttaagggtagaatattcgattagattaattaatgatacaggtgttcgtattagaagcaattcaaacaaactccataatacatttagatctaatttaaatgtgtgtaaaaggaaaatccaaaacatagctaagtaggattttactagagtaatttaataattactaactactaattgtaattacttctcaattttctcttaaactgccgacaaggatgattctttaatgtatatttgaaggtaattaggttgtcttcacctttcattagagttgctgtaattaattataaggtttgactttattattattattatttttaataataataaaaatgacgtgttaataacggcataatttgaataattatgaaagttatatgattttggttttgatttttatcaactttatttttcaccttctggccctacaagtaaccaaattgtccattgccacaaagggtttgaaaagtacttaatttgatgattgaatgttgatctctttggttccgccatgctcatattcatttattaaaaaacattacaatttcctttttttttttgtcccgatcaaagttttatctcattgattgctctagtactgcctttggaacttttagtccatatatatatatatatcctttctttatgacacccagaatgaaagagcagttgatataaatcactgtagaaaagaataatgatacataagatttctagatgaaaacttatataaataaacatatgtagtacaaaatgacttctctagagggccaccaatccttgttcatttacaatactttaaacaagtatcaatttccattggtgagtttctctatagaaccccatcatagtgatgtctaattatgtccaatttgatgatattactttatttactttttttctttccaatgaatatttggagagtgttttagtctgtcccatcaccactataattctccagaaactgttgtttggacatatataaatatatgtagcagtagtaaatgatcatcaaatgtgccgccttgaacttctagaagataaatatgttatatgctggctacaatgaataataaaagttcaatatccaacttttaccgtagggaaattaaaggggtacaaaatctgtaaataacgactaacaaactaacaattcgttcacaattgatcaccacatcactccataattggattagttctaaaatttcaaaaatctaaatttgattagtcggtatcgacggtacgtcatattaacagattgattataaaaagaaaaaaaaaaagaattatacagataaaaaacactataaaattttgaaacaaattgagtgtaacataatgagagtacagtgtctttagcattggttatagtaagtacaaaatgatatcataatgcaaaattcataaaataacaaggtatataatatagcgtaagttgctgtctttctccttcaactctattttgacaatcattaaattaatttgaggtaattaatagtgaaacataaataaatttactagactcttttgcttcaaatagatgttataataagtcaatgatctgttgcaccatttctttctttccctttttcacatgattcaccttctgttaacttcacaaagaaaattataaaaactatattctcatgctaacaaaaataaataaataaataaatacataaataattaacatttaaggcaaaaagatatcctcactttttcttgaattgcaatccacttattaaactctttttttttttcgttcgccaatatattgaaaataataagaaacttatatataacacagtctcggcatatatatatatgtataaacataaggggaacgtgtgaaataagtatattcttgatcaggacaagcaaaatcaagctgagtaataactttcttttactttaaataataattatgtcaaaaaatcaactacaacatattcaagttgattatttaatttgttttatgtatattcaaaactagcattttacttagtactaataccttgtttgttttttttttttgaaaataccttgtttgttttaaatctaatggttattggtgaatttcgagaatttgtattattattattaattaataacgatcgataagagtttcttctgttaatacacactaacatatgccaagttaataatacagaaaaagaagttggttaattgggaccactcttcaaaattaataaagaagtaaaaataaaatttatatacatataatatatattttaataagagagatatgttgagaaagctccaaatctcttcttttctcaacttttatcatttcagaatattttatggttgtacattttaattttgttgtatactcaacaaatataaatataaatatatatatatatatatatatataatttgacaaataaaaaaggcttaaaatgtggatgttatggtgaatttaatgaaaaggaaaatgagggtagtggtatacattgtatatgtaactatatgatctggtttaatatatatgtgtatatatagtatctatatatttatataaatgttgtggagcgtgcattattaattgaattaaggttcattatcttattctttatcttcaactacacgtgtgacagaaggagagagagaagaaagattatgtgaagtggaagcaattaatatgttggcttcgttataaaacaaacttacatatttgtatatattattaattatttaagtatatatatatacaaataagatttaaattttctctacaaataagttattgatgtacgatccatgcttattttatgtaattatatatctatatatattgtttttcttaaaaaataaaatccagctccgtggattttttatcaccaacaatgttagagaattttattatttgttgtttttaataacttttttttaacaatcaatattaattaaaaataatctgagtttaatacattttaaaaaaaatatatcatttatttaaattaattcatctatcctgagttttgtgtgcggcctatccaataaagattttctcataacaaaaacaagtagtacaccatattaaattataaactctacttgaattactgcaaaaaaaatagtataataattcaattta

SEQ ID NO: 184819 - DNA, 2362 bp, Cannabis indica
atatattacaaccatattttacccgagactcgaatctagaaccttcaagacacacacccacctatggccacttgagctagcctcaagtagttgaatgatgttacataatacgtagacaatcacttctcacagatacaacgattattaaatagacaaatacaccactttcacttctctaacaaactcaaattaatacttttactatgccattttcactactccaataaattcaaattaatacttttactctaaccttaagaagacagagaaaataagactagagtttttaagagtatgatactttgttggtatgtatagaataaaaggagaagtctttttttatagacttcatatggggtgtaaataacaagtgtgaaagcaagtgaaaattctacaaaattaatgcaaattgattaatcacaatattcaccataatttctcatatcaatcactatattaactattattatagttattaaccaaatttgcatttattagcccttatcaatagaccacaaatttaggcattaatttagcattcattcactagtctcaaattaactatttatcatatattttatatgatttttcaacaaattttataaattggtaagatttccaataattaaccaattatttttcttttcaaataaatcaaatataagatatattattattaaaatccattgtttgatctaacccgagaagaaataaataatttgtgtttacattttgttcaatctttaatcttaatcccaaatctaatcaatgtgggactcacatttttatttccattcctaaacaaattttagcaagtaaccaagctaatcatatcccttattaaaaaattaataaaaaaaaagctaatcataattcataaccattctttctatttttattcttcaatacaccctaaaagttaataaatctatattttttccttaaacaaattattcattataatactatttttattaaagtaagtgcaaaattatctttttttccctacaaaattataaagaaaaaagaaaataataaataaataaaaattttgcaccttgaattatgatttttgtagagttttgtccttgaatttttcagttttacgaaaattcccctcaaattatgcaaattgttacaaatatcccctctaattacatcctgctcattttttaaaataatttacttatgtaattatgagttacaagtataattaattatagtacaagggcttatataatatatttaagctacctaaaatttaatttattgacattaaacatacaaacaatagttctaagaatacacatacatactctcataatttattattagattgtaatttgtgtatttattttatgtttgaactcttaactaagctagattaacattatgttagtactacgtgaacaaattattcaaataaatgacaattatgcaactgcagagagatatttgtaataatttttatagttcaaaaacgaaaattaaggggtcaaaaatttacatggggataaatcatattggataattctaaaactacatcccttaaaaggagtctatcagtgcattctttctctattttgtcatctgaaagaattttgtagtctaatatttttcacggtcgtctatgttgtacttatttaagtcattttgtaaaatttgaaagattcaaaaaaatataacacgccgaaaatatgattcaaacagtttgttatacgcgagactcttttatcctataccgatgtgaaatagactgaatcttatttatagcgtgttaaattttttaaaatttctcaaaattttataaaaatacttaaataaaaacttaaacgaccatgaaaaaattaaactaaaaaattttcttaaataaaaaatacatcagtataaccgagacgggtacattataaaatttttcaatctaatttattaaaaaaaaaagggcccatggctatcatttgagagactatccctatctgtttttccttttaaataattggaaccatatgtaagctcaccttttctttttcttattttttattttattttatttcgtaattttttgattttccagttctctctctctctctctctctttctctctctatctcaattcctcggtcggcgacttttccatttttcgggtcctattggggtcgcgatcggagaacctctaaccgccgtttggatccattccgccgccgacttaatacatccggctgatctccttcttcaacttctagcttttggtttgctttcaggtaggtacgatgtaattctctttctttgatctgattttggtttcttggttctccaaaagagaagaaaaagttgaactatggactgtggttgtttgttttct

SEQ ID NO: 184820 - DNA, 710 bp, Cannabis indica
ctggcaaacactcttgaattagctgaaattttcaaagtgaagctttcaaacaaatttgaaaagatgagaaaatggggggaaatggatgaacagtgggaagaatatagtagagtgagccaagtatggattaagtataaaattttaattattgtaatagtatatcatgtatatggtattgtagggaacaacattttgagagtcatgtcctaattgcaaaagtgtatgattctagctttcacaaaccagattgtgtaatttatgtgttctgttctgttttctattgtgttgccttttggtttagaaattaaatttctgtatgcttgtgttattagaacaggctatatgattctagcttttacaaaccaaatagtgtatgttttctattgttgtgtttttttgtttatgaattaaatttctatattattgctttggaaaaggttgtaaagtaatgttttccattgaaaaatttacattatttgatccataatgaatatatataggttgctattctagtgaatcgtagatgcccttgctacataaaattaagtaaccttaaatgttaagtaacatttttccacacacttctcagttcaagttctttcttcttaagggttcgatgatgcttttttgtactctcttttcttcacagattgttgttactgctaatttcgtcaaaatagcattctttgcctcttccagcttcagcttca

SEQ ID NO: 184821 - DNA, 2263 bp, Cannabis indica
gtgatacttataatggacatgatgaaaatacatgtagcatgatgttgttagaggaactcttctaaaaatttctttcaagttgtgattgtacttaactttagcctcttaaaatacttatatgtatcttctttaagcatgcccatgaagcattggtatctatccttgctcaagactttttttttcatcttcatctgcttatgaaaagtaagacggtacggtactacaggttagttgtgccatcttaaggtgtcattttttgttcctttaagttggatggaagtttttgtacttggattttcttcgaggaagaagactcttcatcgaacttatcattatcaaggtctcccttcaaggcaatatcgatcttgtggtgaaagtcttgcatctttgcttccacatggttcatcccctttcaaagattagtgggaaacaccttggtcctctttgaggtttatatggggattatgtaaggtacttctcttgtccctactctgtgtgacttctcatcaaattcagaggatggggccttatgtttgcctctcttttcgaagggagccataaacggagtgcccctatcaaggcatcttttgagttaagtttttctctaggttatggggtattttcttcaatccaacattatgagggagggtcagtttgggctgcctcaacaaacccataggtacccttatagtgacatgtgtttcctagcctagctaatatggaggggtatcattagtagagagcatagagctcccttcattaacatgtagtactaattccccctctcttttcatttgcttttacacttgaagagtgttgcatgggtcttctctttgagtatacaattcatcgccattttcatgttagccgccgtagtctccaacctttggttctttcaacaaattaaggttgttttatgtagtcttctttcttgatctattttggagatttaactactcgagttcaaaagcttggactaattaattaagtgtactcgttaatcctttcaagatgtgcactctaatgggttcaaatcttgatgtttatggcgagatggaatgagatactatgaggcggatggtcgcattggtggcagtaccttattagttaattgtttggttagtatcttcctaattctagttgagggtagtggccctaattatggcacttggcccactaagagaatggtaggcattgttggatgtcctactataaaggtggtgatctcattgaatgaatgtcaattttcggacccataaatgggtgatatgatataagggaagagacttgatcctgctctttcccttgggcgtatctcttcaagaaaaaattagtttctagtggaggaggatctctcgtggaatacattggctgaactccatccaagtacacatttatttttcaagatgtctccaacaattagcatttttgaataatggcgatttcttagaataaacgtacgtagcttgaatcttatcattcccacagatgacgctaaattattaatggtgaaaattcaattactatgttgaacttttaaggtatctaaagaactaaaaaaatgggcaagtccttaatggtgacaaaattttgcactactttaggttcatggcataaataattttctatttttttttctaaagaatgaataagctatttatagggggctctagtggccctaaagtacaagttatcccaaagagaataaaatagtactctagttgaacatcagtgggcagtggaggtagtagtggtcaggtgtcaggccatactaacacttagatatggtgtctccactacttgtactgttggtacctacatataaaaccactacttgttctcaaacttggcaaaggcatgactcatttgacttgtccttgttcgtacgtctcttttgtatcaagtaccttgtacttaacatgtacttatctgtttggttttaagtaggtggcctcaacttggtgtccaaagtaaacgcttagaaatattttttaagtgttggatgtttttctttaattgtaaggctttttctatgtattatatattatagcattattggagaggggaactcctaagcattacatgggactagcttgagcgtattcctcctctaaggtggagtagtgaggtttgggccctttcttattgtggtgtgagacaatgcgaggggtagcattagatgcgacagagcgtgagcgaaggggtgaagtccaagtgagggagtgtgatcgaaggggtatggtcccagtgaaggagtgtactg

SEQ ID NO: 184822 - DNA, 11195 bp, Cannabis indica
aaaaaaaaaaagaaaggaaaaattgcataaactgctattttgggtaaaaactttacacttttacgtttaattttttttatatatttttacagtattctataaaaacacaagaaaaccaaacaagaaaacaacaacaaaataacaagagtataacataaaaatatatcaaaataccgtatttcatataaataaaattttaaaaaatcgtaaaaatatttataattatgtataaccgtatttttataatttttttgtgtgttttttttttctttctaaaataatccctttataaaaagatgtgcgtgggtaaaattgaaaaagaaaaaggaaaaaaaaaaaagaaaaagaaatcaagaagtgggcttcgagagttgaggttattgggcttggcccaaatccaacaaggcccactacaaagttctaatcagaacaacgtagaagagtgtaacttttccatggtcggaggtagcaacgaagatagaatatttaataacgatgcataagctgtaatcacctgcagctgatccccaccatagtaacactactccatctttttcagatcccaaaacccttaacaacaaatccacagaactaagcaagcttcactagaagaaccacaccttaagctccatcaacagtagcaatggatgctctgcgcaaacaagcctttaagctcagagaacaagttgccaagcaacagcaggtgattctttcaattatttgaaatctatcggtttcttcttttgcttctttggtttccgagaaaatgtgcgtaattgctaaattagaactgttgatttcctcgtgaagtggttaatttagttaattcttagttgtttttgggatctggattttgttttgttgatttaaagatgaagattatagtgtgttgtagcatcatcttgtgttatattatatgtaatatatgtatgtatattgttttgtgtttcaggctgtgataaagcaatttagtgggactggttatgaaagctcagatgtaatggtgatagatgagattgaattgcagagacatcaacaacttgagaaactttatagatccactcgttcaggaaaggtattattattattattacagtttgattttgatgttttcaatacattaaataagaaccctttagatttagctaaaagttgatacagaaattttgaggtactattgttagtgaaattggtaattttagtatgtgataagggttaaaatgttgtagagttttgtaatggtagttaaactatctgaggttgaaaaaacaagatgtttacttagtgctatgtaagaactgattactggaaaactatttctgcataggttttcctgaaattttctttaggtgttttaatttctattttttttttttttgtatgatgttaataacaaactcggatgaaagaagatgattacatattctagatcattgaaaaattgagagccttttattttcaaagaaatttttgttaagattatattaaattctatattccatagtaggataaggtgcatgggtttgttgctttgcaataaatgagaaggactgtagtatagtgcaagttatttgtatagcaaagatgtttctgctactgtttattaaattttttgaccattgaagctgaatgaagatgataaggaaagagaaaatgaaattgtaagaggaaagaaagaatcagaacaaaaaattctatattatgtaatgcaagcttagtttagaatccatacaagagagctacatatagagttttcagtacaacaattatgagtaactaacatttcaagttatttgctgccttaacagtctctagagtgttttgagttttttttctcttccgaaaattgtgatcgaaggaaaagttaattggaatttagctttgaaaacagcaggcattactctctgtgaattattactattcattctcctattccaagctcacacatttatcaaatttactccactgtttctaatatcgaaattcttgttggttagctatatttgttttctgttgtaattctaatccatgcttaatttcattgtgtttttctaggattttcagaaagaacttgtaagagcagcagaatccttaacagccataggaatgaaacatattgaaacaggttaaatatggattggactgtaatgggcgacattttctagtcatatggaatatgattcgtaccttgatttttcgtggttatttattattattttttggttatttattattattttttaattttttttattggtaatcaggaaccaaactgtctgaggattgttgtagatatggatccgaaaacatcgatgactacatattggcaaaagctgcatctatatatggtgatgcccgcaagcatgtggaaaaagaacaagaagaatttaacaagctgctttctttacaggtacacatatcagaaagctatattactatattattatatgaagcatttgagtgtacttgttgattcataacatcaaccatattcaaattgattaaaactgctctggaatgaaaacaaatatatttgcatccttgttacatcattatttcgtatagggtggcaatgttgttatttttaatttctctggaatttattacacttttgatacttactaagggtcataactttctaaatttattatgatgcaatgcactctaaatgataagataatagttcattttctataagattaattttgatacagaaacatgatactctgtttgttctgtatgcttccaggttttagatccactgagagccatggtcatgggcgctcctcttgaagatgctcgtcatcttgctcaacgatatagtcgaatgagacaggatgctgagacacaggtaccagaaagaaagttgacatttcagtatactagttaccgatcatctttaaaactttatcatgtccttattccttcgtattttaagaactcatattcatattgaccattaaaagctaacaggcaactgaggtttccagaagacaagcaagggtaagggaagcacctattcctgaaaatgttgcaaagctgcatgcagcggaagcaaaaatgcaagaacttaaggcaaacatggcagttctcggtaaagaagcttcagctgcattggctgctgttgaatcgcagcagcagagactgactttccaaagacttgttgcgctggtttgtgtgctcacgattttagaaataaacttttagattaaattttttaatggttctggaattgatgtttacaacgatgtttacttacccttttgaaggttgaaggagaaaagaattatcacctgagaatcgcttctattcttggtgatgtcgaagctgaggttaattgttaaatctacttagcatttgtttgcaaaagcaaaactactttatatgtccaaacttttaacttggtgtggaaattttctcagatggtggtagagaaacagcataaagagtcggctcctcctgtgattccatcagatagtttctccgacaagacatacttcttggccgaggtatgttatctgtttcgaacttatcattttataacattacaaagcatgcatggagaattatagtcatacagaagtactatatagaataacaaactgtaagcttacttagctggacacgatgttaacaaactgaactatttctttttttcgggattttaggacagaataagaaacatgtagatatcgttttagaatatttgaagaaagtatgaacatgtaataaggagaaaagtaccaggttcaacatgttgatatttattgagaaattaataagggaattcgggaaatatggttgtaaagatccaaagaccggaccacgatgcaattcgcttatactgattataaccttaaaaccttttttttcccaaatcttgcaggcggtgcattcgtttactgctgcttcagacaaagagttgagcttaactgttggtgactatgttgttgtgcgaaaggtaatctttcatccccgtcactttcctgtgttgaaaatcttttatttttgttgctcgtttcaaattttctttcgaaatgtcacaatagccaacggaccaaactaagattagaacaaatcacaacaaataggctatatggtttgagaagatggctaataagaaagtatatatatgttaacttctctccttttctttcttcaggtgactccgtctggttggtcggaaggagagtgcagaggcaaagccgggtggttcccatctgcatatgtcgagaagcgccagagacttccaacaaattctactgaagtttattgattggttcttcctagttctattgttgttcacatttcatttttttggccttcatttcaattcaaagtttacagaacatggtatgtgtagtatgtttatgtgtatattctttcttgtatacattcattctttttgggttactcttatttcaaagcacttgcaaaaatgtggaaaagtttgtttctttggtaatttttacttaattatttttttaatcagatcaaaatatatggatgaaatgaacaaacctaaatcaaaattctcttttctaattaatgacttgaattcactttcttctgactctcatctcaccattctaattttctattaacttttctttattccttttgtaaattttttgctttataattaaaaatgagcaatgatttggtatgatgggaatatatataaatatggctgcactaagtactcttaatatatcattttggatttgtattttgtaaaagttactaattagatcttctatatttttgttaaatgataaaatagactctgtattttctaaaattgtacattttttatcaaaataaaacttaataataattcaatctagagatattatgacaaaacttgttatattttctgtatctattttgtcatttaacaaaacagagcgtttaattagtaacttttgcaaaaaaatgcaaaatagtatttaccctaatattcattaaggtatatatgggtactattagaaaaatttgaggttttatatttaattttgttatctaattaaaaaaaacattcatttttacgtatttaacaaatttttggtccatacattcagaattaattagaaacttgttcagataaatttgatcgatatttttgtacactatatatttattttaataataagttcattaagaaaaaaagaaatcaaatttaacaactactcttaaaacacttttgttagaattttgatctgtctttgctacacaaactaagtaaaagaaaaacactgtacttgtacccccataatctttggctgggttagtaaagatttccaaactaaaacacaaaatattaaatatactatcatcttgtagaagtcatatgaagagctaccaaagatgcataggcaccttcatggatcttaatcaaggattcatggcgacccttctcagcgatcacaccgttcttcaccacagcgatgatatcggcgtttttaatggttgtaagcctatgagctacaacaacagtagttctattcaacataactctatccaatgcatcttgaaccactctttcagactcagcatccaatgcacttgttgcttcatcaagcaagagaattttcgggttttttagtattgctcttgctatagcaatcctttgtttttgtcctcctgataattgtgttcctctttcaccaactgaagtgtcatatccattagggagtgatgctatgaagttatgagcattagctgatttcgtggctgaaatgatctcttcttcggttacttctccatgttttccataggtgatgttgtctcgaatcgtttcgttgaaaagaattggttcttgacttactaaccccatttgttgtcttaaccaacttagcttgaattttttgatgtcaacaccatctagtgttacttgacccgaaagagggtcataaaatctctctattaagcttataactgttgattttccactaccactttctcctactaaagcgacggtctgcacattttgaacatttttcattgttagttaattaaaagaatttgagatgtttgtctgaccatatacagttagaaaagaccgaaaaaagtattacctttccagatgggatggttaaagacaagtctctaaagatttcaacattaggccttgttgaatatctaaagctaacatgatgaagctcaatatctcctgttatggttggcaaagtaacaccttcatcactactcgaatcgatgctaggtttgctgtcgagaattttgaaaatcgaggctgttgaatctcttgcttttgttgaatcaggagccaaggcactactttgtgacacccccattgctgagattgttaaagcaaagaaaacctgaaaaacaaacaaaaatcaaaactttcaacataagtaaagaacagaacaacataagtactaacaaaaactcataaagattagatcttttttaccttgaaaacctctccaaactcagctttaccatgtttaacaagaacagcaccaatgtagaaacaaaatgcattcatacaatacatagcaaagaaagaaaatccaaagccaccaccactgactagtcctaatctgactccatgagccatagggccttcacattttctttggtacatttccataactttttcctcagcacaaaacgaggcaacggttcttatcccgcccacagcatcgttcgccacttgactagcttcttcatacataacctttgcatcagcactaaaccctttgatgaattttgtctgtaaagttccttggaggatcataattggtgacactgctaaaatgatcaaagccaacatccaatttgctgtgaatgctatcactaaccccgcgatgattgtcgctatgttttgaacaactaacgccaatgcatcgccaacaagggccttaaccgtcgaagcatcagttgacaatcttgcaccaatcgcgccactacatgacaacaaaaaaaaaatcaaataactaacttaactaacttaactaacttaactgattctgttatgggatttaccttgaatttgcagggtcatcaaaccaactgatttcttggtgaacaactttagcgaaagttagggagcgaattcgttggattagtcttccaccagcaattgagaaaagaaaattctgaaatggaactgctagaaaaacaactatagccaataccaaatagatcagagcccaaaatcttgagtcttttcgcagcttggttggcgattcgtagaacatgttaatagaactcgaaagtaaaagaccaaatgttgggaaaacaacaccatgaattgctgcagcaattgagccaagaatcaacactggtatctcaggcttgttaagctcgaaaagcctacttagaggaactttttgatcacttgttgatgtgttcttctcttcatcgcctctttcttcggtctcatgaatgctaatctggccaggaagaccgaagcctagagcaaaagagcggcgactacttgatgaagagcctctactaattgatcttctaagcgataatctaatgctgctcgattttgtcatggatttttcaatggcattcttgtcgtcgcaaccataaacatcttctgctgcttcattagctccttgttgaaggcgaacaagctgcgagtaagctccttcgggatcagttatcaactcatcatgagtacctctttcaacaatctttccttggtgtacaactgcaatcaaatcagcatttcttatggttgtcaaacgatgagcaacgacaacagttgttcggttttgcataactctttccaatgcctcttgaacaatcctttctgattcagtatcaagcgcgcttgttgcttcatcaaggagaagaattcttggattctttaaaatggctcttgcaattgctattctttgcttttgtccacctgagagctgtgttccatgctctcctgccaatgtatccaaaccctgcaaacacatgtttcaaacttcaaatctttcatttcatcaaacataaaataatgaatatgggcatttatttcggtggaatgactattcttaatcctacttccacttctatcctgatgttttcatccctttcaaccaaaagcactattaagtggcgtttggtttggaaaaatgaaaatataagaataggaatagaatcaagtttaaaatgcataaaaaataattgataaaaaaattattaaaatttgtctcctttttagttccttctatttcgtgatgaaatagtcattctactaaaataatgaaaaagttattccattataatagcattcattccaatgttttagattgcaaccaaacaaagaaatacaataaaaattattttcttttccattccattctttttctttgtttggtaacattgaaatgactattcctattctttttcccacttccactcatattcttatattttcattccttccaaccaaacacaccatcaggtgtgttcgattggagataacaaaatagaaaagaatcaaatttcattccattccttagtttagtcgcattgaaatgactcttccaccatttcagtggaataacaatcccatttcaaaattggtcgaaaagtcattccaacactgttttcattataccctttagagtaaaattttcgaaaatcccatttatgtttttttgttttgagtttttacctgaggaagcttgttgatgaatttagcagcattagcaagttcaatggctgttttaatctcttcatcagttgcattatctttcccataagcaatattttctcttaaagtggctgcaaacaaaacaggttcttgactaaccaaaccaatcttttcccttatccatttaagctgcaaattcttcaaatcaacaccatctataagcacttgtcctgaatcaggatcataaaatctttccaacaaacttatcaccgtcgatttcccactcccgctttgtccaactaaagccgccgttgtcccactcgaaacatgtaaagagaaacccgaaaagatttgaacatctggtcttgcagggtacttaaagtaaacatctttaagctcaatttcacctcttatgtcttctaatactgtcccaacactgtcatatgcatcgattttcggttttcttttgattgtttcaaacattttgtaggctgcagcttgtcctgatgcaaaagcattcaaacttggagatgtttgtcccaaagacctatcaaaaaaacataagtcaaaaaccaaaaaaaaaacaataactcattgagaaaaacacatgtaaagtgagtgtacttagtacttacattccaccagtcataattgcaaagatgacatttataacttgtccaccattgtaacctttttcaatgattaactttgatccataccatacagcaagtccataagtcccaaacacaatcaacaaaactacaccaagtcctatccctgaagccaaaccttgatgagccatcattttatatgcaatctcaatcttcttgttgtatttttcaatggctttcttctctccagtgaaagatgcaacctttcaacataaaaacataattaattagtactaattaacatcattattttaccgagcattgttatcaggcacctttagtgtttagcaccatacactaatatagaccaaaaaagacaacctatacatatgttgaattagtagtaatcgtgattattattttactgagcattgttatcaggcacctttaatgtttaacattataaattaacatagaccgaaaaagacaatctatatatgtatttatatgataaattaatactaatcaaggtcattattttaccgagcattgttatcaggcacctttaaggtttaacaccatacattaatatagaccaaaaagataacctatatatatttatatgataaattaatactaattaaagtcatttaatgtttgaaaccataaactaataaacctatatgtgtatttatatgataaactagtactaatgaaggtcattattttaccgagcattgttattaggtatctttaatatttagtaccatacactaatatagaccgaaaaagataaatagtactaatgaagattattattttatcgagcattgttatcagatacttttaatatttagcacgaaacactaatacaaacaaatctcgaaaatcatagtaataagattaacataccgttctaatagatccaacagtttgttcaacaacattgccagcttctgcataagcaatctgtcctcggctagccattttcgacatggttgaagccatgacaccgccggctatgacaatgaccggaatacaagctagcaacacaagggtaagaagccatcctttgataaaagcaataacaaaaccgccaaagaaggtcgaagtcagttgtatgaacttccctacctattaatatcaaaaaccgagaaatattattattagtataattaagtatcaggtttcactgataacatcgcttgtaatgaaatgtaaaatgaccttttcgcccatggcctcttggatgagaattgtgtccccggacattctaccgatgacttctccggtgttagtttcggtatcaaaaaaggcaatgtcttgtcttagtattgtctttaagtacaaacctctaattctagtggcttgtctttctccagttaccatccaacatgaaacctctgcattattaattaattaattaattaattaataataattaaatcaaaactaattaattaattaatgtaacattattatcttatttattaaattaaattcaaatatgttacttacgaagaaaggaagcaatgccagttccaattgccaagtaaacaaatttcaaagaaacctgaaaaaaaaattaaaaatcataaataagaaattaaattatttttaaacttaattactataattttaattaattaaattaattaattaattacaaacttcttttttggtggtgggtgtgtggaccaaaaatttaggtgcaatcactttcaaattttactttttcaaaaggtcatattatagattagattagatgataagaacaataaataattaaatctattttaagaaagaaaaaataaattaaaaaatcaatacatttgtatatatattatcaaagaatcaaaaccatcaaacacaaacaccaacccagaagctaaattaaaaagaaaaaaaaatcactaagaacatctcaaacttagaattaaagcaaaagaaaagacacc

SEQ ID NO: 184823 - DNA, 804 bp, Cannabis indica
tattattaccttcttttgccggaaaagtgactaagacggccggaaggggaaaacataatgagagcaatgtcaatgtcacaaagaattgagagttcataagcttttttaatgagtccatttctgcgtttagagaatgtcacctgtcgatttgtgttgttttctattctctttatttgtagtttaacccgacccattacccatacaaaacaaaactaaatttatattaagattaaaatttcctttaaaaactaggaggagcatagaaggaattattttgaaagcaaagacaaaaaaaaaaaactacgaaatagtagggaactcaagtgatgtttatattaatatttgtcctaataaattattatggtttctgagtattgtgtggtagagagttaaatattgtcaccttaaataatggaataatttgtttttggaatgaatgaattcccgaaatttactccctccctcttcactcgtcttattgttatgtgttttgaccattttttttttaatttttttattcacttatatgtaatttatcaagttttcttgtttttcatttctttaaatcttgcaatctcttatatagtatacataattaatttagagatgtcaatataaccttagcctacaattaataatgtgtacaactattattattattaggggtactattgtcaatccctataatattttagtcaatccgcgtgcgtgaaaatgcatagcgaaaaatatttgtttcatttttttatgatagtatttcttatagttacaatattactcatgtaaatttttaaaaattttcga

SEQ ID NO: 184824 - DNA, 5170 bp, Cannabis indica
acattttatagacgattagcaaatcgagtttgcccatattgtttcaagacacttttcgattttctctctgatcgtagttagtttttttgagtataatgtatggcctgatcttgaatctcttatgtactctatatactaatattacaatgaagttgctatttcattataaaagaaaaagacaatttcaaaaaaaaaaaaaatctaattttttaaccaatttatgaggtaaaccaattatatttcgctatgtatatgttgagtcaccacttagagttttggaagagtgagttgtcagttgagatgacacaagttaaggtccttttgccattaccttccttaataaaaataataacccttaattatttgattaagtttttttttgagtaaaattagggtaaataccattttggacccttcaattttacaaaagttaccaattggaccttgtgttttgttaaatgacaaaatagaccttgtattttctaaaatagtacaaataagacccgaattgattttttgtcaaaataaagtttaattataatctgatctaaaagtgctatgacaaaactgtttacattttttgtatctgttcgtattaagcagtgtcttcaagttggttgtattaaaaataaaagttgtcaaaaattaagctcagggtcctatttttactattttagtaaatacagggtccattttgtcatttaacaaaatataggatctaatctataacttttacaaaagacagggtctaaaatagtatttacccgtaaaattatttgattaattaagtaatagttttcaatgaaattttcttcagtggctaaagaaagaaaaatatatatatttttagtaaaaagtcggtgaagtcatatgaaatgtattttcctgttttttttttttttttaattgtttaaatgaaaagtttgagaaggtatagccctaaaataccctagatcattctggagttcgggtcagacagccgccgcacactatttcttccgcttcgccttcttccacttctggtctcagctatctttcgattcttcactccttcacaaggtaaacctccaatttctttctcatttcgacttttttcctccgacgaagtattctcctttgtgatacaaaatatataaatattgatttcacatctcaaatatctcatttacaggctaactatttgttttcttctagtcaaaaaaccggagtaacaattccaattcaaatggaggactggggtaatcttttcgtcttcctcatttttatttatcctcatttttatttatttatttatttatttttcaatttttatctgttggtttaatctttgaatttttgctttaatctcagaggatgagcatattccgcctgttattactacagagccacttagtagtaaatgggctgatgaagatgtggatgagaatgatgtcaaggattcatgggaggatgatgatgaatctcaacctgctactgtaattcttttttattagtattgtcatttattataattctattctaaacatgcatatgtttacataaataacaacttttatatgtatgaacacacacacaacatgtttatgattcgttttgtctctcatatcaatattaatctcacagtatactcagttgtataaagggcgggtagtggtctattcccatatgcgaccatagataaatttatttttactcctagtcttggattggtgaacaaccccatctattcttattttccttttatgacttaaataacgccatgtaacaaaatatcactcaagaaactttataatttttgaatcaatctttgtttgtttctttacgtgtgggttcttgggacatgtgttatatattttatttcacattgttctagtttgttgctttgttcattttgtaaccttctcatcttggcatgggaccaggaacctgcaagaaatcctcctgctgataaagcacctaagaaatcttcagtaaaggctgctgataagaaagttaaagccgttgagtcaaaggaagagccactagatcctgtagctgagaaacttcgccaacagaggtaatgttcaatgcttaatctgatttgcctaatatgttttttttagtttctttcttttattcgccttttatctactgaccagaccagcctatttgataaataaatgagaaaaaaaaacatattcggtgaacgttattcatgtatgtaaacgagtctaagatcagcatatttgttttcttgtaaaaatgcttgctcattttgatctgttcttttctgttgctttaactttttaatttttgagttttttttagactggtgcctcttgcttgatcctaatactatatatagggagctttgaattatagcaatttctattttggtgtcaaagagaaacttgagcctcataacctgtgtgagcaaaccatagtttttatttaactaaatttagtcaaatttcttcgatgggacacaatgaatcacagtactttatgtaaaagcagtggtcacataggcttagagataaatgagaagtttgatttttcattgatctgaaaactaaatttatttgtttaaatattgtttagtttcatttaatttgtcatatttagggtttttggaattagatttccaattttccactttgaaatattgtgggtttgttgcactaaatcgattataattttgtgcatgtgttgtgagttaactgcatagtatagtttagtttttgatactaggtacttgagctgaagcttttatttgtcttttcaggcttgtggaagaagcagattacaagtccacaaaggaactgtttgctaagaaaggcgaagacaaaactcttgataattttatccccaaatctgaaagtgactttcaggaatacgcagaactgatctctcataaactattaccgtttgaggttatttctgaattgactaacatcacatgtgactaaaagttaggctgattttagtgattttctaattttagttttttattacagaaaagttttcattacattaatctgcttaaggcagttatgagactggcgacgacttcattgaaagcggcagatgctaaagatgttgcatcttctatcacagcaattgcaaatgagaagctaaaattggaaaaggaggccaatgctggtaaaaagaagacaggtaggtgtttcttatcgtttgtgtttttcttctgtcttttgtatgttttaatttggtttagttatattgttcttaggttgatttggaagcgaagataaaataatttagattagaggcagatgcattagaatattaggtactttataatatccatcagtacaatgtttgaaattgcatttctattgcgcgcctcgttttgaggcaaaaaaacgcactattgtgtgcacctcagtatttgtaagagaggcgtacgcctcaaacgtgtgaggtggtggaaaatggtctaaggcgtataaaagagtgaggcgcacgccttaaaaaaacaagatttaaggtttttttagcccattttcattcaacaacttgaaagatagcccaataacatttaacttaagaaaagggcccaataaagcacaataaaaacccaataaaacaaataactaaaaaaaagcttaactaaaaactaaacctacacaatttatatcaacagaacaaaactatatttctcagggttagtaactgtgtgacaccccctccatcttctcaatcgcacagtcagagaagaaaagaaaaaaaaaaaagagaaactgctgctgttgctttcttattttttttagttactctaaaagtattattttaattcaataattgaggcttatgtctcaatttactcaatgtgccttgaggttcagctcacagaaaaaaaaaaaggccacgaggcttaaatccgcaattataaacattgcatcagtagtgtttgttaagattattgttcattgttctattaatcgaataaacacaaattttactctaaatgcatgtttttcttagtattgatagttattgcctgctggctgaacctgattgatacatggggcaattctggcaacttgagtttcgtactccatctgaaagattacatgctggctatttaagtttagcccaacatctaagagttggttgatgtttgatacaagctacattaggatgctaatattttactgacatgggtatttttgtcaattgctttcgttactgcctttcaggtgcgaagaaaaagcagctcctcgttgataaaccagatgatgacttggttgccactagatacgatgatatggatgattatgattttatgtgagtgcatttttttccagcaaacggtggaagaagcaaagatgtttgaatttcaacactacaatagaggagaatttgatgggtggtattgatatgttagaaaatttgattatgatcatgtcatgtgtttattcttaaaaaaggaggggtgtattttgagaaaataaaagagtcccagatgccttttgtatctaatggtcaattttgttatatttgtgttgggtcgtgattgacatgttctttcttgtgcaaaatatttattatctcttcatccacatttgagagaggcaggaccaattaatttgtgattatgttttttttttcttcattcaaacttggtaaatccagtcacataacacgttcgggacagctaattagtacaatttgatttctccttttcacatgatacggggcttcaactgcaaaatattctccccttagcctatcaaatgctttgacatttttttttttttttttttcttacaataataaatttaaggacgtctatgggaggaacttatggatggggaagtttttgttgcgatgatccatctaacggtgataaacagataaatgtataataatggttagtaaatgtgctcactgctcattcagattgttaagctaaaaaaaaatttacatctagttttaaaaataaatgcaaaacataattttagttatgccaaatacataagagtttattaatttagattttaacttatttaagaatgtaaaaataatctcttaattacaattattttgtttaaatgaaacactaacggagttgcctacatattttctttgtgaaggatcaagctacttgtagttcggaatgctatatttttaaatttgaacataagaattccggtagatgacattc

SEQ ID NO: 184825 - DNA, 1385 bp, Cannabis indica
aaaaaggaaaaaaaaaacatgtgaaaccactaatcaccaattagttcttagatggaacctaatagtttcaatgagggccactaaggatttggttcaaatttggtccttgaaaaagttcaccatcttcaggtgaaagagtaaattagattcttgtccatttttgtttatagttcttttgaggaggtttgtttgttataaacaatgtagaatctatttcatgtttttttttttcttccagaatatatattcttaattatgtcagtagagttttatgctatctaagaatatttggagaaaactcatattaaaaaaaatatttgagaaaactttaacatcctttgttattgcagccttatgcattggctactcaacccccacagcatctgtgcaaggaatccaaatggaatggatatagttgttgttaaggatgacgggaaatggaagtttttctcatgctgaatccatcatccaatactctaaggttgctgcataaaatctctgattatccatctttacgatttttatgatttgtatttgttattatcttttccccacaaggtgtgcatcctatcaaccaagttttgttacgcaataatcactcatctctgcagaaacttcaagatgatcttcatatcattggaatgaaaatcaagcagcatgaggacagcataaagtttctgaaatcccagaaaagcaaatttgatgactcaattcttgatctgcaaggtatgaaattggctgtaatctgctacccattttatattctgtttgtagggtctgtttctgcatcatgtgcgtaaactgtatatagtttctcaactatgaaggaagggttagcctggtagataatttttaatgaagttcttgaattttggaagcttaaagaaataatttcataactggtgtatacatcaactgatgttttctttttcttgaaaagttacatatacccttttaagaatacgcttagcaaccttttttttttcttcacttggtggtccattggaaaacacgtctattctttattttgtttgcttttgtcgtcgtcttaaatctccgttcctcagttactttaggcaagtaccattcttctgcaacaaagattgaaaacgaggaccattcccaccttcaaaatgaggaggagatatgtgggcagattctacagcatgaaagatctgctgcaggcattttatgcctgctgaaagctcgtcatggcactcaggtctctaatcttacaatgaccaaggatgtagtgggtattgttgctacactgggcaaagtggatgatgataaccttagtaggtaaagtgactttgcaaatttctatctgcatcttccttcccagttgagagtcatacattaatggtttacttcaaactattgtt

SEQ ID NO: 184826 - DNA, 8167 bp, Cannabis indica
agagagagagagagaagtgagattgtagtggtgaggttgtttcagatttatttggtttgattttatagtttgctttctgtttttgtttgtttttattattgtaataatggtaattgcgatagactttaggtttttgcccattttgtatgaccactcctctaatttgcctccttggaccactatcgcttaattctaagatttttatgaacccttatttactattttttttttatatataattcattgttaggaattagttttgtctatcaatgtaatcggcttaattgattatgttgttgtttagatcatcctctattgtacaatctgttaataaagaaacaaacaaagaaataaatatataattagtaatttatagtgtaaatattttagtttaatgaacacaactaatcaagaaatatcacgtaactattgacttaatattaacatactaataaatatataataacttaagtatttttagcatcaaaattaaatttaagtatttatttatttatactccaaattacttacatataatttaaaattattaattatttttgtaaaaataaaaataaaatcattacaaatttacaaataacatttcggcccaactagttttatgatttttaatttaatagtcgtttgtttgggtaaacaaacacattctcatgttttcgtcgtcgtttatgtataaaaacgactcgtcgttcaaacttcaaacttttgttgcgttttgaaaacgacaacttgttatttgtttgtagttttgtcctgacccaatcgtatcgttacttggacaactatgatcaacggcccaaaatcaacgactagaaaagcttaaaagccaaattgaattttcacaaaaatcaatatgaagcgtcggatcaaatacctaaacaaacctctctaccaattgaaaggaatatccatgaagatccgacggttataaaccatctcaacagtaagtaactaggacccacaagataaaattaaagtgcaaactcctaatttctcaaaccaaataaagttagcgatagccgttcgatcattttgatcgtatcaaacttcataatcgaacggtatagatcatctggtaatcactgccacagctcatatgatctgaatgttttactcgtctctaaccaaacgagcttgcgtgagcaatggagcacaaaagctgacgctgttgatttttatttcccccttttctaaccgagaatttataagagaaaggcgaagaaagtcagttgggattcgtcgatactctattgtggtatccaatttgaatacggtgcgaattttcttttgtaattttcactgaatttgtgtcatttggggtgtgttttcaaatttgtgttaagggtttggatttccatgtgatctttgctgttttgttgctcaatttcaaaactttttagtgggtttgcagtatttgagtgatttttgtcattggttggttcgattggtttggtggtagagactttttagtgggtttcgattattttttgaccatctgggattttgcgtatcagttttattttgtggaattgtactttgaatttcgtatcttcacttggtgcgtttatgtgttttgaggctgttgggcattgactttttctttcagagcttcataatgacatgtggtttggtttcaagtatgcaaatttgatcacaacccatctcttacatttttcagaaatttggggttaagtaaatgtggataatttattcatatttcttttttcgcctttgtgaaattagcatgtggatctctaatctttcattgttttcaagtatttccgttttacttagcaactcttatgtgatttccttagtatgtatgccaacaaagtgaaaatgtaactgctcattttctgttttctatgttatacataagcctttttactcccttgcagtatgcaatgtgattggtacgtatcagaaaaaaacaagaactgttttgagtaaatttatgtctctttctatggttttggatttttgaaaggaaaatcagaaagagttaacctttcagattgtttggtgtgtgatcaggtatatggtgtaactcaatgtgcatataaagataggatttctcaatctatatattaagagagtgaattaggggataagttgagaagttggaaaatttgaggttctcaatctatgctttctcgccttctaatttggtggtggacttagatggacgtttcctctctggatcctaatagtgcgactgaaactgatcaattccctttgttaccggagcgaatggaaagtcatacaagtcgtgagcacacaattgacataactagaaatgatgatgcttcatcgagctcatctcatgatgatcatcatccaacaatgaatacagctccgcatgttgacagaccatctagcagtacaaatgtctccacttatcaagctacttcctcctccacaaaccgattaaacacaaggagttcttcgtttatgaggagaggtgacggatatggtcgtcgtcgaaggagccccttgaattctgcattatggatttcagtggagctatttgtcactgtgagtcagattatagcatctgtagttgttttatcgttatcaagagatgagaacccacaagccccattgtttgcatgggttgttggttatgcatctggctgtgttgcaatgcttcctatcctttactggcgttttcgtaaccgcaatcgtagtactcaacaagattctactcgacccgaacaaggctcttcacatagtaatcctcctgaactggcatcttatacagctatttttgttaatcaaccatcagacgtaggcaataatcaagcccctgaatcacccacaaggaataaccaaacaggagggtccttaagtacacggtacttgaattcattttggttgattatttgatcatggtttgtacttttctatcctttctgggattatgataaaccataaactaattataattcttattctgtagatttaatggctttgtggaccatttcaagatggcattggattgctttttcgctgtctggtttgtggtgggcaatgtgtggatttttggaggacactcctcccccgctgatgctcctaaattgtataggtacttcttgaaaactttactctttgtttttactggaaagaatgattgagttaactatgcattgtgtgctatacaggttgtgcatagtgttccttacctttagttgcataggatatgctatgcctttcatattgtgcgcaacaatatgttgctgcttgccttgcataatttctgtgctgggcattcgggaggatctttctcaaacaaggggagccaccgttgaaacgattaatgccctgccaacctacaagttcaagttaaagaagcatgaagatggtaatgaagatgagcttgattctggagttggtgaaggtgggatcttggcggcaggtacagaaaaggagcgtgaaatttctggggaagatgcggtaagtcaatatgctactcaacggtgaaaatcactacctaatcaaaattaagtttatcttatcaaaatctaatttaggttatgctaatatcagttaagtgtattcgagtaagactactatcctaatgaatagcaatttagattattacaaactttttctcctcttaattctttatttgcatctgtctctgcaattgccaactgagatgttcttgtgtcttctctgtcaatgtgtactgcaggtttgctgtatatgcttggcaagatatgcagataacgacgagctgcgagaactaacatgtacccatgttttccatattgaatgcgtggacaaatggttaaaaatcaatgcatcatgccctctatgtaaagcagagcttactgagctcctcccaacttcaccggtggcaagagactccagctagcaatagggaggaaaagatgggcaatgggtcaccttcggtttaaacattaaaaaaaaagcatggattttagtcccgatattctcgttctctgtaggaactgaaagtcagggattaggtacaacaaatgcaaatttcctggaaatccctgatactgtattgcagaggcaatacaagatagatgagaaaggctgtctctgattctaataagcttgggcccagaataaaacagggggggtatgcagaaagaacagttgtatctaagcttttcctatattgttaaagaagttgagtttctcctcaactctctccattttgacatttatagagctttgtgaaaattgacagggaacacgttttcacatgttgctgtctttccactgctacatctttaatcctatcgtggttggatgaacttttgatccttgtaagttgcaaatgtattatataatattattattattatgggtgaaaatgaagtcaagtccttgcaatttattttctgttgaaccaagtgatttattactgaaaatttgtacataaagcttcctctgttgatgcttatggcttaaaccaagttttggctaagtctccgtagccaaatgccagtcctataaaagagttaccttattcctttttagttgatttacatgaaatgactcattatgaaaaccagggtagaaaagtggattgtatttttctaataaaaaggtttagatagacagccatgatggattatataaaccatggcaaaattgcaaattattcaaaaaaaaaaaactgcaaattgactaatttaaaagttccatggcaaaattgtttgacataataagctgtttgtacataccaattaagtcaataaaatgggcaaaatacaacacgctgaccggatctagaaccataaaaataaattaagaaaaaattcagctcatcctaagcaaacccaaaaacccgagaatcatcccgtctaagatgaaaagtgataaaattttgagaaaatgactgaaaattccaactctagaagcacaataaaaaagtatttatacacatttgcggaaggaatacattttcacagttgacgaggtagaactggggtttaaagaaaaactaatctgaagagcattggtaaaactggaatcaccagtaactcgttcgcgcagtccactccgaatgagctgcaacacccaacactggatgattgtttctcagcttggttaggtccatgacagtaccccccggaaagcgcaactctaaaaatgttttaactgaacttttagcctcaatatcagagtcagatggtgagatctttaaatgcctctagctttccatttaacgcaagagaagaatctgcagttttcccagctaccaaatggtttccgttttctgagttgttactttggttgtacacagaattgggcatggcagagctgagtctgccccccaagtatgtggagtatggaaagtacttggcacattgctccttccatcctacaagaaaacaagtatatgtaagttaggcaccatcaacacaattttccatgtgtcaattgtgagctttttggtactcactcgaagcagcatcatggtcaggaagaactgtttctaggagtttgtggactctgacacaatcttcaagtgtccattccccaataggcccaagtgctccatttctgcaatgaataatacatgtcaagcaaaaatgaaactcctcaaagcaacatacaacatttattaccttggcaccggattgtttgttgcctcttcaattagcttaacagcctcagctttcttgtcaggctgtaaagtgtacagtagttcggcagcagcagctctatgcattaaggaatctgcaggaagccggggaaaagtttagccaaaacagcactagacatgatgaactatgcactgaattaaattgaataagtttgacgacaatccacctttatgtttctctaagaaaatcttgttggcctcgatcagagatttctcatgcaaaccactattaaaaaagaaaataaacagttaatttaatattaaatatgtataggcacaaaaaagagaaagtatagagtagagaaagaaccttattgtcgggcgttctgcttccaagacactagaaatgagtttttcagcatctgtaacaggagtgggcatcgagtccactttatggaagaatttaatctacatttaagcagtttaacaataagttcaaggggaataaacaaatcatcaaaaactgataaggacatgtacaaacaccatggccatatataacagagatacatactaaacagcgatgtgtatctgggtgttcggcattcaacctcagtagttgctttacagcctacagtccaaagacaaattaatcatcaattgaccttttatgcacctcaagagaaaaagaggagtcaaaatgcaagcttctcagctgcatgcttaaaaaaaagcttacctgaaaagcaagcaaaatcttttgttttctcacattaacttcaaaagaaagcaagtgagtttctaacgagttaggagagttcttttgaagcaacttcaagtactttgtagcttctgaaagtggatcttccacctgaataaacacataaatatcagacagggcaacactcttcctagagatgtacaataacgaaaatggaaaagacggttcaggaagctaataaataaataaagtcacacagaacctgcaacaatttctccccatggggatctggatcaacaggtttcacatttcgtttcccagtctttgagacactattagcattggattcttcatttttaacttcggcctcctgaaagaatgctcaacgttaggatggaaatgaattgtagaagaatggtcagaaaagctacagaagtcagaaacattactttcttcgcccgagcttctgcttttctcaatttttgcctcattttctttttctgggaaggagccaacttggacatctcatcatcttcctcagtggttgactttggaggggaatcatacaactttatatagcatctggtagatgaaaacccacaaccaacatataaatacagagcaaaaaataaaaattttgcaagaataatacaatacagcccagcataactggcaatataccaaattgaattttagccctagaaataaaccaatggtcagatgtctaatccatattaattgtcaattccttcctgcaaactcaatcagtcctctctagagaggtcttaattccacaactgcacgtgctctttttttcaactaaccaactttaatttccaattaaaaaagtaacatttattgtcaagttaacaaaatcaatcaaggaaaaatttatagtacatcatgagaaatcgaacgtggaacccaataaaaatacttcacctaattgcaccaactgctgctttatgaaaatatggatgtgaatgcaatcggtcttgaaatttaagcatttcaacgtatgtacgtaaagtcatttttctcaaacaataagaatggaagtcaaattgatcttcggtgatatcagcataatgcttctctacagctagaaatttttttaaagcccgaccaagatcactttgacggaagtaactttcaccagattccagctcataccttcaaagtaaaatacaacagtaaatacttagaagcaacaaccaacataaattgcttcaacaagtaaatagatcgagccgtgaatagagacataccacatgcactgcatgtcatgcaggattggtatgctgatctccatctttagtgaataacacagcagtcctctcagctaaagtcacctgcgaaaaagaaaatgcaacatgaagcacattcaaaacatctaaagccacagaaagaacgaacaattcataataagttcaaatgatcattggtggaaaggacagtttcagtacctgatcagcctgaagcatacgcttaacacattcactgttgatgtagcggtcagcaagatccatacatctagcttcatctgccaatgcagcagcagcagccaaatcaccagcatgcttcaaaatttggctctgtaataaaagacaaaatttcaaattttaaaggaagaaaaaaataattaacaatcctgctaactcaaaaattttataagctcaataacattgaaaagaagaggactgtgcacgagagaggatcaaatcctatttccctgggcaacacagctaaagatacaactccagttaagttcttatttggacgatccaaaggataccctttacaattaagctaaaccaattcacaaaagtaaatcgtacaaa

SEQ ID NO: 184827 - DNA, 10572 bp, Cannabis indica
cagaattccttgtgttactgacttaataccatctattaacttttctccccccttttcctttgccactaattttttttttattattaagccatatagctgctgcttttagatgttgtatgtatgtagataaaataactttctgttacattggaattaattgctattatataacttttgatctttgaatatgtgattaattatttttatgctcttggatgttcactccattcattatagtgtctgcctttataaatatatacatgtgattatttgagttattaaagttcactttttttaccttaatatatcttttgttttttcaataacaaagggccatttagttagttattttttaggtcatggcatgatttttctttcctactttgggcaggttgaacgttgcctgcgtttactgaagagttttgctccacagagtttagaccccaaaactcttgaatgtgtagatgatgattttaaggaagaacaggtgaggttcgggaagaaatgtcaagtcaatgaccagcttgtagaactcccaattgagcatcaaatatatgatttgattgatgctgctggttctcagggtttgactgtaatggaggttggtgcattagtgtattgtggttgtatttatttaacttattgtattaggtttttggttttctataggaggcttttgttactacagctttaccctctttttaaagttgcatataaatgagtgatgtgtttcaattgttaattccatcaatgcatttgtgacaaacaggtttgcaagagacttgggattgacaataaaaagaaccacgatcgacttgtcagtatgttctccagatttggaatggacttgcaagcagaaactcataagaaatgtatagtatatcgagtttgggcacccgggcgacacaatcttcaatcatctaatgcatttcctggtgaaccaaggttaccaaatatggtcaatgacaatagaatgtctaatgtagatattgccaatttagatgctcctgagaggcctactgagacctattcagagtgtgggccttcaatttcgaaagagcatatttctagccctgaaaaagtgacaagttttgatgcatccagcagctcccttcaggctgccactgaatctaatcttctttgtaatgattttaaagtgatacgcattgagtcgaaagagaccttttctgacactgggcttgacttggtgaacatggaaacaagtttagcttcatctgaaacttccattgcattgaagccgctcagcttgaaatcaaatcagagatatcccggtcgaccgttcactgtggagaatgcatggaggaagaaaattgtacttgaacggttacaggtctcttcattgaaccgaaaattttcacttcaaaataactgtgtttctttgtttatataattaatatatgtgtatatatttgtttccttatccagaatgagaagttcatcctaataagtgagcttcgtaagtggataaggagtcttgaaaaagataaaggcagcacaactgatggaaaaactataaatagtcttctaaatgaaacttcaaaaagataagctctgcaagtgcatagatatcaaggttccttttatcacaaattgtagcagcaatcgcattactaaggtggtcttgcacccggacctggatgttaaaagcttgtctcctgaactagtgtctaatattcacgatcaattgagatcctttgagattcaaagtcgtggccagtgctcttctcgaccgaagaacagtaaatctgttcctgtattgaatgatgtccaaaggactcagaaacttgccagttcagataacagacccactagatcggaagctatgcgtgctaacggtttcattttggcaaaaatgattcgtacaaagttgctgcattgttttttctgggatcacctctatggatctcaaggttccaatgatgttttattatccgaaaaagatgcgtacaagctccagaatccttacagctgcagcaaagtgttttctcttgaagcaacaatgaaggcaattcccattgagcttttcttacaagttgtaggatctaccgaaaacattgaaaatatgattgagaagcgcaagagagagttgtgtctctctgatcttactgctgaggagtacaagtctttgatggattctcattcaactaaaaaaaggctttcatcggtcatcgatatcttgcgaaggttaaaggtattgttggttggttagaacataggttttttcatctcatccatcattcgtaacgttcttgaatgttttactagtttatcaatatttgtatatagattataatatttgtacacttaaagttcgattcccagccctacgaactaagctttgcttcaactaactccacatttttttcttccgaaaagcttgtcccgcttacttttgcatccttgaaatttcattatttagtttttatgttttatattccactatcttgcttaatactaattgttaatgtagttgattcgattaataaatgaggaacatccagaagatggatccaatgtcttagttgatgcatttgagcttaagccttacattgaggagccaatctcaaaagacacgattacgttgaggagttttagaccttctgatctccgtccacgagtcagacatgactttgtcctctcaaatagaaaagctgttgatgagtattggaaaactttagaagattgctatgctgctgcagatccaagagctggtttacatgcattccctggatctgctgttaatgaggtatgcatgtatggaagtgatttttttctttcttacttgaaaagtttgtgtattgaattttttttatttgatctaattacaatgaataaataaaataattatacaactaattaatgaagttatccatttatcctacattttattccacggccaattttgtacacaattagggaaagattaaaatgtttatgtcaagaaggaaaggactattcaactaaaaaaaaaaaaagaaggaaaggactaaaactggatagaagaacatgatcgtaaataaatggtgtcctcactctattgcaacttaagttctcatcaaagggacttgccttgtcctttgcatagcttctagttttttcttcaataataattttctttttccatacctttgcaggtataccgttcccaatcgtgggcttctggtcgagttacgtcatcgggtcagcctgccaagaacttgaagcgtgtgatgaaggatgatcaaattcctattgaaagatctaatggaaggtcagtgaaagtgaggaaagttgacagggtagctggagagtttgatgaggaaagctttctggatgatgaaaatcacatgaacattagggaagacattttgaagatgaaggcatcaccacaaaaaaggttttcatggaccgacgaagctgataggtaaatcatattatgagatattactatagacttgagaattatttagcagagttatcagacgagtcattataaaaacatggggacattatgagaatttccaaccctgaattttatttttaataccacccagcaataattataatgaaaaaaatggcgagaactacacataaataatgggtaaacttgtgataagcaatatatttgtctaagaagaaattaaatgtgttctattgtcatttcattttcttctacacatttttttctttcaggcaattggtgatccaatatgctagacaccgtgctgcacttggagcaaaatattaccgtgcatcttggggatcaattcctgatcttccagcacctccaagtacctgccgtagaagaatggcaatactcagacatgatgacaatttcagaaaagctgtaatgaagctttgtaacatcctcagtgaacggtatgtgctacttggaaaagatgaaggttcgtcgggtaaagttatcgataaaaatgaacatgctaaggaagagggctgggatgatttcaatatcagtagtctaaaaactgctcttgatggggttcttcgttgcaagatggttaaacttggggattcaaaaagagttggatctacatatgaggagcggtcagatataaagatgaatgccaagaaacatgttaacatgcaatctcttacacttaatattttatatttgttgtttgaattaaaatggtatttgagtagacagcattgttttctataacgtatagtactattccttgcaggattttctggagtcagaaaaaactgatgctactacgcctgaggatgtccaaaaccttggtggaaaactacaacagagttccatgccaagatcacaggctcaacactcaggggaggttaaagtcagaagacaagtatacaaatcattggctatatctaatgctgtagagctgtttaagcttatttttttgagtgcatctagtgcatcagcggtacccaatatcttggcaaaaattcttcgccgttactctgagcatgacctttttgcagcttttaactaccttagagagaagagagttatggtaacgattgctaagcctccacgtatattcttgctgttcatttcaagtacttattttaaataaaggctgatgaatcatgtaaatatattttaatttttggtgatattattatagtttttctatatattagcaattaggacacccttttatccggagtagctgtctattatttatagtagaaatttttcatttctaaagcttgagctatcttgccttgaacagttttgatggtactgactagtgggttcattttcttatgtaagaaaatagtattttcaaatgattcttaattggattagcagaacagtgagatcagaatttagctttgatgtctatctatatgttgtcttctttatgtcaagaatatgtgcatttaggtttcgtctcttcacatggtttagctggttacaatactaatatcgtgataatgtttggtattattatcattcttgtgctattgaattcattttaagtgtttgtcttattgattttggtttatcttatttataattgtcactttaaaaatatgttttcttaggaaatgcatttctttttccctgaatgaattttctgtaatatttggcaggttggtggtagtggtaatcaacctttttcactgtcgcaacagttcatgggtaatgtttttaagtcatcatttccagctgattcaggcacacgagcttcaaacttcgccaactggctttgcgaaatagagaaagatcttacagaaggaggaattgatctccccgcagatttgcagtgtggggatatttttcatttgtttgctttagtttcttcgggtcaattgtcgctttctccacgcttgccagatgaaggtgttggcgaggttgaggatacaagaagcttgaaacgaaaaattgttaataatgacttttctgatggtgataaggctaagaaactaaaatccttggtgacagcagaaggtgaaattatttctcgtcgagaaaaaggtttccctggtataatgatatcgattaagcgggcagaattttctacagctgatattgtatatttgttcagagcatcggatacttgctctgttgaaccacaacatatggatggaaataatgtatgtgtcactacttcaggtccgacaagtttatctgattcggaccaagtaaaggaaatcctcaattcagaaggcgatacctctgtaataaagaacacgaatgagtcaccttggatagctatggcaggctatgctcaaagtttgcttcccgaacatgctgatcttggaagctctagttctattaatcctgatctcattaaggctgtctatgctggcattcgaaaggctggtgaccaaggtttgagcatggatgaaatttctgaagtcataactatgccaggtatggatgcatgctaggatttttgaaatttgatgtatgccatgtgcctgacagagagatggtaatcatgattcacttctgtataaatgacttgaagttgttctctttcaggtgagaagatcaccgagcttatcatttctgtgctcgaatcttttggtcgtgttatgaaggttagttttagaaaataaatgaacctaaagtacggctatgtaactgttatgattttgcctatgtcaaaactgtttttacattacaacagaatcacaatactaccataaaaataggcttttctatctcatgtctcataaaaaaactagatttaattagtgttttatttgtgttccctactcaggttaatgcattcaactcggtacgtgttgttgatgctttatattgttccaagtactttttaacatcaacagctgttaagtgtcaagatctcaaagattgttctgcggttaagaccgtaaaaggcgatagcagtcatgatttcgttgcccctcatacacagcaggaatccatcgtgaataatgatgatatacacaaagtctctatccttaatttttctgaagaaattcccaactcaattaacgaaaatcaagcgagtgatctttcatctgaaggggatgaagaagttaaaacctgtattgtttcttctagtgaattatgcatgccaatattaccatggataaacggagatggaacaatcaatacagtggtctacaacggactaagaagacgtgtcattggaatagccatgcaaaatccagggatattggaggtattcacttatcctattctgttattgttttagaaatgtcaacggaaacaaactaaaagattccattttagactaacaatgccattcgaagggtgtgaacgttgacaactaaaatcaagttaggtacttcacacaaatatgctctgtatctgtaagctaaattcagcctagaaatttagtcataataagaaacccaaagcaattgtgccgagttagatttaaattcaacactcccgcttaccttttggtttggaaaataggcgttggagtaggcaatgttatttggacgaggtgtttggcgtaagggttttagttaagagagtttgacattaaaggaatctcaaactctttattgagagtacccccgaaataaacttaaaaaggtaacccgcttaaacacaagccctccactaaaatcataccacacagatttggttttacactctcatttacaagaactcaaatcccataacaaaacactccattagtgtcatgcattggaagtgtatccctattgtgttactgttatttctctggaaagctttagttgtttccattgatttctttccccattgttaatgactagaatttgttgcttttaaaagaatttttgttcggagttttttacatcgaagcagaacaatttactttctactcacttgttcttaatttcttgttttttgtgttaggatgaaattatcaatcggattgatgttttgaatccccaggtatgccatcattccaattttgtttactaaaatttctcttcaattcaagaactcaaaatagataataaatagtttgctaatgtcacaattcagttacctgaaagaccaatatgatatccatatctatatatttgttctaaaatatccatgctaatatgcgagttccgaatgatctgttgcagagctgtagaaaattattagagctgatgattttggataaacatcttaatgtaaggaagatgcatcaaactacatacaatgctacacctccaacaatcttggggacccttttcagaagcagcagcagctttagcaagccaaagttggtttatcgtaaccattatttcgcaaatcccacgagtacttgcttactgtaactaactagggatgtcaaaacgggtcagcgaaacttgttaccgaagtgcttctaaactcaatggtaatacttttcttaaaataacattggttttgttttgttgtacagaatgagagagatgttattatgtataggacttgtgggctaagtaagttatgtatatgatttaacatataaagtagtttagtaatttttgtatagttttaattaagctatccatttgtgtatcttgaactaattaattaacctcaaattctaaaatatctaattgaaaagcaaccaccattctttctcaacttatatatatcttactaattaagttttcagatctttctcttctccaccaaagactggaataaggccaacaatttccaatttggagaagcatcaacttccaatgccttgataaggacttggcagttggagaagacacagacctcagcccacgcaaatctcttgcacaatccattcccactgtcaacaacaatccatggacttcagcttccagtgtagaagagacttctgcaattttggatgcacagcattaataaagcggccctcctagtttaggactaaagagactgcaaaagcgcgttaaattgaggtaatgaagtgaaatgaaatgaaaatattgtgttcaaaactcaaaagcattaaggtttcttcttctattttggttcttttcaacttataatgcttattgatttgtgaatatgggacccaattaagagtaccactactatttttcttttcattacaagtacaaagccaaagcaaactagtcgattatcatatagttctgtattcaatgctcacaataaaaccatcaataaaaaaaagagaacacaacaataatcaaaagtgtcactagtccttccttctatacagttttctctctttaaaagcagttcaaatctcaaagagcatttcaaatttcaaatttcaaatctagggattgttaagaggtattgagccccttcacaatccatatcaaggtattacaaacattcaaattgcacacttcacacacaattgcacgtataaatatttaaccatttaaattactcatttacttgtgtggttaatttagaagtaaaagtttggagacctttgaattttatagtgtcagcaaaataattgaagactagagttgagtgaacaggtaaagttaaaaaaaatttcaaaagttattttcttttttaaatgatttatattataatttagaaacagtgtaataaagatactaaaaaacaagaaatcaacatacaatcctatattatctgaaaaatcaatttaagaaaaagtaattctaaatgaatctactgcccattaccaaattagaaaaaagaaaaattaaaaaattggtaatttgagataaacaaccaaacaaagtagtaaagaatagccaaccaatttgacaagacaaagcagaaatataaagaaaatttcaaggacatcaaaaacttaacacttctaagattaaacaaagttaactctttctaattgctcaaaaagaaaaaaaaagacaaaaatttagacaggcttagcgcgtccatagaacctagccttctcctcgatagtctggaaacgaccatggccatctttggacgatgtgtcgatgaacttgagcttaatctcttccatggcaaccctagatgtctgtttcaaaagtgattgtctcagtgtcacaacacgcttcttcggtcctacacaacatcccttaatcataatgtaatcgtccttcacgataccataatgggcgaatccacccatcggggtgatatccttctcggtcctgaagatagcaaagcaaaaaattatgaattatatgataaatgacaacaaaagtgtgcttattatggaaagacagtagaaaatgcaaagcaacaaacctgtcaaactcggtcattgcagagtgagactcttgtccagcctttccaagcttataaattttcttattcatctctgtgcgatgatggtaaccgttttgtccagctcgggcaactgtgaatgaaactctagcaggatgccatgcaccaatacatgctaccttacgaagaccacgatgagtcttgcgaggaagacgagtgacaccccaacgagtcaccacaccttcatatcccttacctttggtcacaccaatgatgtcaatcatctcatccttctggaaaactgcatcgatagggatttgcttctcgaagaaactgtaagcaaagtccacttttttagcaacatctccaccgttcacctgaatttccatcagatgcgctttcttttgcttcaagcccttcatttttctaatctacaaaatgagaacaaattgaattgattacatcagtgctcaaccgaaagaacagaagtacaattaaatcttaacgaaaatgtatcaacgcacaatcaaatacctgggtatgagccaaaactcggatcacagtacaatatttcttcaacttctccaatcgagcctggatttcctttttaccctcttcagtttcatacttctttgagtatttgaagaaagccttcttcttagacttgcaccaattcttgtaaaacctcctcttcacctcttcacttaaatgttgggcccaaacagtatccaaactgcgaagaccacgaggtgtcttgatataaccaacgactccaacaacaaccagtggtggtgtttcgataatcgtcactgcctcacatgtctccttcttgtggagttctataccatgaaaacagataagattaatgccatataagcatataatggtctaactataatatatactaacagatcaaaaattgaaaacaagaagattgtata

SEQ ID NO: 184828 - DNA, 3454 bp, Cannabis indica
aagtaatttataggaaaacgatttgtatccgtattaactttcaattctctgtttgtatgtgtgaaactcaagtaaattcatttggtgcgttgattggattcaaagttttgaaatatttttagggtattaagctgataaatttattttgttatagcttgtcatgtgcaatgctgctttattatttgttttctataataattttctctttctgtatgtatatagtctttccggtttctgaaatttggttcctttgagtcgttccttctcttttggtgcggaataatggattaataatatttcatgattgacggtgggatctccctattttgaaatctgggtgcaatgtaatttcgttacatttatatgaacaaaaattaatttttaagcaatatgggtggttcgtaggtaaattcaatagaagaaagaggtagtgacttattgttgtttgaagcctcgggctcatatggattcacctgaacacagtcggaattacacaaaacgagacatggatgatggttcagatgtgaagagtgatagggctggagatgatgatgattgggatgtcactgataagaagaaacacagatccagtaggtcaagaaagtctggtaatggagaagaaattgatgggtttgatgttaatagtagaagaaaaagttatggggacagaaatgacgggaaaaagaaatcgggtggctcaagcagagctgatagtgaagaagacgattatgactcaagaaaagaattgcgcactaagcaggtgaagaaaaaacaagaagaaagcagcttggaaaaattgagcagttggtaccaggatggagagttagagaacaagcaagatggtggagagaagtcagggaataaagggaaaactcgagttgatgaaactgagaaaaagaaagtgaattcgaagagtatagattatgacaattcacaaagtaaaagtaaaagcaaagaggaaaagtcaaatgatatagagcctgagaagatgctggatagagattctaagtattcagacaagagggaaactggtcgagagaagggtcatggatcgacagaacattcaaggacctccagaagaagatgggatgaaacagatgttgtcaagaaagcagaagaaaatatttctgaaagagctgattcaaaaagtggcaaggcttctgatcccaagtatgaaagttctagagacaaaagtgcatctaccagaaatgaaagcagtgatagtagaagccgagttacagattcaatcaatgaaagaggtaataaatctaataccagagaagacaaaaaagctgatacagagagaagtaagagtaaaggcaggtcagaaccactagaagaagatagtaggggtagtcccattactcgtgaagatgtattgggaagggagaaagttgagaagcataagcagcagagaacttctagtcgagatgcccctgaaaaccgagaaagatcgtttaatgcagatgatgatggatggacaaaagataaaggatcaagagaggtaggtaatgcacacaggtctagaactccagagagaaatgggaggcgtcatcatgattcagagtattctgatatggagtatgaaagaagctttaagcggaaggaacttgaaaaggatgtttacaaggatgatcgatcaaaaagtagggatgacacttggagggagcggagtagggacagagagtcttccaaagaaaactggaaaagaagacaaagcaatgataatgataaagactctaaaagtggggatgttggttatgagcatggcagagaatgggaaattcctagacatggtcgtgacaggggtgacattgaaagacaaaatgaaaggcctcacggtcgatctggtaatagaaaagatggaagtaggggagaagctgtgaaaacatcctcaaactttggaatttcaaatgaaaattatgatgtgattgagattcaaaccaagcctttagattatggaagagcagattcaggatccagcttttctaggagaactgaagctggtcagcaatctgatggaaaatcagccccttatgatgaagaaggatatttgcaagatgaacgatctaggaggtctgagattacttctgggccacctggtgaagatggaaaggagagatattcagatgatggtatgcgcgatcagaattcatggagggatgactttgatttccatggaggaaagggccgaggccaaaaaggtgcaatggctggtcgcaatgttggtggtcaaagttctagtggtggttcacaacctccttatggaaaccaggagcagggatcattcaatagagcttctctacaagggataaaaggaggtagacttgggagaggaggaagaggcaggccttctggaagagatggtcaacaggttgcaatcccactgccaattatgggatcaccatttggacatcttggaatgcctccaccaggacccatgcagcaacttaatcctagcatgtcacctgctccagttccaccaatttcccctggtgtctttattccatcatttagtccacctgtttggcctggtgctcgaggtgttgatatgagtatgttagctgttcctcctgggccatcaggtccgagatttcccccaaatatgggagctgcagccaatcctgcaatgtattttaatcaatcaggacctggaagaggaggtcctccaagtatgtctggccctaatttcaattcttctggaccaatgggtcgtggaactccaactgataaaggtcctggtggttgggcgccttccaaaggtaatggacctcccggtaaagctccttccaggggtgagcaaaatgattactcccaaaattttgttgacactggtatgcgaccccagaatttcattagagagctagagctgactaacgttgtggaggattaccccaagctgagggaactcatacagaaaaaggatgaaattgtggctaaatctgcttctcctcccatgtactttcagtgcgacctgaaagagtttgagctgtcaccagagttttttgggaccaagttcgatgtcatccttgttgaccctccttgggaggaatatgtacaccgtgctcctggtgtggctgaccatatggagtactggacatttgaagaaataatgaatcttaagattgaggtaatttgttgaataaccacatcttatggaagctgtacttattgtgttggtaaagtaaactgtcatatatgcacttatcttgttttcccaccccatcctgtttgtatactactaaatggttaaacatagtacagtatctggtaatcgtatcaaaaatttgctacttctgcctggaaacatgctaactctagttctgatagcttgcaccttttgtggctatgattgtttctgcttcatttctagctaatgtaccagcacttgattcttgcaattttaactttttgttttggcattcattttttttaaataataataataaaaaaa

SEQ ID NO: 184829 - DNA, 1037 bp, Cannabis indica
tttttttaaaaaaaattaaatttttagctactttttttttatttctaatatctaattacttcttttgaaacaatctactatttagattttttccattatgggctgtgagtcctaagaagtatggaggactaagctattcaagtggacaagttggtgaagttcttgcaatttcaggtacacaactatatttttagtaaaccattttgtatgtattttaatatcactatctttttcccttgcatcaaatctttgagttggggattctatgcttgataatcaaagtaaccatatcataaaaaagaataacaataataacaagttagatttatttaggatcattagggggaaaaaaacttagaggacatataattttatgtatatactatgtgttcataaaagtcttagcaggagatataaagaaaactatacttacaattttgttcttatttatatatatgcacacacttgtatattattcctcttaaaaggctaatattcctttatcattttgtaggagttggtatgcttctgtttcaattattttgttacccacccattgagaggactttgggacctataatggtgtgtcgaattggagcagtatgtctcaaacatcatttatctataaccagttattattgactcatgtcatgttatgtaacttattctctaatttttgttattttcttgctaaggtcatcacaatagcagtcctatcaagttatccttttatagcaaaactatctggagctacactcatggtattaattaatcttgcatctgtgataaagattgtaatatctgtaagtataatatatacatacaagtattttcagttcattgcatataatactaatgcaatttttgctatatcaaatgtgacttaaggtccttttgttttttataccttgttaggtatgcattacaacaggattgtttctgctacaaaacaaagctgtggtaattattctgtcttatatttgttatgtatgaaattttgtttgtttaatatgacatttcaaagttaagccagttct

SEQ ID NO: 184830 - DNA, 3571 bp, Cannabis indica
gtcttcttcctcaactgcaagtcgggcttgtttcgctccatctgtagcaaacaatctgataaaatgtgggttgctctttgaagttttcctcattatttgctttgttcgcgccatcactttatgtttgggtagtgactttagttcagttttatgtcgagcaacagttacaacaaccttggcaacagaggttctcttagtggttggggctagatacccttcgcgcaaagtatcaacgacaccagattggactctttatgtccttttaacatgcaagtggtgcctccaacctttctgtatttcccagataaaatgcttgtttccttcgccacttatttggttggggtaccaatgatgctgcacctcagactctaatgatggtatatgctcactactcacttcccagtcttcaaagctataattcgagagactgtcactagacaaagatgaacttacacggagtcgagggtggtctttgtacaaaagttgaagcaagtcctagtcaatgtggtgatttcctccccaaaaatcactagggttcatctacaaaggtgggagacaagaaaataagatttggtcaaaggaagagaagagaaatagactttatatactgaccagaccagattaaggataaaaggaaagggtttcactcaaatttggaatttaatcccaaaagttcaaaacttcagatggtacctggtaatttttagaatctcatgaacgagtgggaatgaatgatttcaggtcaaaatcgagatgcagtcaaagaattagaagttatagttaaatgttgattaaagttccaagccctagaactatctattctacaattagttcaagaatagataaagttcatggcaagaaatccggaaaaataatgcagacattcatttgcaattgtctaaaagtaaaggtataagtgacttactcgctgttcgaagctttctcgatctgctcggaagatagcgtcagtggattttccagtaagttctttgaagatttaagagaaaatttggacaataatttttgctctggttttctgagaataaaaatggctaagagaattctcaaaagctttaatcctcttttataagcacctaaaaaaggaatataattcatttaaaatttgaatatttgggtttccccccaaaagtaaatgttagtactcattacaagtagtacagccgtcacgcatgcagtatcatttagtaattagtgtgtgattcaaggtacaaattttaagaggcttttaatgcttagacaccaaagagactttcaatcaaattcatgttagatcaatctcaaccgtcaagacatgcgtcacccatctagacaagattcttgaccaaatgtagtccacgtgcgaccaagaaaatcccgcacaaacttgggggaaaatattatcctatttctttcactatgatgtggtaattagctggatgatatgtgtctaacaattcctacctgggtggaaggttatactcctagcagtttccaaggattgatagaaaggtccatgttatctgtacttagcaagatgtttgagcagagtcaccaagggacatctgaccaagatcgattttgtgatcaactcgcatgcaccaaccataaaatgtgaattagtattttcataaagggacatcgttgctttcaagcttgcattacacaaaaataatccttatattcatggaattaattcaaagaataaaggcaataagcctaggtttcccattctttacattgtaactatagaattaaattagtttcctattttgtttattatagattaagggataccattcctcatgtaatgagcccctataaatagtagtttgatctcactattcaggcgacacaaagttgattcagaaagaacacttaagagagaaagagtgatttaagagagaattactttattctttgtctcataagtcaatacaacctaaattggagtaggctattaccatcatcacgaggccgaacctctagaaattttggtactctctgattatactattttttgctttttgttatttattttatctaatcgctttattttgactcactgtcgttggctagaagcgagatcaacaagtatatatttagatctatggtgatctaaattaaattttgagaaagatttattcccagccactgaaaataatttatcttattattctaataaataaatgacctaaacctatacctattgtttgcctatataaaaaaagagaagaagctagaaaaatgcatatgtctcatcttctctcttctctttctcttaacatttcaaaatatgctatgcattatggaattcaaaatttttcatgcctcttcctcaacgatattagccatatacatgtccttagtgagttgagaaacaacctattctagtcatgagtgataccgagaaaactatggaagactgtgatgaacataatcgaaggaggagaagatccaagttcagttcttggtaatactctacgatagaaaggaacaagggttagtgaactgaacaaaaagagacatttaatttttttgcaatcactgtaaggttttcttaaacttttatatgtttaatttaaactgttttaaggttccatgtttagaatgttagattggtaacacacttgtttagtaaaagtaagatcctggttaaatatgctttccaacaactgacttccgagccagggtaatcttttaatattcatgataaattggataaaaataattttgcttgtgtgtttttacatgcttatgaaattaggatgttacatgttaagtgggttatgtattatatgaaagattaattaattacaaattttctatacaaaataatttgtttttacgtatggaattattttattctgaaaatttaggaaaaattatgtaaatttgttcattacggatcttaattttgataaaaattgagaaaattatgaatttttgaaaattagaaaccttggcttccacacactcgggtgacagccaagtgcatgcgcacggatgcaagtatgaatgctcaattttcttggccattttgatggtgtgggcatgcgaaaccaggtgcatgctgagttgctcggtccttgcacattggtttcctttttttttctgtttcctattttgtatttgccatatcttttgattagaaagtccaaaataagtgattcaaaagcctaaatttattaattttttgatcactttctatttttaaagtcaaaattactaaaattagaataaatttacttttatttattaaaagataaatttaggatatttttgacttaagaattaaatgagatattttaaatatgattagatttgattttatttttaatattaaatgataagatcaaatattttaaatatgtgatattttaaagtttaaaattttcttttaaactttaaaattatcttattagatatttatattaaaagagataaaatctataattcaaacctagatattttaaaataagtcactataaactttgatatcttatttaaaattttaagatttagaaaatgataaatatatatttttttccaaaaaatatgatatttcatcatt

SEQ ID NO: 184831 - DNA, 5163 bp, Cannabis indica
ttcatgagattttagatttccaaccataggcattgagagggcagctttaacatgtccatttgcgtctcttaggattacacatatacctgtaatgtgtgaagaaacgtcaacaacagcatctgtgttgagtttaaatgcgcaagccgctggtggacgccagggaatagaagcaggtggccgagtgtgagattgctgctggtgagaggttgctggtgtggctgttgcagagcctgaactaacagcagcagcattgtgttgggctgctctaaagttttgaagaaaagccgtggcaaagacagccaagttcttcgcacgccgtgcattcttcccatggatgacattgtttcgctcagtccatatcgcccacattgtacaaaggagttgttccatttcaactttattgtaaatggaggataaatatgtcacataatctccatttttcatgtttgtagcagcagaccagttaaaactcaaattcaaagatctccaaacagccttggcatacttacaactgaaaagagcatgccccgttgattcccatgcctgtttgcaaatggagcaagtggaattcgtgatgatctttcgtcgaacaaacgaggtagcaacgggcagagcatcatgtatagcacgccaagcaaagatcttcaccttctgagggacttgaagagaccaaaatagcttccaccaagcaactgctagactagaaggggaactaaggtcttcatcctctaatgaagtggcaaggtggtaagcactttggaccgtgaagtttcccgaagagtgatggtgccatatgagtttatctgtagtgggaaagtaactcagcggtaatgtgagaatcttttctacatcaataggactaaagtattgttgtagcaagggagtgttccattgtctttcatcagtaataagattctctaccacaccattggaaggaccagagtatgtcataggcaaaaaagttgtatgtccaggaatccacggatcaaaaccacttctaattgatctaccctcaccaatcttccaccttaaaccatgaatcaacagctcacgaccccagcggattccttgccatgtgagggaaggagaatgacccatactagcttctaagaaagagttgttaggaaatacttgctcttgagaagtgtagcaaggagtgaggttggattgtcaactagccgccaagcttgtttggctaggagagcttgattaaattgtatgaaggatcgaaagcccattccaccttctcctttagttttgcaaagtaaattccaagaacgccagtgaattttggagccattttcattcattccccaccagaagttggacatcatgctctcaagttgattgcaaaagtaaactggcaaacgaaaacaactcatagcatatgttgggattgattgaacaaccgctttcaaaagaacttcacggcctccagcagagaagagtttttcattccaagattgcatgagtttccaaatccgctccttaatgttgctaaaaagttcctttttatctctccccgagtaagacggtagtcccagatatcgttcatgacattcactgattggcattgagagatgtcgatgaaagaaaacttgggcagccaaggtggtgttgggggagaaggacataacagatttgtcccggttgattaattggcctgatgctcgatgataaatgtccaaaacccgctttatagctagacaggagctttcatcagcttgacaaaaaaggaggctatcatcagcgaagagcaagtgtgaaatcatgggggctcgcctagtgagtttaaaaccatgtaaattgcccagatcttgctcatgttgcaacaatcttgataaaccttcagcgcatatcaaaaacaagtaaggagataaagggcagccttggcgcaaacctcttgttggtgtcaaagaacccgtgacttcaccattaacaaggaaggagaatctatttgtagtgaggcaactcatgataatcttgacccaactaggagcaaaacccatttttttcatgacttcttcaatgaatttccattcaactctatcaaaagctttactcatgtccagtttaagagaagcaatgccatgtctcccagcagtctgttttttatagcatgcaccagttcaaaagccactaggatgttgtcaatgatcaatctattagccaagaatgcgctttgcatttcagaaataatcaaaggaagaacttctttgaatcgcgcgacaatcattttggttaccaatttggaaatgacattgcagagactaataggccgaaagtccttcatgtgatgaggcttcttgattttgggaatgagtgtgatcagagtgtgattgaagcttgtggggtcagcaccatgattgagtatgttaagtatggcacgtgatacaaggtctccaacaattgaccaatattgttggtaaaacatggccgacattccgtcaattccctggcttttatccgaactcaaagattttagagcactatccacttcggctgttgtgaatggagcaaggagagcatcattgtgagcatttgtaaccaaggtgggaatacaatcaagtgtatgagcaagggcacactcatcaaggtcactagccgtgaaaagatcagcataaaaatcttgaacaatagctgatatgtcagtagtggaaaaagccttgccgccaacactgttgtagagaaattttatgtgattgttggttcgtcttgcactcgcttttgtgcggaaaaatttagtgttttaatctccacaagcaagccaatcaacacgagattgttgttgtcagtacacctccttgttccaacaactcatcaaggatggattcagcattctttaattcatcaaaatggctgctgctttggttgaaggaattattgagctgttcaactctagattgacattctttaatgttcttcttcatctttccatatttatggtcatgccaaagttggagtttaccagcacaagtgtttaaattggagatgacagcagcaatagggtcattgctatcgtgttgtaaccaattttcagcaattatactcttgctgtcaggatcagacagccataacttctcatacctgaagcacttttcctttttttgctggtggtttgagtggacagcaggctgatggtggcactaatggcacgatggttcgattggaaatagtcaagatgatgcacttgagggctctcaaagaaagaatcccaatggttgttgataaagcaccaatctagacgctccttaagagtgttagttgttgcccgatgctgtccaagtaaagggatcaccatcaacgggagtttcagaaagacagcctttgtcaattgctttgcgaaacgcatccatttgggattcagatctaagagcaccaccagatttattactattcgaaagaatttcattgaagtcaccaataacaaaccaagggagatgaggagcaacatccgcaagtctttccaataaagtccaagaagcttgtctattgtgaacttctggggcaccatagaaacaagttaaatgaaccgtggggctattttctatcgtcatgtagcagtcaaaaaaagtggaacccatgtgtacaaagaaatctctacttcatccttccatagtaacaagagtccaccacttaacccagagcgaggagattccaaaccattcggaaagcgaagagattgccgcacacgagaaacagaattgtcaggcagtttttttccataagaaacaaaatatggggagattgttgttagacaagcaatcgcaagtgtttgaacgcactcgagttccccaaacctcgtgcattccagcttataattttcatgatgagttgcggggttgccatgcaacctccgcagccgagtcattggagaaattagaatcctcggtagcagaaactaaaatctcaggatcatcgtctcgtgacaagggagatgatgatgctccttgggtgttacgacatcgcttcaaaaatttcctcatagaaagtgaatcattttgtctcttaaaggtgctggtgggtggcaggttttcctttccaatggaaacaatggctgttgggtttgttgcataatgttgaagtgggatatgtgatgtgggagggcggtattggtgtaaacatcattggtttgtggtgatggcgggtaagtggcaaaggtatgactatggacagcgggcatataaatgtgtgaaaggtcagcaattgactcacttggagattgaatggcagctggtggggatgaaagagatggtgtagaatgtggaagactgctggtatgtgaagaaagttgctggtttatgttgctgtagtgagaaaaggaggcctgtgaaatgctcgggttgctgtagtagactcctttgagtttattttttgaattaaaagtttggggtagggtcgggtggtctaagatgtgttcagaagagtccataacttgcttgtctttggcatttctggtggtctgattagaagggctggggagtgtgttaagttgttggtttatttgtgtgttggagctatgtgtgttggtgagtgggtatagtatggaagcaggggaattggtggactggttgttggtagtgttcataatacttcaacaaggtgaatgcattgaaggtggctgtaaaagatgattgctattgaggttggatgttggagcagagaaagaaggcaagtgggaatgttggaaaggcataggaagtggatgttgagaggattctccttcaaagagtgtttggggagggggttggcttcgatttttcagggatggtaaagcggtagtgagagtagttcgagccaaccgagtaatgagtggccatgcatttcctttggcaaaatcagtccggtatcgatcataattatgggtagggagtttagcaccttttaaccacggcccatattgaaaatcatcatcgttgccgctatccattcgttctataaaagcaacacaacgctcaaaaggatgtcctaaacaaccgcattcaaaacagaattccgggagcctttcatagcgaaagtctacccaaaactcatcttttatccttggcagccgaatcatttgacctctaagcaatggttttttcatacaaagtttcacatgcactctcaagaaagggccccaaccttcattggtagaatgatcaaatacttcaagaaactcac

SEQ ID NO: 184832 - DNA, 967 bp, Cannabis indica
ttctcagcagccatgttgtacttcatctacatttcactatctaaggcatctccttccccacaagaatatgcatttatgtgcagctttggagcatttcattggataccttacgccatcactgcatacgccaccatgtttacatctctctcattcaacttctacgaattttcgctcatcacagccattgtttacttagctcatggccttatactcagcttgtgcacttctgctttgactcatttcttatcttcaacaaaaaacacagaggaggatcatttcaggtcatggctttgtaggcgtatcagaatttcgtgtcaccttagatttgccaagctcttatctggaacagaagctttctgtatatacttgcgccttttaggtgcaaagattgggaagtattgctctatcagggctatcaacccagtttctgacccgaaaatgatttctgttggtgatggcgttcatcttggtgacttcagccggatcatatctggattttactcctccaacgggtttactagtgggagaattgagatgcaggctaattctgtcgttgggagtcaaagcgtagttcttcctggttcggtaattcagaatgatgttattcttggagcactttcggttgctcctatgaactcggtgcttcaaaggggcggtgtttatgttggttctcgaaatccaatcatgattaagaacaccatgcactctttggacgaaagaattgaagagatggacttaaaatacaagaaaatagttggaaatcttgctgctaacttggctgcaacaactctcaaagtgaaatcgagatatttccatcgaattggtgttagtggaaaagggttcttgaagatttatgacaacatcaaagattggccagaccacaaaatcttcagcctgggaaaaagctaccctgttatagttagacacagtaatagcttgagtgcagacgatgatgctagaattgatg

SEQ ID NO: 184833 - DNA, 5157 bp, Cannabis indica
ccaccaaaagtccctcaccaaactatctattcaaaagtataatttagtacatatcatattcagcttccctccctcccttcatttctctcctgacatagattactgtgatccatacttcaaattaaacctatcggagcgtatcatattataaatgcaaaataataacaaaaataagatattataaatgggaacaaaatatatattataaaaaaattctcatggaataaattgcattttctaatttctgtatcacgagaatgtattacagtttatttgcctgagatttatttatccctgtaagcgaagaagttacaagttggtaacaatctataccatatatattgggttttcttcccatttatgtttttattctttcttcaatgtaaaacaattatgaaactgaatcaactcattgccgcaaacagatttatcagcgttcagcattatagctccaggacgctcttacctgcatgcacaacaaaagttcaaactccagttaacacaacgttgcaagaaattcgaaaatttattctaataaaagtaaaaaagaaatatgaccaaatattattttcatgcgattgaaatggcaaattaatgaaatttgaaagaaaaaaaacgaaaagtaaagttcctcaccttgattgagcagagggataactcgaaaatgaaagtcaacaaatcaagagaaaaatcagctatatatattttgaaggatttactgcagactattccggaaaaaacggattccctgttccacatacataaatgagatagagaacgtaagtggcaagactaaattgaattcaaagctatgattatgaaggaatgggaaagactagattgatgattgtacctgcaaggcaaaaacgatgtctgcttcatctacttttagagtcactcttttgaatttctcttctcgagattgaccaatcttgagtagccccttcagtaagtaaatacaatgattcaatataactcattttctcattttataaggccagtaacgtaagtacacaatccatgttcattacctgatcattaagcaccctgcacatacttgaaagctcaaaaatccccacggctggaattaatgctgatttgcagaagtccgtgtaagatttattcaactgcatacgcattaaatgagttcagaaaactgtagtgtgtttgataaatgtttgcccacaaataaatgatgattaagaaacgcacctccccgactgttgaatccttctttcctccccggaaaagcttcacggctgagcataatatgatctgcggttaaaacaaaacaatagaaaatacatcaacatttgaatgaagtgagcaggatttatagacactctaagcttcgcagcataggtatcaaaggagaataataagaatgttcaaacacaaattctgagatattttttaaagcaaaattacctgttgatgttgtggaagagactgtatggtgtccaccacaggtgacttgaatgtctttgataaagcaagagccatatgatcgatccttacctgtatccataaattgttaggacttcaaataagaatgaaaacacagttaaaggcaactagtgaacactcacgacatcaatttctggctttttaacacagtcagcttgtggtaatatctgctgctcaaataatgtttcctcgcttgatgaattcaagtggttgaaagattctcttaactctgcgtctagcatttcaattgcactcctgaaatgtatatcaaaagagttaaactgcagtctagactactataaactttgatccaacacacaattttctgttttctttataaaaagcacacattttactaatgaagtacattgtgacaataaagtgctgaaatgttttaaatttaatgagtacagatgtccagcttcgtagatgaagcaattattaaaaaaaaaaacttactgacctgcaaacacaaagagctttccgcatatcaccagatgcagcagctactttctgtcattttaacatatttccaattagcaactttacaataaaaattatagcttcaaaatcacaactgaaaaatgacttaatggaaatagcacccccaaaaaaaaaatcaaaacatgtcttaaatagaacacactaggcctgaattcaactttcgattaattacccttttgatattttcctctatctaatgtagtatagtaccaggtggcaaatcgagtgacacttgacaaaagagtttgcaatgcagcatacactaacaaagactatgcatatgaaaaacaaggaaacagtaaataagcttgcatcgaattgagtttagtctgattttcccataattcaccaaatcttgatatatatgcattttcttgttacattaagaactcaaaaccaagtaacaaacagatgtttacactgtttcttggaaagatgtcaatcattgatagaagactactaattacattgctgatatattattcagataaaatgttgttagtagtttaatgtgaagatattaagctacaatatataaaagatttatcctgttgaacttaccctggcacaaagttccaatgcttgtggttgaaatacagtgtaaggtagtgcctgatagaataaaataacaagtagtaactaattagcaataaaaactacataataattaataagacagcacctaatttcttgaagccattcaaaggttgcgattgtaaggaaaatgtacatttatttaaattgataatgataaactatgaatttagaatgtacaaacactagagcatagttcaacaaaataacttaccattaggcgctcttgaagaattttaatgatttgatccttggagtacgctcgaaaggtaatcaccataggcttgcctggaacaacaaagtgattaatacttcagtcaatattacgtccaaccacatggcttattacacattcatattcacataggattgaatgggacagctgttaaatgcaggacaatgcattaagaacaagcaaatataataaagactcaaacattcaagcaaaatgtcaggccaagaagaaatgtgtccagggaaagtgataggcagactacaaatggaaaatatgcctcaataaaccaattcaacagttttctgaaacgctgtaatctatggatataaagtgaaagttaaggctaaaattataagaaagtagcaacctcttagcagaagaggtattcaataactggttggagaaaaacaaaataaaataaaagaaaaggacattgaactcacaattcaatgactggagcctgggaagaaaacgatcagcaaggtcaatggcattagctattcctgtataaagtaacacattgtgagcaagagaaaatcagagaagtccataattgattctactaagtctcattcaagtaaagaattactgcccatatttcatagacatagtacctataagtacacatctcgagaatggtagtgtagtaagcatgaaaagatcatggagtaccgccctgtccttagtaattagatagtctaattcatcagcaattattaacctgacaaaacaaatagacactacaaattgaagcattctcttggcaattcaaattattgagacaaaagaaggacaaactaaacatgtcatgtacattttaatcccaatttttacaagactaggaagaaaaacttacatcattttcttgccagctgaatttggtttcttagagtaggaattctggagaagttgcaatgctgatgtagagtttctacttttcttttgtggttgatgatctttacccagtatctgctaagcaaaagaccaattaagcatatgcttttgttggataaacaatgaaaaatttcttcaaccatcagtaccttattgaaaacatcgctagtatttgtaagagaggtacaatttattgctaatacatctggctcttctagccctgtctgttaaccagaaaaaaaaaatagaaatctattacttgaattgttcagtaaataaccagaagaaatgatgatttaactataacaggccaaaaaccgcacctctcgtgcccattcagctaattgcttctttactttctccatagacaacgattttccagtccctggacatccacatacatataaactaccagccttttcttcttccatgcacgatttacagaactccaaaaccctcttttgctcatcttctctacacactacaacagaaggcgcagtcgaaacgtgcaatgcctcctttaccgccctagattgctcaggatctaaaattttccaatcaaagacatctattaaatctaaccatataaatgatccacaatgcaatacaattcatacttacaatcaagcttaatttacctctggggttccaattaggtttcaccataaacaaattcttcactacaggtttctgcaacttcaaacggcgttcacacaatgtactctcaacatcctgaataattcaagaaacaataataataaacgactaagaagaaaacaataaacggtaatcaatcggtcaatctgaagtcaaatgaatcggaaactcacaatcgatgggctattgggacttgcattgacggatcggcgaggcgaggtccatttcatgggggttgagactggactggcacgcatcggcgacgaatcagatctgagcttacgcttctgaggagtggagtggccaccggcgaccttctccgacgggaggttcatgaattccatcggagtagacgtaggagaaggcttccgtttggcaatagcaggcatggccgagaagggataagcgagctgagctgtgaggaggctttggatttggttgagttgcggcgattgcgtgagccgagaaaaaaatagtaaagaaaaaactgtaaaagaggttagtagagaggtgaatattttataggatgttgtttgggcgggaaattattaccatgaaatttcatttggcgcgatttaaaactagtggagctttatagtttgggcgggaggtttataaggtttatgttagaagtgtgttgttgactggagcttaactatggacagagggactgtggaccccactttgtagctttaatttcgtttacaagtgtcaatacgggctctctttgacatgtcatcattacattagaaaaacgctgacatggcgaggacaatgtgtgaatgtgttggttttttttttttttt

SEQ ID NO: 184834 - DNA, 4211 bp, Cannabis indica
tgattttatttcattgttataattattttataataaaaaactagctaattactaataaggtattttagcgtgattataattactttgcaactaattgtgatcaaattttcaaattttatctttagaatttaatttaggatttttttttacacttcaaaataatttttatttttgtatttttacaaaaattcacaaaaatagtctatatagaaactaacaaaaataacttaaaaccacaattaaaatacacataacaatttacataaaactaactagagcaactactagagcaactcaatctgtaaaattaaaaaaaaaaaaaaaatcaaataatgatatataaagtaattcacttttaatttcttgtggatacttaacaggtacgtacatgccgtacggactactgtcgacatattccttgcaaaattaaattatttttacactagcaatttagttttagaaacaaaagaaatcgatcactttatttaacacacaacatacataaattaaatgataatctggatatttgagttttctcttcaaccggagctttagtcacgggtaataagaaggtaccataaatatatgatggagctatatgtactccataattgaaagcgatgtagtggacattgacgtatataatatagaatggaaaagctgctggaatccttaatatccttttctcttattttcatacaataatctataactatataaaaaagagaatgggccacgggaatgccaatagttatatggattgtgtgtttgaatgcttacccctatgatgggacatgaatatgttgtgtttgcattcgacaaaatctagaagacctttttcaatttgtttcttcttaactttattgaaatatacattgagtgaactgtatctaaagatgtaccttttatatgcgtatgggaatatataatatatcattccatataattgattggagaaacatcatatgtatatatatactacgtaggtatatggaatacatatcaatatacatattattagttattctcgaatttgtatcgtaactgttcgtcaaactatatagaaaatattataggtataattttaaatatatattaaaaatagtagtaaactagagtggtacacatcaaggaatttatattatttcttttgtcacaaagtgacaaattaattaatctgtaaattaagcatcatgaatatatagaaatatataaatttaaattaaacttcaatccaagaaaacataaaaaaaaggacatttatcattgatcataatgattgcataaatttaacacaaatactatgcttaaatttatttattatcacccacaaatcaaacaaagccataataaacgaaaggaaatgggagatttccacgtacaaattaaagactcacacaaacacacacactatttaaaaaccatcacgtgatacatgataggtaggattttaaacttaagaaaataatcataaaagcaataataataattattatatgtaaatatatatcaagtggatatatcatatggtgaagaaccaaaagggtaggtattaagagaaaaagaaagaagaaatcattgaatcattttggtacgtacgtaggtagtagtttattaggaacactggaatccacgtggggcatttctggagcaaacgttgagaagcaagctgagtgaaagtgggatgttgaggttgatacctagaatattagccctaatggcggtgcaaaggcacacggctgcttcaaggtcagcaaggccttggataagagtacagcaaggtgtcaccggaggagttccaatggtggcgttgatcaaccctccaagaacattagcgcaaatccctaacttaagggcatccctagggcatgttgctgtacttccattgccaccaccaccgccaccaccgccgccgccgccagtgccagggcttggagttccaccaccaccaccaccgccaccaccggtgccagggcttggagttccaccgccaccaccacctgagccgcctccacctgaaccgcctccacctgaacctcctccacctgaacctccaccaccacctctaccaccaccaccgccgccacctcttcccccaccaccacctcttccaccactaccacctctaccgccactgccaccactaccgccaccgccaccacggcatgaaccacaaccacttacaagagtaaagaaaagaatgtttagtgtgaggaatatggcaagtgaggcagaggaagttttggaacgacccatctttctctctgatctctcaaaacacaaaagtgtttggctagggtttagaggactgatgggatatatttgaatgttgggagtgatggggattttatagggagtcgagtcttagttgatcactctacctaaaaataaataaaaataaaaaatctaatgtataatacgaacaaataaataagtccaagtgtgggaagggaatcatgtgtgacctcttgggattttagctggcatgagaaaattaaagcaagttttttaggcaaattatttggatgtttatgagaaatagggactggcaaaatattgtcatgttcctctttttttagcaagatccatctcttggatctcattaattatttttctcaatgtttaattttgcaataatgtttacattattattactaaaccctactttggctacagttcccatccacatgacatgagctttgagagttggtctaattggattgaaataactaaatggaaaggaatggaaatgggccccaaataatcacatgttgtggaagtatttcaaagctattgcccccacactacatatatctacttctgtagaaaattgcaaaaacaaatcaagattatcattatcattcaaactttgatatcggttggattatgattattatatatttacatatatgtatatatgtatatatatatacatatatagagagagatgagtctgtatatgtgtgtctttaaagattaatatacagtaagaattcttataacaaggacatatatagtttcatttttttcacgggtttcactctagacaaattatatatttagtttgggaaagtttcttaataatgtacttgctatattgatcacttttttcaatagttaaggctccatggttattcaatcacttatatctttttcattgatttaaactttttttttcttctctagaattaattataagtttctttgtcatggtgaggtcaagttgatgttgaaaatattaatgtaatatgattaatttctaaaattttcttcttgttactagagtttttaaaatattcataaatttactaatgtttttagagttttcttagtatttactagtttgtttgagtactcttaaattttacagaattctccttcacttgtgttacatagtaggaattgtgcagaaaaatgtaaaagctaatcatttaataatatttatagaatagtccataaagtcatataaatagagatataatcccaccattttataccaagtcaaaaattacaaaagttgaattataaaatatagcctctaaaatattaaagtatctctaatactctttcttattttctaacaaagtggtatcagagtcaagtttttgtgaagaaaaatgacaagtggaggaatgatccccttccaaatttaaatgctcatcaagagcaactatgccaattggagtatcaagatgaaagcgctactaggagctcaaaatatgtgggatattgatgagaaatgtcataaggagcaaaacgatgttgctctttctcaaactcaatgagatgccttgagggattcgagaaagagtgacaaaaaaactacctatctcatttatcaagcggtgaatgaagatacattcgaaaaaatctcggatgcaactgcgaccaaagaaacatgggagaaggttcaaacttgcaacaaatgagtggagcaagtgaaaaagattcgtcttcaatctcatagaggtgagtttatttatggaagattttaaattcatttctgattattttgctatagcattattaattttcaatcagttaagaagatattgtgaagaaattagtgaagtaaaggttataaaaacgtattcatcgtgagtccaatctttgagtacattgctacaatcataaaatataatgaagatttagaatctatgacagttgagcaatttgtgagttctttacaaacctacaaggagaaacaaaaa

SEQ ID NO: 184835 - DNA, 10713 bp, Cannabis indica
ataatttttttgatttttttttctgaattttgtatgtaaaagtcgagcgagagagctggaagacatgcttagggttcttgatgaagatggatcggagttatcccctttagattcagagaaattactcgaggattgtgcactcgatttccaggtctggttgctatttaattttgttatttatatatacattatcttgtatttataatggaatggaatgggaaattgcagagaagaatggaggaattaggatcggagtggtcaaatgttggtttttcaacagataaagatatcggtaagctgaaatcttctttagaagaaaaatgttgctcttgaaatttaggacttgtttgtagctttgattttaagaaaaggaaaatagattccattttctctggattgaatcaataaattaagaattctatttttagaaaaattaaaacttataattttttgaaatttagaacaattacatatcaaattttatattattttttcatgggattttatgaaaatttatgctaaacattatctttcattttttttctaaattatttttttttatcaagaaataaaattctattaatcaaaccgaaccaattacaaacaaaggggcaaaccccaccaacacacttaaaactcctttacatttttgagtacagttctatctagactagactcctttacacatacaactccttcaaattagtttcccttcttaaattttttccatgttaatgttcaaggtccaaacaaagccgaaaactcattaaggtacaacaaacagttttgaactttacccgaaagtaaagtttaacaaaatttacaatatgcaaatcctttgattgtttgtgctaagtcacaactctatggctagctcgttgaggtgtttgaaataaatagcaaagaaatggaatcttcattttttctcttcttctcattattcctcaatttccctattgtctattgtgttatatgtattgggttgtgttttgtttttgataactgtgctgttttttcggaagatgaatgcttggaacacttgggaaaggagcttagctcagtggaggctgaaagcaccaagatttctcaagaaattgaaatgcttacaagaactcatgctgaaggtcaggagacacagtttatcatattgcactgatttacattattatctataaaagaaaagtatattgtgagttaaacatagttttgtctgtagactatagtcgaatggagattgaacttgaggggttgaaatgttcattggactctgctgcactacaggttggttcatcctttatgtattatgtgtataaatcatatggataaattgacttttcttgtcttcatagttgttacaatgttttgtttctttttcaaattaccaataatttaatttgtgtaattggaaaaagaaagtacatatgatttgtgtatgatttttgtaggatctcgagaaagtaaaattggcaaccagtgaaggccattcgacttcaacgaatgtttatggcagaaaaaaattagaggttatttttaaagaataaaattgtaaaccatatatacgtattttcttttggaaaattgcttagttgattatgtatctttgcttgctggaatttacttgtgtgcatggaaacatggctatttaaataaattattttcttgtcctaaatgtttgctcaatattatatcaaaatatgattattgttaatgaaaatcttcttccaatacatgaacacatttaatgtttatataatcatgaatagcggctcttttgttttattaaccattatgaaatatcttctgcaatacaatgcagctattggaacttgagaatcggatagaaaagaaaactaccatcttaaagactttagaggatctagattctgtatgcaaatggtaattctgcgctactgtaggctgacatttctcgtattttgtcatgtattcatatttagatcaatgcttaacctgtttgtgattgtaggtttgatgccacagagcaggttgaagatgcctttgttggtataaaagtcaccgcatttgatgaaaactgcattaggttgtcattgcagacatacattccaaaattagaaagctttttatctcaacaaaatattgaagctgtcgatgtgccactggaactgaagcatcagttgatgattgaagtcgttgaagggaccatggagccgaaaaacgttgaggtaagtgttcagttaagacatggaagagacacacaatttcattttagtgttaccaaaactcatgtcttacaggccaaaggactaaaacttagtttgtatgttgtatcttgtgttcttattagattaggtctactcctgaatcatatagtttgaatttttttttggtggtgaacttgttgaattaaataaacaagtaaaaaaaaagtgcttgtgttaagctacttaagtaattacttaaaatctgtgaagtggtattttctttgtatttatatatacatatattttacaaatgatgtgtttatctattttgttttgatttatgtttatctatgattgacaagagcactttataccatgtacttcttagcttgaatacttgaaatggatactaataatctgtctgatttccagatttttccaaatgatatatacataaatgatattctgaatgctgcaaagaatttcaggtttgtacttatattctttcaaactaattgcttccaagtgttctgttttatattcttgaaaaaataagttgatagttgaaagaagaagtttttacttttacttgattgctagacttattcactctatgaaaaagaaaatcatgtgtaatgtgctttgtgaaatgccttttgtagtcaatcttcattgcagtggtttgtatcaaaagtacaagacagaattgttttgtgcacgatgaggcaacttgtggtgaagagtgcaaataaatctcggtaagaactttactacacaattctctacataacttacaatcattccaaatatcatggcataattgcagtaaattattaaggtttgagtaagtattactatggtcaaccaagagttttaatagcaatgcaatttgtaagtagatactccttggaatacctggataaagatgagatgatattagctcacctggttgggggagttgatgcattgatcaaagtttctcaaggttggccagaatcaagctctccattaaagctgatatctctcaagagctctaacaatgacacaaaaggaatatcgttaagctttctatgtaaggttaaggtgggttgtactttacctttacctttctttcatgcatgtaaagttgtccttttgttttatgcatgtgggaattcatgaatttataaaaagatactcttaaaaaaattaatgttggagaaatccttttctcatatgaaattcttttcaatttaagttgcacatgtatgtgtgtagtgcaataaatctagttgtggctttgagattactctctaaccttaaaaacaactaagaattcatgaactataaatagttttgcagtagggtattatatatttctggattttattttcaaaaagagtaatgacttttgtgtagtctcaaaatggttttgtaataacttgatcactgacaatttcttttgggttcttgggttatttggttctgtttcatttaggaggcggcgaattcgctggcagcgcatgctcggcaaaatctgtcaagctttgtggatgctgttgagaaaatacttgttatacaaatgcagatagaacttgagtctgatgagaccccaaagagcaacccatgattctataatatgtcaccttaaacaattttattttgcactttagaagtcatatgtacttaatctgaaaagaaattcatggtctgtttgatttgtaaaactaagctacttgttttttacaaattattatattcttctattcctttataagtaattcagtgtccatttttccccctttaataaaggtttgttagtttcttgaccatttatttgctcttaattatctgctattcttacataatttatatccatccttttgagtatttaaagaggaattgagggaatgagtatcttccaagagggctcaatgatatggtggatcatatagctggctttggaattgttgaaagattcttttagaggatcagtgtgttatattaccccaggtatatagtttaattgaattgtttagatcagtgacatttaatttaaagcatgaatcttttgttttccattctaaaacttatgataatgacaactgttagctggcactgttgtcgtggatgaagccgtcgagaaggaggagctgcaccacaagcgccaaccgccggaggaagccgaagccgtcgcctgagagaggttgggatttgagaagaagaacaggtcagggaagggaggagaggtaacttattttattttttctcttttaaatttcagtataataagatgaggataatttagtaaaagcacactcttacaacttaaaaaaattctttttttttaataattcagaaattaaagaaaatatccagttatttgtggtatgcataattcatggtcccacccatcaccatctacaaaatattaaagaaaaaaagatagtagtagagaagagtacatattaatggagacattattatcatctaggattgttctatttggaaaacctttgttatcattatcaaattcaaattgttatatcaatgctggcaacaatttgaggagtttgaatttcaaatgtagagttaatggtaacaaaaacgatgttgatgatgattatgattatgatgctcctctttcctccattgactcagcttgtgctcttcttggactccatcccacctcttcaccttcccaaatcaaagcagcttttcgccacaaagtattttcttctccttttttattttaggaaaaatctataggacaaggacactctttcggtgtgttttctgtttattttgatatttaagaaagtttttttagtctaattttttcagaaaattcttaatactttaggttcaaatgtatatattaaatgagtgggaagttactctgatactataacttggattttctaaaaatttataggtgagtctaaataattttaatatatgatcatttatttttctaatttattactatatatattaggtgaagcagtttcatccagatgtgaatagaactgggcaaaattctgatgcaatgattcgacgcgttattcaagcttatgaggtaaaataatggccaattctagtaatgtctatacattactccaatggtaattggttgatgttgttgattaagaaaaataacatgattatgttatgcagatgttatccgattgcagtcgattggagattattgaaaggtaaattttttgaagtgggtggcagatgtataataactaaaccaatatgcagttgtaaactttttatgtttgtttgcagtgaatgtttagatccttttgagaagcctgaatgtgaagcattggatctctttgtgaatgggactctttgtgttgggaaaggtagttgattggttttctcattttctttccatttctttagctgaagtgttcatataattctctaaataaactttaggaaaataccccacactttagagtcagcattgtttatatcaaattataaacattcgtatcaactaaattatcaatttatcaacatgtttttctttttctcgaaaagagaagcgggccacttgtctttggagtacgttccttcattccccggggttttccctcgatccccctaccacggaaaacatcttcccaaacctcctatcggtcgtgtcctacacccgtagttcattcacttgttgaggagcatatctttttgaaaaagagtcattttgtcttagactgacccaccccgttattaatatagaccaaagcctcgtttgtggcggaaaaaaaccgtagttacaaaatttagtaaaacaacaaaactagagacaaccaaaacccaagaacaacaagcaaaaaacaatgcttagctgattggaaaaacagacatgagaagtccacttgttgaggaacttatcgttcgtgcactacacccgtaatccactcacttgtttctttgctttcactctaattataggtttaggttcttaggttctgcggaggaggaacaccggggtaaatctacaaaagataactcctcaaaatgctagtcttaaatactggttcatcaaattataacttggttttatcaatttaaaagaagtatgatcttcctgttttgataatcgttccttgaatcatattgcagggtgcccatattcatgtgtaacaagagcccctcatgccttcacatttgcatctactggaacagcaactgcaacttctcaaggtttcttcagttcccttctcagttccttctgtttatttataactgctactctttttagaagattatatagttttttaaaaaaaatcaaaatttagaatgaatatgaatttaaaattcaaagcaaagaacattttcccccattaaaagatcaaaaactgactactattttttgtaatttcgaaatgccattttcgaattttgagagcccagatttcttctcatgtcatgaaaatgaataatttgtgaactccaacactgatataaaaacccatatcactaaaacatttgagacaaaccagtaatccattaaaaatatataacagaatagtatttaggtattcaaatacaacaacaaccataattaacatataaacctacacatgaaatcaaattgactgattaacttcaaaagaaaacgtaatcactctcaccccattactgttccaaaatcaggacacggtgaagattaccaagctcagcttgctgttggtcagtgcccgagaagttgtattcattacgttacaccttcccagagaattatcctagaggagttacttgacaggtaatcgtatcttccccgcttattatccgttaatacaatctagtttctcagcacgaaaacttgctaattcagatttctgcagttgctagctcatggagtgtttttcgaccttatttttctttatttttgtgtgtgattttgtagcatcatgaacatgccttatgattgttcagctgaagcagatttactgtacggtcttatagttaaatcaaaatatgagaacaatagataccaaaagccaaagaagcaagccaaagtttcaacagaaaatgtggattggttttgagttcattcctgccttggttttaaaaaataagcctgtatatttatatatatacatatatacatagagaaagttgaatactttgcctaatcttactgttccatttgtgaatatttgattacaataagaatgtaaagatgtatattgaataaatgaatggatgtcaccattacttgtgtaattaacttttggcaagtaaagtattaaaatcttatttttcttgggattattggtaaaagtgagacactgccctcaaatttgtttggagctttttacagcatttacttattattatatataatatattatgtaatataatgaacactgttgttatttggcaaaagaaatctaacaactgggcttgtgcaacacaaattatctatatgactatacaatggtagatacatcttcttatcttagtacagaatgttgagagaacaaacataaatatggcaaaataagcttatttcgaaatgacccaaagattgataggagtttcctattatttttggtacgaacagtagcaaaatagagccaaacaacagttatattgatattagaatgataaagagaacaaatttgctcgatattcgagagacccagctctgtcacaagagctaatactctcatatataagacccttttttatttaacctaaggcctaatgcacagctctatcaaaaagagattgatcctactctgaattttcttgtacatctccaaatatcagctcaaagcaatcatagtcattatcttatcttgaatagaatagagtttgacattcactattaaaccaacaattattgatactgtttggtttgttgtatttggatatactcaaacatatgatgtttcattttgattaacgatataattgtcatccttcgaacaatttaagcttccctaaagaatttaacaatattggacactgtaaacggcataagtattcaaagttttgaatttgtaagcgcatacacctaatgattttttttatggtgtaagtactcaatgtttgtaaaattgtagttttcgtctagttctgtcaatacagactatgttagtatatttgtagccaaacttagtttttaaatgagttgaaaaaaaatttggaagtaatttatacatcacgttttcatccagattaagacaataatacaatttgtactaacgaaaactacaattttattaaaattgagtctatgccgtttacaaactcgaaaattttgagtagttatgccaaaaatttccttaacaataattaaaaaaacatcattagataaaatgagaagatgttaactttattgattcaattcaaacatgaaaaaagtataatcatttttttattattcttttttttttcctcttaaaatctaaggtccaaacaaggccttaaggaagaagaatttctagtaaaagacatagacaaattggaaactcctagtttgaatattcattcaactgaaataatgtccaatcaaatataagaaaagaaaaaggaaaagaagttcatactatgctatctgaactagtaaattgggaaaaattattcatattagataatatggtttacatgaaaaatgcataaaataaattttcttggtccttattagagacaattcatactgaacagattgtacaacattatctaaatgtaaagtacaaatatatagatatagatataagaatccatataacaatcagctgaccttttctacttctctaatgcaaactttcttgcacacttgagcaaatcattgtcctggacaatgcctatcatccatcgacgataaactggtcatcttgattttctgcctcgaccctagcatcgtcgtgaaccaagctgttcacatggtgcaaattctgcatcatttgtgaaaggtaatgattgctggcgctcgtatgatcagagagtgcagccggatgagtagtccactgagacactatcccgagtaattgactggtaaggctttgctgctcatgaagaattcgagtctgcatttgccccatttcggctcggtgttgactcaacatctcatcaatccttgtcttccattccaatctcctcctattcatcctctcctcccattccctttcatgtatcaactcctcttctcttcttctcctttccctctcttcactctccttttccataacttccaactcttgaatcctctgcatacgcaacttctcccaacatttctccttctcatccttcttcttttccctctcaatccatctttgttcccattctcgctcacgttccatcctaagactctccctcctttgcctttcccgttccctttccacttcccgatgctcaaacctattctcggtttccctcaacttccccaactggcttcccaaaagcccccaagtcttcctccccatcatccctttcaacacctttttcttccttttctttttactcatcaaattgttaccattttgctccatttcttcatacacaaaaccatcatcaccatcctcccgaacccgactattcccattataattatcctctccctcttcaccatcatactcaaaacccaaactcatgaccccattctcaatccctcctccaaaatccccatcaccagaatgacccatttgcccaaactccacaagcccaacaaaacctccaccattctcaccttctccattcacaacacccattaaatcattaccaccattactagacataacaaccccaacatcaccaaaaacctctttatatctcaagaaatttgaccaatgtgaaagcccctcaacccaatcaaactcctcttcaccaccacttgaattattattattattattattattattattattattacactcaagtggttgtttcttaatcttctgcttaaccaacaaatactgatgcctcatattctgaaccttagtactaacatctttccaagaccattgccatggatgagcaataggatcttgaacattatgaattgagttcacataacaagcaataggcttaaatttcttctccctagttttcatcttagctaaactcccatcacagaccatttcaccatacttatcaatcaaagttctctcctcagcctcagtccatttttttcttctaccgggcatcattgaaaatcacttaaataaaaataaaaattcaatctttatcttttttttctcttaagaatcaatgacccaattgaattgcatcgaaaattttcctaaaaactcaaatacccaattgcttaaacaccaagaagatactaaatttaaaatacccagatgaagaaaagtttcagaattgatcagaaaaagcaataattgaaagggttcttacctagaaccggagaattttgagaataacccagaaatggaaattgatgagaaaagggattgatctgaaacaagtgaagtatagaagaagtggattaagagtgaaagttccagagtagagtagttagaagttggagaatgaactttagttaacagtttttttttttttt

SEQ ID NO: 184836 - DNA, 835 bp, Cannabis indica
ttacaaattgggaggactcacctgagaaaatgatgatggacatgatgtctaatcccaatgcagttcgtcgagaagaacggtaagtttgaggctaaagaatttacttgaagagtgatatatgtacactttttcttaagcaaagagtgacatgttatgttatttacagatgaataagtccttttttgtccattgccaagctttttccacaaatttggttattggattggctttcagtctcatgtttatgtataatgtatgtacatgacgtatacaattgacttatgtcagtaagttaatattgtaaaataaaataataaaaaggttcaatcttttttttttttgctgagaaataaaaaagtttaatcttgtatagtgatataagattatttgagaaaaaggagagattatttcaatattttgcttattatccagcattttttaaaagaaaaagaattattattattgatatagagtaatttacgctagtgagtttttgtataattttcatatgaagcaacaatcttctattttacattactaatctcataccaaatgcaaaaatatgaacataaaatttgacaataaatacttcacattcgtagaaaaatgtctaaagaattaaatgaattcaagcaacacttacatttaaataaattaattaagaaaaagataattgtaaaataatattacaattgtacaaaatttgtcattgtcaaaagagtaagtatacaaaagagttggaagaaagtaaggagccatgcctaatcaaagggaataacttacacttagtgaagaatatgacaaaaaaaaaaggtaatttaggttgtaaatattt

SEQ ID NO: 184837 - DNA, 5564 bp, Cannabis indica
tttttgttctgatatgagtctgcaaagtaaattacaaaatattaaatcagcaaattaggccattaagagcaccaatggaagaccattaattaaatttacctctatcactcgtttaacgggtaatgctaatctgttttttaaacagaccaggattactactgcagctgcaactgttgagggcataaagtacatttgcatacggtctggtagcaatagggatgccaagtatttggccttcttctccacctcttcatcagctgttgcagcttttaagtagaacctgtaatagtttcaaaacagtttcagtaaaaagtacattaggaaaactctttgaaatggtattatatatgtattagtgtcaattgtaccataagaaattgtagatggtggggaggaaacaccggaagtcgagaacctcctgaactagccattccatggcaacaacttcgcatctgctgtatgtatcttttccaaatgagatacttttttgccgaacgctgaaatgttcaattcaatagagaaaacataagatggtgtttctcacatcagattaggcacacattttcattacagatagctttgtgttggagaatagggacaaaagaactccgattaaaaacaaaattaaacggggagctattcatgatataggtagttattaagtttcaaccatcggtgcaatcataagcctgaataaatttttgataaaattcagattgagagttgtatggttgctagatcctagtaagtgatacacaatacagaagctatcgtcatttactttaaagggtatcgaatagagaaattaccttttgtaaagtaatgttttatactgagtttatcttctttctctatgaaatagtctaagcaaaggatcattgcgaaattaaagagaagaaaagagaggattaatacctgttatagggctgattttcttccattctggttgccagagcaagacaagctataccaactatctgaaggatccttctgtttttaaagaaccctttgcttagaaatcgatcgagcaagcaaactcctaaaaacgctgtctcttgctgaagctctgtttcctggcagcgctggtttagcaaaaaaatttacaaaaataattctgaattagaacaaaattaagaattaaatcaaatacgaagtatataatagtttagttcaaataaataaatgggccaaactaacataacaaatattttctaaattttaataaatgttgaattaatattcgactgtttcgtggatcgaatttttcttttttcttctcataaggtctgttcaaattatatcattgtggtcctaaagataataattaatagcacacttttcggtgtatttattggaatttttaagttaaatgtgtacccttaaaaaaaacgcatacaattaatccacactcttctctcgacatgaggactgcactagtgactttttttaagagcgatgatgactctctcacgacacgaaagccacggacaacgtgatatttagccattattaatatttaaagtgctttattatctattttctatacatttgcttataacagaaaaattaaaattgagctagtaacgaacgactcactcacgcacgagtcacgttgaacagtgaaggtgtttagtgtctagtgtctactacgagatttacaatactccgtctacgtgcatatatatgacccctttcagtttcgtgtaagattgttcatgacaaatacttacgtggcattttcttattggacactacggtacttgtagaaaaacgtcactgtagagtatatttatcgctccaaccaattacagctctactcttacttccccccataaaccaacataatacatatgctcagctctcccaacagttttgggcactacgtcacgtcatggtgatttttcggttccctataattacaactaaattgaagtaatgaaatgaaaacgcgtttcaagagattgtaaaaaaaaaaaaactcaccctgataatccactggatcattttacgccgctggtggaggataagactgccgtactccgtcgtagaggaatattcctctatgtagtcacgcaaaaccacgcgcctcctttctctatttctcaacatctggtagctctcctcttcggcctcgtcttcgaatctcatgtactaattaaaaaatacaattaattaataattaaataatagaaaacaaaatataaaatcaattgttaattaattaattaaattggaaatccttacttcagactggtctatgtcctcttctaggtaggtcgaatcgagttcagtatcttgagcagatgttgatctgaaaaatccacctctgtactgaatgagtaatgcgaaagtaagcgaagaagctgaatcgccttctgatttctcagagaattcgcttccagaatcgaaattcgtcggagtgtaatcagagaaatcgaagtcggaagtgtcgaggaaaatctccgattgaagctcggagcatgcagtttcgtgagtagacgaaacttcagtatcggagtaattctcagcacaagcaaggtctgagctaatgccgaagctgatctccggcctctggtctatggtagattcagagttcgaaactgtaaaattgttatccaaacaatttctggaaacgcaacataactctaattcctgtgcgttgttgatatcttgcttcgtcttctcacctaaattaactccgaaacacgattccgaagctgaaatgcacgaaacaacttcattttcctttgaaacaataccatttccatcgccagaaacttgtttgatacaagaaactgaaatgacagccttagaatcttcttcttcctcctcatcttctcttcttccatcaaattcctccacaatttcattccccttccctctcttactcctcaacctcaaccttctatcttccaaaccttcattttcagcaccacaattccgattcgactcaacacaggagaattcagagacctccgaagcttcaacaccacaacacgatttcaccgcaagctcatcaaactctcgtttccgaagaatcgacttcctcttacaactctccgatccaaccgaaactcgactggattgacaagaaacctcaccatcaccattaccaaagtaagagcaagaactggaatccactgaaaacgaattagcaaaaaaccagaattcttacttcgattccagattagaacaggagatataagagttcttcttcgacgagggagttccgatcgaagcttcttcttcaccgattgcatcttactagatctgctgctggttttgattgaggtgagtttcgaaattagagagagagaaagtggtttcgaattcggtttgagagtaattagattgagatatttatagtgttatggagtttagtgtgggagtgagaaatggaacagagaaaatagggggagagtggtgaagcggtgtgtatgagttcgtgatgaaagcggttatggaagttgccatacgaaaaggcgtctggtcattggttgattttgtgtgggtcccactctcattctcacactactaatactacgtccgtacatacaaatggaaggaaattgaatatctctctcttggtgttgctctatgggcctttattgggccactgtcttagccggcccattagtgtttcttttggagaaatttacaaaagtactagaatttaagttaatttttataaaaatatttctacacagaattttttttaaaaatacaatctttctataaaataaaataacagtaaaatacaaaagagattaattaaaaataacaatagaacaaccaaagaaatttaaaacagtacacagtataaaaactaaatagtatttttgagaaaattccaaaaaaaaaagtaaaaatttcaaaaaaaaaagtaaaaatttcatgtgatattaattttttttttaagataaattttaaaattttttataatggagtctctaatagagctgtacggatgcaatctgttttgtcatattttagtttaattgtcaacaatagcaattcaaccatagaaatattagttgaattcatctttgttcttcaacatccttttaaatcgctttgaatgttgttgaagcactagagtttacttgcataaagtttgagagattatttggaatatacaagggaattaaatttaacagtagcatttctttttaagagtagcattaagcgaaaaaattaggaaaaatattacaaaaatacatcaacaccaattttgaaatctgaattcatattcctctttggacaaaaataatgtgtctcgattttgagctttaagtcttcttacatataactacatataattatttaggaaactttaataaaatatttaatcaatagataatgagatgagtagcttattttatagtattttatttttaaatattaataacgtgagactaactctaatacatctttctcacgtttgtgcctggaaagtgtgggtataacaaacgattttaaaaagaccaaatttttaggtgtacacgtcaagatatttgtggattattttgaaataagtaaaagacccaaacgctgaaaattggcacacattggtcgaaaggtacaacaaaagtttttaagtttggctcgtttttttttttttgaccgacgttattttcacaacgaattacaaatgactcttttatggcttgtgtttttgaacaacgacactttgggctcacaacgcatcacaagcgactctgataccattagataaagtgaaagtagctaagatgtaattatgatgcatgaggttccttctcaaaaccaattaactatgagaagaatagtttactaactctaatattgttctaatttttttcttttacttattgatatattagtatcgtataacatttttattaataataataattatatcaaatttaactattaaaagtaatttataagagaaaaattgatcaaatttatctcaatcattcatcatgttgaatgtaattaattaagtagccttgcttgtattacaagattgaagcctaatgatgcataaaacttttacttttgtaatgaactactttagtaggcataattgcatgtatatataatataagtataacacattgtttaaataccgcacacagttttgctgtgctacatatcgtcacaatatatattttatcatttcttcctctatctatgtatgcaaatagatattatataaacaaaaaaaaaataattaattattacttttcttgatttttattttggaaaagacaaattatatatataaataaaaatatattagtgaggtatcaaaaaactcatcaacatctatcaagtacatatactcaatgctaatccaaaaacaataacattttggatgatatataataactataatataaattttttaaatattttttttaatttacaatttaggtcactccggtaatttttatgtgaattttaattacgatttaggttgctctgttaattgttacttaaatttttataaaaataccaaaaaaaaaaactgcttataaaaatataaaaaaaaaactcactaaaataaaagagaaatatgc

SEQ ID NO: 184838 - DNA, 3760 bp, Cannabis indica
actctacagtgactcaagcgaattgtgtagcacctatgatagtgttggattggctctctctatgtggatgaaaacaatagtctagtagttgtatctgttgttcttagagacattattatttcaatgatgttgaatcctttttagttaatttataacaagttagttatctaaatttttaagaatattcctaatctatatttattggatggctatatgactacacatgaattagctatgcatactctttggatagataaataacttgtttgattagaaatttcttgtattatctttggaatgtttagttgttgtagttttattaagttgtatgacattggtttattatttcaataatatatttattatttttaaaaataataataataattatataagatccgatacttaattgtattaatagcgataaggagagtagtaaacattattagtgtcttttatcatttctttcaaagattactataaatatatcacatatatatcccaatttttacatgtctaagatgttataacttataacatgaatagaatagagaagctacaatgacattcaagcttgtcccattttgaatcctaagatgagagtttttggtctaaaaccattaacatataggagaagcaaatactttccaaaatttagcacaaaagtcaataaaagatgtatttgactcatttttttacaatagcagttgtgctccaatataataaaagacaaatatcactatttttaaattaaacagattttttgtttttaaattgatcagaatttacttccacgtcttataatttgaaatgaagaaacaaatgtcttttccaactctataaatatccatcaagctatcatctctttcgcctaacttgcacgtaaaaacagaaacaagagtagatatatgagagagaagtaaaaccaagaaaatattaattgacatttgtaaaagaaaaagacagagaaaactagggatccaaatccattataggaagatggtttttgatcagtatttgcttggtggagtcatagcttcattggcggggttcgtgttcttgtataattacagttacaggggaaagaagatcatgagtagtaccaaagaaaaatcaatggagttatatagtaatgggtttgtaaagacatcatcaaacggtgccgtttctccttctggtatcccaaaagaaggtacagatgtcatcatcgttggagctggagttgccggtgcagctcttgcttacacccttgccaaggtgagtccttttcttcaaaatcctttaattttttttcctattttatcgacaacaaagagaaatatacagagagtttgagtaatttttgaaagtagaatgatttttcaatgcagcttttcaaaatggtgttattttgaattttgataatttgcaaagtagctcttacgtcaagtaaattaaaactgaattgtatagaaatatgttatcttgccaaaaacctcgtgatgaggtttccttggtgtttgtggttatgctctgaaaattcactgtatatttttttcatggcaggatggaagaagagttcatgtgattgaaagggacttgaatgagccagatagaattgttggtgagctacttcaaccaggagggtatctaaaattgatcgagctgggtcttgaaggtatttaccaataacttaaaaactacctgtaacaaatataattactttcatttgctgatctgaatatctatctgtgtatttatgtgtgtttggtttattagattgtgtaaaagagatcgacgctcaaagtgtttttggctatgctctttacaaagatgggaaaagcaccaaactttcatatcccttagaaaaatttcattctgatgtggctggcagaagctttcacaatggaagattcatacaaagaatgcgtgaaaaggcttcatcactttctaagtattatctccttccttttctaaacaatttagttttgcttttgtttgttgttttcgaagcatgttatcatggttgatgatgttgtgtgcagtgtgagattggaacaaggaacagtaacttctcttcttgaggaaaagggaacaatcaaaggtgttcaatacagaaacaaggctggtcaagagttgacttctcatgctcccctaactatagtttgtgatggctgtttctcaaatctaagacgctctctttgcaagccacaggtaacctaaacaatactaattggcttttagattgtaagcataaataacttagttaagatttgattagtctaatactatacttactattggtgcaggttgatattccctcctgttttgttggtttggtgttagaaaactgtgatcttccttatgcaaatcatggccatgtgatcttggcagacccttccccaatcctgttttaccctataagcagcaccgaaattcggtgtctggttgatgtgcctggccaaaaagttccttctgtggctaatggtgaaatggctacttacttgaaaagtgcagtagctcctcaggtaactatgaccaacaaacatatctaatcatttactttcatgtatcaatgtgattttttggtactgaattttctgatgtaatcttagattcccccggagttgaatgcttctttcatagctgcaattgacaaaggaaacatcagaaccatgacaaacagaagcatgcctgcctctccatatcctactcctggcgcattgttgatgggagacgcattcaacatgcgccaccctttgaccggtgggggaatgaccgttgctctttcggacattgttgttttaaggaaccttctaaggccactccatgatctccatgactcatctgcactatgcaaataccttgaatccttttacactcttcgtaaggtaagcatcttagaacaaagtcctctgtccaaactagtgcatgagcacggaatgttagaatttgaatcaccttaatgcaagaacttagattaagcaagtccagaacataaatttcttgcaagttgctatcgatatcttaaagtcaaactccatgacatgttcctaatagcccatgaagaaatcaatgagaataagaacataatcagcagaagccttagctgaattcatgactggagtggactagagggtgatgatctaattatggatatttttattctgattttttcattaaattagattccatgagataagtaatacccaatagctcaatttctttgtaaatatccttaaaatgggctaaattggaaaacaccttacacttatatgcccacatattagattttacccaagatggaattctagtcatagaatacagattaactcagtgttgatggctttgtttgcagccagtggcatctaccataaacacattggctggtgctttgtacaaagtgttctgtgcttcccctgaccctgcaaggaaagagatgcgtgaagcttgttttgactatcttagcttggtggcatttgcacaaacggaccagtagctctgctctctggtctcaacccatgtccattaagcttggttctccatttttttgctgtcgctgtctttggtgtcggacgcttattaattccattcccttcgccacgaagaatgtggattggggccagactgatttcggtagtaaaaacactctgactcactctctcagactactaatctagaatctatttttccaagttgtataattgctaaggacaacgttccttcattcattgcagggtgcatcaggtataatttttccaattataaaggcagaaggagt

SEQ ID NO: 184839 - DNA, 1605 bp, Cannabis indica
cttgttattgtcaatcctcttcttcggagctcaatttggtttcagtaaatattgctcaactctttgtcttcattgatttttatgccgaaagacccgaagtagagatcctcaaatcaatagcaaaataaacatgtgagaacagagagaaattgaaaattgaaggaaactcaaaataggaaaatctgagaatttttattgaatgattaaaaagataagaatacactaagaaaataggcaaagctctttaattttcttttctatatattcttttagggctcgtttggtacgttatattaggtcgtattatattgtattgtattatattgaatttaattatatatcatatttttatatagtattatgttaaatacagcgtaccaaacgaacccttaaccttaagttcttcttatgaatcaaagctcaagttttgttctcttggtttttgtatagaatccgtatgtcagttcggttcaacaagctttctattacctggagaaggctgctgatcaggtgcattttacgatcgaatgtacaacattttatgatttctttctatgaatgaccgaaaaacttactatgtttctttgctatgtttagtttcatccaggtgccctttacctcctaggagctgtatatttgacaggagattgtgtaaacaaagatgtagactcagcactatggtgttttcataaggcatcagaaaaggtaagttgcttctcgaatttcagttaaatgacttgctaagttttattgtctagctttccgggagcatctctttcttatataagttacaacgttaacgttgcacccatagattggtttagcatgcccttaggatagacagtaaacttttatggatagaagaaatctcttcactttgccttccagctttttttctaacctatatcggttaccattaaaaaaaaaatgacttgttaatttcatttgaatgttcttaggatgatgagattgaatgcatgatgaaatcatatgacttgaatgtatgatgaaatcagatgttgtttcataatgttttctgttttgttcttggacccatttcgaagttgctcatattgaactgttaaagtttcgaaattggaaagaaagttttgaactttgtctaattaacacatcaaattcatatgagttggtacacatatgcagggacatgctggtgcagctatagcatatggctctcttcttctcaaaggtgttgaaataccggaatctatagcgaaattaaggtcacaaaaggcgtttttatacaaaagagcgagaaaagacgaagagatttgttcgactcatgatcgagtagagatggcgaaagaacagtttgagattgcagccagaggtggttgtgacttggggttaagatggttggacatacttgagaaggaagaaaagcaattgcttagtagataatgcattgcatatacaaatcctttttttgggttttctttgctatgatatatgactaaccaataatgttattcattacacacttgattggtatagagtattttcttatgagaaatttatataaatatttaactgttttttatggttattttttccatcatatttgtttattttgtttattgtttt

SEQ ID NO: 184840 - DNA, 2412 bp, Cannabis indica
tttctattaatcaaacaagccaattacatacaaatagagaacactccctcaaaactaattacaaatgcttacaaacacttagcatttctaagaacaatcccatccaaactagaaagcttcttatcttgaacaagactcaatctagttttgaggttctctttattgcttctatctgtatgcaatggagctaaacattttccctcaaatacacacaaatttcgatttagccaaatcacatagattgcacttgctagaatggcataggaaatttcaataaacaaaccgctcggccttttttcttgcagccagccaagaagtaattgaaatgaattaggtcaaagccactctcccaatcccttcttgatattttgcatcactctccaagagaaaggacagtcgaagaataaatgctcatgggattccaaatcccattcacaaaccaggcagtaggtacttacaacgagtacatgcatcttgacaagattgtctctggtaagaagattagagtgtaccatttgccacgtgatgaaacgatattttggtgtcgagagcttgcaccaaacagttgtcttactttcaaaacttgtcccatccaaaatcaggaattcataagcttgcccaatcgaaaatctgccattagttccagttttgatgatagcttcatgagagaaagtctcttagcctcaatattttcctccaataccaactaacatccgccttcagctcaagaaatcacacctcttgatcttttatctacaagttgttcacctattttacccaaagcacatcttgctttgtagtgctaaacccaaagatactttgccaaggtcgctttgttccatttatgaccttctcgaaatcgtaaaccaccaagctttctcgacaaataaaccagtttcaagtggccatgtgaagcctactccgattttctttttctccccaaagaaaattcttgcaaattcggtcgatctctttggctattttttgaggcaattgaaatatgctcatccaataacatctgattccaattaagacagagtttattagaagagctctacctgtgaaggataagtgacggcttgcccaaatatgcaattttagctttagtttctttaagatggtatcacaatcttcatgtttccacttgataggtctaagaaaaatcccaaggtacttgaaaagaaatgtaccagtcttgaaaaaaacaacctgctgaataatagacactgtatcacctggtatccctgcaaagtagatgtttgacttctctatattagccttgagacctgaataggagctgaaatgagttaaagcctccaaaatacatttaaccgaatccctattccctttacaaaataggattaggtcattaactaaacataaactggaaagtttcaattttttgcacattgggtgaaaagagaaggctttgtctctgactttccattttagagttcgggtaaggtaatccatgactagtacaaagagaaggggagacatacgatccccttgtcttaagccttttgcaccttcaaactgttcttgtattctcccattcatcaccagtgaatagcatgagcttcgaacacaaaccattatccaatccacaaaaactcccgggaacttgtatgcttttagaagacttttcaaaaattgacaatcaattgtatcataggccttgctcaaatctattttcattaggcaccgaggagagatttattttcgatagtaccctttgattaaattctggagtatcaagacattgtgagcaagtgagggatttttgataaaagctccttgattattactaaatagacacaacaaaacctttaaaatcctattacaaatcagcttcgagatacatttatagattgtattacagtagactaccggttggtaacctacaaccttggaaggattctccactttaggaatgagcatgagtagagtttcatttaagtgctttggcaagacaccctccttaaagaaactcaaaatagcagtagagaaatcctagccaagcaagctcctgccagaaacttttaaaaaatctcgaaccaaaaccatccagaccagaactttataagttaggaattgaaaaaagcaattttttaatgtcttgaactgagaagggttgaattagttttacctgctactccatggaaacccgactgccttcttcaatacagtggggatggattgtctctgttgtagcacatgactttcccatgaagcttttgaaatgagataaaagaatggtgaacaacttttggataatcttcaactaacatcccctgctcattaatgaaagaagctattctgttagaatctcttctattcctaatgcatgcatggaagtaagcagaactttcgtctcgaaatttgagccaatcaactttgctcttttgtttc

SEQ ID NO: 184841 - DNA, 1672 bp, Cannabis indica
gtttttaaaaaataaaaagaaatcaaacatcagtgaatcatttgataataaaaaagattcttttttattagtatttgacaatcatatattttagtaagttaattttctacatcgacaacaaaaaatatatatatataattaataataatatgatttagtacaaattaatatttttggcataagacagaagacatttaatcataatatcatgataaaaaatttctctttacaaaataaattttgttagtaaatgatttcattctcgaattttctagttgtgtttttttgttactatattttgcaattttactatctataatgtgattaaattattgtatgcttaaaactcaactagtatgttcaatcttccaatattatcagccaactttatttgtaacgatggcgagatctaattttatataatataatacatttttttttgtttaaaaaaatgatttcacttttagtacaagcttgcaattttaggactacaaaagacttgtacttcttcaatagtggccttgttctcatcaccaaaaagtgactcctttccatcttccctctttgcatatgacaatcccaatcttgatttagcttgccttaggtcacccacacccgaattggtatctgggccagcaaatccacccataacaggtgctaatggaggcccaataagaagcccatcagccccaaattgaggcccaccccttgcataatcaaaaagggctgcaccactgcccccaactttgggcagaacaataggcccatcatcatcattattagtagtagtaatatggtccatccaatagaagagaaatgcatcaaaagagtcatagtaatcgtctgtgcttctatatccctctggattaaaggcaccaaatttgaaggacttgtttgtgtacccaattatcacacatggtcctttgaaatcacaatacttgtggaaatcacttgcactaaatccatctatggaggctctatagcagcattttagctccctatctagttattttgttcacatatcacaaaacaaaatgatattttctcatttagtgtcatataataggattaaataacacaaaaaactattaattttattattaaatgaaaatacgtggtaccaatattaaactgtaccaaacactaataacaatggccaactcaagaatgagacagcactggtcccaaagctccccaacccagacccaaaaaatctttgcaccactagtaccctttagcaattctattacataatgggtataaaatgtaaaatggtacaaagggaaagagagtaagagtaccttttaagaaagttttgttgaggagtgaaggggagaaaggaagatcaatatcatggtacttagttttttgagatttcatcattgttgttcttgcctatgttccacccaaacaagttatatggccttatttttcttctcctactattctcatacaatatgcctatggtggtgctgtttgagatacaataagccattttaatataagatttgagagctcaacacagttatcactcattattatatcttatcctcattaactcatatatttttgaactacccacattgacacgtgtcaaatttgtctaagtaatcaaaaatactttttatgaatttttaatgtgagataacaacaaattgggtccatagctcag

SEQ ID NO: 184842 - DNA, 3926 bp, Cannabis indica
atctaacacttagtctactattttttagttttttttaaaaaaggtacctattttatttctttatgaattttcacatgttactagtcataatatttgttacattgacttagcctgtccaattttctggtttctactatttttctacctactctgttatcatccactagttctcaacttattgaccctatttagcagaacttcttgcatggttgattaatcaaggtctcttttaataatgatgaaaattcttaagtgagaacatcaaggaaagacttgagaagaaaatatgagcattgaagaacctggatgcaagtgacaacttttgcactattaactgttctttatagaataaaatctcaacttatttttgagaaacaatttaattaaaaaaaaaaaaaaaactaactatgaccaccttgaactttgccttcagccacttcatcatcaatgactgaacaattaccacttatgaaactgaccccaaatcattagtagcttcagatgttaaagttagtgagtatactatataaacaagcaagaagatctaattgttccactttattgagattattcttttcctttgattgtagtgaaagttgaaagtttcgacatgtaatagttatggtaaaacactgtaccacttggtttggtttctgcctaataaaaaatgttgatccccaggaaaatcctatgaaaagatgaagaccggatgcattgctggccaaatgcccatcttttgtcaggcgattctggttcttcgtgagcttaaattacttgagagatgacaatgcctctgcaacttttcgagatattcgatcgtgcattggctcctgaatgaagaaaccggattatgttaaaattctcattatattgattaatatatatatatatcagtctataagacatttacctctgttgatggcattttaaattctgactttgttatcgtctcgtataagaaaatatatctgtagtattttttcataaacacaggtcaataaataaaagcagagatatatccagtagcagacgtgcttttagttgaataaaataagtaaacataccgccaagctagttcgcaaacaagttcttcaggagcatcggggaggacctatacattggatgacctcagtaagatttgaaattttctcatgaacagaaagaattaaaataaaattccaacaatgtaagtaatgtaattaccttatctttgtatggatcacagtgatctttgaaccataacctcaagaactcctgtgaaatatagaaatcataaagtgatcactggaaagttactggtaattatatatatcggtgaagattaagcacatggaacttgtgaatgaaatgcatcctcagtgtctgatagaggatatacatacagaagctagagtattaagatataaaaaccaggacatgacaagaagggaaaatacaccttatcaacattttcaggttctagaccattctgaaagcgttcctcgtaagaatgtgctatccaatatctgcttgaatcgggtgtatgaatctataatggaagttaaagaatcaactacatcatcaacattattacttggatgaatatacaagaacagataaggtagcaaatagaacatttaacaagcgacaaacctcatcgatcaaaagaatggaaccatcacgtccctttccaaattcatatttggtgtcaactaatatcaagccatgctcctgagccacgcgctgcaacataaaacatattataaagtcatctgcctaaagagtaaactttctatcttttgatctttttcttatcagggattgattgaggatgcggagaataagtctagattaaaaatgtttttaaaataataatgaggaaaatcatcttggatcgatatttacttgtccatattcaaacaagctcagtgctttcctacttgcttcctcgtaatcatctcgactcatcagtccgctcttaataatctgcaaggcaaatgcatcacattagccaactagatagcagtggagattataagtgtacaagccatgaacccaatgtggtatcatttagaagacataaatcgaaaaatcaaagggaaattttgaaaataaataaatattaaacctcatctggagtcacgggaacatcatgatctgcagccttcgttgtaggtgtgaggatattttgaggaagcttttggttttttaccaatcctgcaattaaaaagaccatcagagagaaaattttcatactggaaataagaaagcactgcacgattatctcaccttcagaaagtgcattgccacagtaatttcgaactcctttgttatagaccgtccatagtgatgtctcagtgcttccagttacaaaacctctgactatacattagtagacagaaagagtcagttaaatagttcattacaatatcagtactcagcacaacaaagaattcaatataaggatatatcatgaaattcacaagatgaattataactaaacaactgtttttcttaaatttatccagacattagaaggaaagactaaaacagatcataacattttcaatcaaagtggacatgaaaaggtaatccaacagaacatacccacaaactcaacgggaaaaacggaacatttctttgcaattgttacattttcgtctggggttaacacaacggcgttgggtgtaatatgtcgagttttgtcaaaccaccacaaacttgtttcattaagaacctgaaaatcacaaaactaactatataaacaaaaatattgaacctgcaaatggaacatccaacatgtatatccaaattggaaaaaagggacaatactaaaggcaaagaataacacaacaatggagaagcataactcagtttcaatagaggcgaaggccaaaggctatacctttcattcagtatgctttcaaaatacgaattttcacttgtctaaaaatgatttcaactaaatacaatacctgtcctttgaatggtatggaagcaagaattctgtcaaaagcgctctgccgatcagtagtgactaaaacaagataatcaccactgtcataaatatctctaacctgtaaaaaaaaagatttttcatcaataatgaaactcaatttcttgcaaattcacaggaaaacaagtaatctgtcttaatcagagaaactcaaattcaccaaacacaagcacgattgatagcatcagtaagtataataagtctagggtttagtttactttacctttcctctggttttggatttgaggccaggaacagtgagttgcaaattggtttcggataaacagttcggcaaggatgttctgatggcgtcagaaagctcttctctgcgagaactgttaaccagcgtatcaagggacaaggggggttggtgttgatttcgaacggccataaccgagagagagatggatgggaagttcctggaaatgggtttggggtgagtgaagaaatgggttggaggaagacgatggttatggagttggagattgggtttaagggttttgggagggtttaagcctctcatagactgagccattgttgtagctgtaatgttctatttgctcactcagcccagttagactgcttttcaattgacttttttttgactatttgctgaaataatttctttcgataggacaaaatagtccttttcagattcctacaatagttccttcttataatgtttttgggaatgaaaagggtggaataggaatgccaataaaaatagtaaatttgtgtcataaattataggtaatttgcggcaaaacctcctaaagtgcacaagtttttgcaactaatccctaatctaaaattttggtgctaaaactacctaaaccactagtccgttagcagttagccatttccattcatttttggatgttaagtgccaggttggaatgtccacgtgtacacagtgtacacgtggcacaat

SEQ ID NO: 184843 - DNA, 2184 bp, Cannabis indica
gtttgaggaaagcaaaggaggcgagaaaagccgagcgtgagaagcagagacaagtttgaagcccaagtgagttagatttaaaagttttaaatgggtgtttgattgtactagctaatctgtttcatttttagatttgctgaaaaaaggttaaaacttggaatgttaagtcaaggtcatagagggaaatcttgttatcctgaaaatccaaagctgctgatttttgatcctttgttttgacattgcatagttatgaattatgttcttgtatactcgaataagagtgttaatatctattctaatgttattgctttattttatacaggctcaagaagcgttgtctgctctcaaggacggtatgatgttcgatctctctctctctctctctttggtttttttcgtaattcttttgtggtgaatgatcaccctcgaaacaccattgttacaacagtagcagtgttcaaagaaactcaatcaaactaaaaccaatcacaagaattaaactaaacttaattagaaaccgggcaagaataaaatttaacttgagaatgaatgaattgtaaatctttattgataagaatagtcagtattatacaattgaatacctctaagaattatacttcaaaacagtgaggatcaaacctcaattacattcaatctcacactgaggaatacttgatcaaatacaagtgacatatatcaatctctctctagacttggctctgaattttgtatgagcattggagatgcctgagagagttgagacatacctatttataggtgttggtgaggttctgcttaagttggtgtcagagccaattgttataagttataactaacaacaactcttttctattttaactggtaagtgttgagatgaaattacttacttgacaaggattaactgagtttaatcccaacatgtttttatattgtttaaatgtatgtgtattttttttccactctatttattctctttggtggtgcctctttactttaaattggttgctctgtggtaaattctatcatctggttttctgtccgaggtttcttttcgtacagtatttttcaagttccgattatcatgtcccgtctgttatggtatgactgttactaaagttcctacttttcttggcatgactgttatggtgactagatatagttcatggcttttcgaaattcccttgtttaatttttggctttatttttaatcaaacaggggaagttatcggtatacattccataagtgaaatggagacaaagttaaattctgcttcgaagacatctcgtcttgcaatcctctatttcacagcaacatggtgtggaccgtgtcgtttcatatctcctttgtatgtcaacttagctagtaagtacacgaaagtagttttcttgaaagttgacatagacgaggcaagagacgtggctggacgatggaacataagtagtgttccgacctttttcttcataaggaacggtaaagagatagacaaggtggttggtgcagacaaaaatgcactcgaaagcaagattgcacaacacgcaggctaatcgtcggttttttttcttctcttgacccttaattctgagcttctttcattgtacatgtgaggaagttgggtccaaaaatttatatgcatatacatgtacatgtttaaagttagaaatgttttgtttttggtttgagttgagttgagtttattaataaagtgttatggttgatacattatgccatttttattttataacacttaaaatatatagatttctaacactaaatgaattcacatgagcattatttatattagagtaaatagcggaataagtactcaaagttttaagtttgtaagcggcataagtatctaatatttataaaactattgggaaaatataagtttgatcaagatttgttttttcgaagtaccaatagcaagcatgaatgattagggttttcactttttataataattaataaatgtagaatatgatattaaattatatcaatagtaatataacattttatattagtggttaatgcttaacattttacaatttacatagatatttcacacttttttaacgaagacagatataattatatcgtatcttatcctattagatattcttaagtaacattaaaacaagactaaattttcatgaaagaatagcttaaataacaaaaaaaaaaaa

SEQ ID NO: 184844 - DNA, 1588 bp, Cannabis indica
attttaagaaaatagttaattataattaattaaatctaaaaaaggaaagtctacctattagtaacctgctattacaggttaaaaaaaaatgtaaccatatggttacaataaaaatgtaaccattgaatagtcacccatatatatatatatttaaaccttaatttcatgataaccttttattttaaaaataattaatgatatatatatgcttttaataatttgtacactttataattattataaccacacaatcctaactgcaaattaagaatattgtttctatcattatcattctttttttaaaatatatgtttgggtataatatataaatatattttgaaagtaattaattctctaatcaaactcaaattttgttaaaatattttctgatataatctttatatatggatagtaatcaatataaaatatgtatagcaataaaatttattcttttattgtatatataaaatacgtatatataatcacatctaaagagtgaagagcacactaatatagctgtaaaaaaaattcttaaatatcaaaatcttaaaccttattttaaaattaaaaataaaatacattatctacttaaaaattaaaacatacatgtattacatttaacattactaattaaatctaattaaaaaaactaattatacgtacaatgcatgtaacattaacttagtatatatatataagaattttctaaaaatgggtatttacataagtccttatgcatttgaaatttattttggtaatattattagtgggatataaaaacttaagatagagttgggtgcacgatagataattttaggagcattgctataaaataccaacattcactactgaaaaattggagcaatcttagcatccctatctcggtggttctgtgtgtaactgccaagatagatgactataaaatacaaacggtcactggtgtttagcatcatttagtggtagtatcttacaattggtgagtgatatttcataaaagttaataaattaaattatataaaattaaatacttaattacaataataacgataatacatgttaaaagatgtcaaatacacgccttatttatgtttgttaattaacgaaatgaccaagcaaagtaagaaattaaattctaaaataacaacaacaactcaatgtatatagcttagttggctactatttaatttccctcttaaactccttatattgtaggagaagtagggaaattattacatatagtttgtctcatccccattgatcaatatgtaataatttaattagatgtactcttattgacaataacaaatatttttttttttgaaacaaatgcactttcattgacaataacaaatatatatcccacttactagctactaaatgatcttaagtctataaaaattaaatatctcacttataatttttttttagttaattgtttgaactttaatttttaacacaatatatagtaaattatttaaaatttacgtagaagtaaggaaataatttttcaccactatagacaaatttatctactagctaggagaaaagcaaaattgggtgctctagaatattgtgtcaactttgattc

SEQ ID NO: 184845 - DNA, 2087 bp, Cannabis indica
gggcaggggaatctcgtggtactaaactgatatcaatggtacagactacagagagttttgttggggcttcccacattttttttttttttataatgggcttcccacattttagttgtgtttgtttgatttcgtatttgttcttcgatctgacatataagttttgttgtagttatgttctggtttcattcattgggatttgaaaataagccaacctacaacttgagtatgcttgttaataactccgactacaaatggtaaccattaccaaccgttgattggccagatttcctctttaaatactgtaaatttaaattacacgacatgagcatgtcaaaatgataaggataaaaatatataatcataacaacaacaaataaaatcattgaaatgaaataaacaaaaaaaaaattacattacatgaatgattacagatacaaataccacaagcaattagtaaacacaaacaaaactcacttggagtttcagcaagctggagcactcaatattcaaaaccttttcactcttcattatggcttttgatcttttgtatggtcctaggccgaaccaaaatcttgaaaccacttctcatggcgttcgatgtcagattgagaaacacttcgttggaccttctttaaggcttcttcaaagtcacacatggcaacagggtccttcgaaatatcatccttggacatgctcttaatctcatcacgagttttcccagcaattttgcgcctcatcccgttcaaggaagcatctcgacagacatttgttagatcatcaccactgtatccctcagttcgacgagccacatcatctatatccacatcagtggccacctaaaacagatgcataggattaatttcaaataataaactacaataaaaccagacaatttgagccaatgagttttgcttgtctttggtaagtttcattttgaaggttattattagggtacaaccgtacaagcccagatagccttgtaaatgactttaaacaagcaattacctcaacagttttcaagttgatccgtataagctctttgcgactttcaaaatttggaagaggaatatatattctcttttccagcctcctcctgaaattggaataccaccaatcagatgaacgttcagaaaagatctacttgatgaaaaatttagtgcaaaatcccagtaacattcaactccaaacaaaaataccaaacccaaccttaatgcctcgtctatatcccaaggaaagttagtagctgctaaaaccatcacgattttacggctgccatcttcatttgtggaggtattgtttacaccatctacctgaactaaaagctcagatttcacccttctagatgattcatgctcccctgatgctctgaatatattttttaaattgagatcaatacaggtaaaattgctaaatgcatgataagaatcacaatgaaaatattttccaaaaaaaaacagtcatagatttttatggttatatgaattgaacacttgcaaagtgccaaaaattacaaaagttctactactgaaatatagttcttactccttaccctcgagaattacaaagagaatcgatctcatcaatgaagattgtacttggagcataagatcttgcaagatcaaataagcatcgtaccatgcgctcactctctccacgccattttgaagctaatgtagcggaagagacattgaaaaatgtagtgccgcactctgtagcaacagctttagcaagcaatgtctttccggttccaggaggtccaaacatgaggacgcctttccatggtcttctaattccctaaagttcaatgtgatgagagaaatttttggatgaattgaaagaacgtactaatcactaattacgtagaaatgaaaacccaaaaaaaactttgatatcaatatataagactagagaagaaaaaaaatattttttcacccatctgtcagttaatagagccatattcagttttatcaatgttaactaagaacatggggacaaccagaaggcccagaaatctgctcctggctgcaatagccagaaacatgtaatataaaagaaaaaacatgccaataaaagctaatcagcagaag

SEQ ID NO: 184846 - DNA, 10481 bp, Cannabis indica
tttttatttaggggtctttttctatttttactactttaagtactttggtttttttttttttttttttttttggcatttttacagaattctacataaaaagtcttattacaactagtgttgctacttaaattgcaacaaaaaatcgtacagaaactcttattgcaactagcgctgcaacttaaattgcaacaaaaaatcgtacagaaattcttattgcaattagtgctgcaactactttagaaactcaaaccgtaaattaaaaaaaaaaaaaaagttaaaaaaaatgatataaggggtaattttccttttatttatttatttatttcttttaacttatttatattccaaatccgaagcattgaaatataatcttcctatcattatttttttaattgttaatcgaaatgcctataattaattgcaatattaattgtgttatatttgactatattttagagaataggttttttttataacgaaaaggggaggacttgcgaggggctaccaggtggtgtggctcctctctttatgcgtaaccttgagatgagagcttcttgcccacaaaatgttggccaagaccttgggcgggttggctctacagtccacctaagatgatttggtcagcacacaattttttaacagagcaagttttttgtcactagacaacttatcgtttgtctagtctagagatttgttaaagggtcttattggtgctcaataatgttcttcgctgtctaacaataatgttccatgttaaattcaacacaaaataaactcatcacacatttggcatcactctaattttggcaatataacttacaaattacaatgcttatatattgggactcaaagagtcaaaggcctctttcatgcaaacgaaagttagaaacatggcaattaggattctctcttcaaaatccatattccttcgctctttcgttactacccttaaattttcttctggcgctctacaacactcagacctactaccaccgtcgccgccggatatagtgaacgatgtttctcgagttctaagcgaccaccgcaatccccacgatgacttggaacattcactcaatacattttcaacccatgtatcaacaacaacagtcgaacaagtccttaaaaggtgtaaaaatcttggcttttctgcacacagattctttctttgggctaaaacaattccgggtttccaacacagtgttgagagctatcatattttggttgatgtcttgggaagtagcaagcaatttgcaatcttgtgggatcttctcatagatatgagagaatccaagtgttgtgagattagtcctcagattttccggattgtttttagagcatatagtagagctaatttgcctcgtgatgccattagggcatttaatagaatggtggaatttggaatcaagcctggggttgatgatcttgatcagcttttgtatactttatgcaaaaggaagcatgtcaagcatgcccatgaattttttgataaaatcaaaggtgggtttgagccaaatgtgaaaacttttagcattttgatcaggggttggggtgatgttggtgatggaaatcaagctcgtaaggtgttcgatgaaatgcttgatacaaaatgcttggttgatgttcttgcatacaatagctacttggaggccttgtgtaaaggagggaattctgatgaagcttacaagatttttcgaggcatgccatcgaatggaattgaaccagatgcttgtacatactcagtcttcatcagagcatactgtgaagctaatgatattcattcagtttttcgtgtgcttgatagaatgagaaagtgtagtctcttgcctaatgtgtttacttacaattgtatcattaagaaactgttgaaaaatgaaaaggttgaagaggcttatgaacttttagatgaaatgattgaatatggtgttagaccagatgcttggagttacaatgctctgcttgctttccattgtgatcatagtgaggttaatagagctcttaagttattatccagaatggaaaatgataactgtgttcctgatcgtcatagctataatatggtgctcaaactactgatcaggatagggagattcgatcgaatggctgcagtttgggagaatatgtcagtgaaagggtattatccttctgcttcaacttattctgtcatgattcatggtctgtgcaagaagaaaggtaagctagaggaggcttgtaagtattttgagatgatggtagatgaaggaataccgccatattcatctaccgtcgagatgttgaggaatcggcttttaggcttggggctccttgaacagattgagatacttgcttgtaaaatggaacgaagtacttcttgctcaatacaagagtttgcaaatgccatgagaggcaataggccctttaaagcatcaagaaatgaagaaagtgagtttgaaagtgactgaagattataggtttactttgttgtactgaagtgtcttggataggtttacatgattcatcgaaacaaatgatactgcattttaagttttaagctgtgttaacaagtttgacaggaaaaaccaatagttgtagtaaacacccttgttgtcaaatgttggattatttgctaacaagaagaaaaatggtgtgaaatttccaactacatgattgattttagtctcagccttcctttgtgtatgtaatttggataatgttaacatgatcagtctttctctgagatcttgaaatgaaagttgagatgattacatcggtgtaaaattttctttctttgagaccaaacttaaacctggcattattgtggccaatgaagactatttttcatcaaacaaggataatggcattggctgtattaaagagtttatagaaatattcacagttgaaccattattactttttattaatctattaaatacaattaatataatgtctgaaaaaaaaacgcaatattatatttttattctcactatttatttaaatattgagaatgtcatattttttttttattacacaatatcactatttgacaagtgctataaataattaacaattttatatataattattaaattaaaattatcaatattctcatcttattttgtttttattgttttgatggaaaacattccaaactaatttaatttctccattttaaatgaccttaaaactacatgtcgtatttcaaatggaaacgacattattttgcagaaagaggaaacagagaattgtcgttttagatcttaagtccaacgactcaagcgaaggaagaaacaaaccatttcgcaaagtcggtgatgcagaatccgatcgactatggtccacaactcattcctaagccatagaaattttcagtttcgtctctgagtttgaggagttttctgtgtgtgatctgattgtgaatctgagtgttacccgaaaatggtggtgagaatatcagtgaagcccaccttaggcatagcggtagttgctctctctttttccttcctcttgcttctcttctcgttctattctccatcatctcaaactttactttctacaacttcacaacaactgtaagtactaatttcgtaatggggtttttgatttcttgattcaaatcttacatcttactactgtacatgcatatttggtggattacaatccaaggataagaattgagttttggatcgtgagttctgcaatattgtttttattgggtttgttgattttatgtgctgaatcttttgaacgcagaggagaaaagggtatttggaatgtaaggaggatgtttgaatggagaccttgcaagtggtggctacaaggacatcttccaggtatttgaaaattctcttgcttttgttttttcagttatttcaagtgtgcttttgtttgcatatgttagaaaaaatgaagtttttcagcaatttgctgtatctgcgtgactttaattgaaaagtttggatttgttttgttgggagatatttctggcattgtgggtaatggacataataaatgattatatggaatgatagaaaggttggggtggggtttgtgatttagttgttttgatattctgagtcaatcttgactttcattgcagacaattgctttggttttttttgttgttgaaatgctgcagctcttccagccaaaagtaatggatatattcgagtggattgctatggcggcctcaaccagatgagaagagatgtgagtgatggctgattaacttagtagagcaatttccagttatgttttcaaacttggtcgaactttgtttcagcttttttgagcatggatgctatttgtgatgagtgcagttgtgtgatggtgttggtatcgcccgtcttttgaatgcgaccctggttttgccaaagtttgaagtggctgcgtactggaatgaatcaaggtaatttatttagaaatttttaagaatatagttagtcttagctctgcttgtctctactatctaactctttattgcacttcagtggctttgcagatatatttgatgttgaccacttcattcaacaaatgaatggcttcattagagttgccaaagagttgccaccagagattgcatcaaaggaaccgtttcatgtagactgtagaaaacgcaaaggccaatttgactacgttgaaagtgtgcttccttcactgatggagcatcagtatatttcaattacaccagctatgagccaaagaagggacaggtataatcatggtctatgcctttgtgctgtttctgggttactggtcataaaagaactgagttgtctagatctagaacaagttaaactcgctgttgttgaaactgtattattatgtaaaacagaccactaaaaatgtttgtctatgggtacatgagcatgcaggtatccacagtatgcaaaagctgccctttgtcaagcttgttataatgcactacgtctcacaagatccatagagcagaaagcagctgaacttttagaagctatgcccaaaccatttctctcacttcaccttcgatttgaacctgacatggttgcttacagccaatgtgagtatgctggcctgtcccctagttcactcaaagctattgaggaggcacagggagatagaaaaccatggactggagaattagctcagatctggagaaaacggggaaaatgtcctttgacacccagtgaaacggcctttatacttcaagctctcaaaattccaacgaacacaaacatatatttggcagcaggagatggcctaatggaaattgaaggattaacttctgtttacaccaatgtagttaccaagtctagtcttcttagtggtgaagattttagaagcatgcatgggaacactaaagctgctttggattattacgtttctgttaacagcgattcatacgtagcaacttactttgggaacatggataagatggttgcagcaatgagagctttcaagggattgtataagactcttttcttaagcaggagagcttttgcagaattcacttccaaggatttgaaaggagaggagttaagccaagccttgtgggaagctcatagagatgatttcgtaatggggaaaggatctgctttgcctgattgcttttgtgagttcaagttgtgattaccaagttttgtttcatctcttgtgaaaagattcaaagaagatagctgtccgtacggctatcatttaccactgacaaggactgattaagatgctaacctctcaattgtttttagtgattaattgtttgcattgtcaacgagattttggttaagatgatatattgtatgatttattattgtataaatttaatgcctacatcttttcttgaaaagaggagctattgtatttatcatatacttaaaaaaaacaaaatttgatttcagtaaagaaccttatctgtctcaaacatggtgcaaaaatcatacttctacacgagcatatagttttacaactttcccatatgtacagaaaacattcataatacagtacaaggtaagaaattatgagcagcatgctctttaagtagtctagtgagtctaatggaagcagtggtttttctgtaatggaaaggtccatatatcaaaatgtatatacaatttatgttaacttgaaattgaatcaacttttattaagatacagatttcctagttgtagagagagaccttcctttttaagtctatttttctatcttattgagattctgtgatcttccacttgatcataggatttggagtcttcaaccaaagactgcaatattttcatagccttagaagttgctccttttggcaggtattgatccatcttaagtaagtacctaacagcgccttcaagttcccgctcattgagagtacacgggatcaaattcctccattcacgtgatctttcttccttgcaaattccatagagcaaggaggaaaaagatacagaatccataaagaagctcttgcttttcatcttgtcaagaagctgtaaagcagttctaaccatgtcatgtaggcaaaggcaaaccaaaatagagttatatgcagcaaaatttcgatccaatccatctgaaatcattgtttcgaaaaaatcaagaaacattgatttatgcctctgttcagattcctcttttctcttcgaaaattcagctagtccacagtttgtaaaaccatttaccagataatgaaaagtaacatcattcggattacacttgttcttcagcatcagttcaaaatagaaggctgcttctgcaagcttactctccttacagaagttaccaataagtatactgtatgtgatcacattaggctccagaccacaagatttcatttccttgaaagtttttatggctttgctggaaaatcctttcttacagaacccattaattaaggaggtgtatgtgacaacattcagcttgcatttccattttaacatcagcccaaaaatctttaatgcaccatccaagtcatgctgtttcacaaagccatcaatgattgtggaataagaatattcatcaggaaataggccttcctttctcattttatttacacacaatagcgcatccgtcatcagaccagctttacaataacccttaatcatagcattgtaccccacaacaccaggttctatacccttttcaattgcaagatcaaagagttttattgcatcattaaggctgccatttctaatgaaaccatccattaaagtagccaaaacaaacgcatcgggttgtatattttgatcaagcatctcagcaagtaacagcttggcagcaggaaacctcccttccttgcaaagcccattcatcaaaacattataaatagcagaatcaggctgtagacctttatccatcattttctctctaacagtcaatgcagtagaaacttgtcctacaacaacaagtccatggatgagagctccataagagatcaaatcaggtgtacatccttttcttgtcatctcaactaacaattccaaagccatagagtattctccttgtttaaaatagacatgtagaagaggagtataagtaaatttacttggtaccaaacctctctttattgcctcctctaattgttgtttagctttctgaatctttccttctctgcatgattcagtaataagaatattgtaggtagtaatatcaggctcacatccactctcaatcattgtcttcagagtctcctcaatcttcaccaccaaaccatgcatatatctagcgtttataacattattatatatttggacattaatattcaaacctctttccttcatctccatcaaaagatgatcaattttcataaagttgccttctttacaaaacccatttatgatagctccataagtttccaccgtaggaagaaatcccttcaatttcaactccttgaaaagtacattagcactctctgtatccccctttctgcaatagccattaataagtgtattataaaacactatatttggaacacaaccctttccccatctatcctccattaatcttcttccttcctcaactttcccttctttacaaaaacccttaaccataatagcagtgctgtagttatccaatgaaagagattctctatcacctctcttagccatttcttcatacaccttctgtgcaatatcaactttaccaagttttaagagcacattaagcaataaattacaagcaaaaacactaggaatacaatcgtgaactttaacagctatataatacaattcaatggctttatcaacaaacccagattctacataagtgcgtaataaaacactcaaagcatcacgagttggttttatttcttccattttcatttgacccattacttcttcaatctcggaaaatactctgaacttggccaaaagcttcaaaagggaagaatgagcaaacccatttgagaaacaacaatggggtcttttcttagcccaatcaaaaaacttcaaacccaactctacatcgtataatcggtccaaaacaaaatgggcaacgtcggcaatttcggattcggcgaactgggtttgaagggattgttcccactggtcgtgggtattgaggatatggatggtttcatccacgagtttcttcaggtatgatggagaagaacaggttttggggttgtgaagtggtttgatacgagaaagaagaatcttagacatgaccatataacaataaattttgaatgaatttgagctgtatatatagctggcgagaaaaacaacaatagatcagaaaaaacgacataaatatcgaaaacgacaacagatcagggaaaacgacataaaaatcgaaaacaacatatcgggaaaaacgacaacatttcggaaaaacgacaccatatcggcgacaccataccgggaaacgacatcagctcgggaaaaaaccacaggaaaatatcgaaaaaaacgacaacaaacggagatagcagctggggtgaggaaaacgacaatagatcagaaaaacgacatatatatctaaaaacgaacaacagatgaagaaaacgacataaatatcgaaaaacgacagcatatcgggaaaaaggacaacatatctgaaaaacgacaccatatccgacaaacgacaccatatcgggaaacgacaacagttcggaaaaacgacagaaatattgaaacacgacaacaaacggagaaaacgacaatcaacctaaaaagcccccccaacttcttatttaattatttttgtggatagattttaaaatattttagttttgctcctataaaattaataatttttatttataccaccatatatttttattttattcccataaaaaagatatttttttattttatttcgtgtaattttacttttatctcacataattttagttttatccttattaagtttataatttttatttttataatcactatttttattattatgtctataaagattatatttatcattaatactcttaacagagaaaaaatattaagaaaacatattattctacttatgtggtttctcggcagaattagtttttgactaataaaaacatgctcaatcaagaaaatttgagccactattaattactttaaaagttgagagcattagattaaattggatactaatatggtcaagatgtttatggtgttgttaccttagctcgagatagtaatagaaagttgattgggacttttgtgttatctaagtcggggtatatctctgtccttactgaaattattcacatcaaaaaagcattaagctggattaaaaggaagagatgacaagatattttgctgtggaaactgagtggctttgcatagctcatttcaaatgccttcctcgtttggctttctggatttatcattgtaagtattaattatataagattatttcacaattacacaaaaacaacaaaaaaattataaaatttcattttacgaaattttaaatatttttacgatttttttgattttatttacaaaaatacggtctttttatgttgtactcttgttaatttattgttatctgtatgttattttttgttgttttaatgttattttcatgttacttttatctaattttcttattgttttcgtgttatttatgtaaaaaactataaaaatgtaaaaaaaaaatgtaatttttttacaaaaattatgccttatgcaattatccctaattcttaaagtttttatgttttgtcaaatgatctgctaccataataatcaggctcctaaaaataacataaaatgttttaaaagaataattaaaaatatatattaagaataaatttcaaacactgtatagtaataactcacgaaatttctcttcttttcttgtacatggtaagtaacatcgagattatgcaagtcataatctatgcaaatttggaaaataggagtagttttcccaagtgtagcagtagacagtagtagacaattccattcaaatttaagattacacacaagctgatagcttgatattgtctgctctagacaagtgtagcttgatattgtctcttctgaaaatgtaagtttcttcaaatctcataccacctgaaactggg

SEQ ID NO: 184847 - DNA, 4513 bp, Cannabis indica
agcgataaatgtacttcaaaatttggaagaagacgtcccttcattcttgctggatctctcatgatttcagctgctgtaagcattactatttttttgttctcagctgtctttatttagtttatattgtgataaatataactaaactaagccttgtaatataggtgatattaatcgggttttctgcagacgttggatacttattaggagacacaaaggagcattgcaggtttttgttgccttctcttgaatcttggtactctatactacaattcatttaaggttgaccaactcatctaaggaaatgcagaacatttaaaggtacccggacgagggcagctgttgtatttataattgggttttggttgcttgatcttgccaacaatacagtgcaggtgagtttataataactttgtgaaccacatgctgtcaatagaatatttttttatatatacattaaggggtttggaacccccgccactgatagacactcactcacctgagctaggcaccttaagtaaggcaattagaattaagtacatggaattttttttcttttacataatgtgtttataaacaatgaattttataactttttacagggaccagctcgggctctcctggctgatctagctggtaaccttctatttccatctcccatatttatttgcacagctctgcaattttagtactcgtgaattacatctggaatttatgatttgttttatctaacatcaccaagaattgttttgtgttggtggctgggtctatttctttgatgacacttttctcatttaccaatgtattcctccgccataagtgaggttcttaatatatgtcggaggaggaaaaaaaaaaaaaaactcattgattgattagataattgtctcgatttcattccaggccctgatcaacgcaatacttcaaatgctgtattttgcttatggatggctgttggtaacatcctgggattctctgcaggagcaagtggacagtggcacaagtgagactgattttcttttcttttcactttatgttgttgatgcttgcaaggatcactcacaatatgatgcctttcataccaagttggatgaatgaaaccttttaatttcatggcacaaaatcttctgcctattaattttctccatttatggtctctcttttccattttatgggactaattcaaattacttttggcagatggtttccctttctgttaacccgggcttgctgtgaagcttgtggaaatcttaaggcagcatttcttgttgcagtggtaagctttgtaatccaagattaggttcataatgcatccttgcatattgtataattgaattaatatacacacaatgggtagggtaggggtattaatggattttctgcgaacaaaggataccttagattgatttatggagcataaagatttttgttatgcttggttgctagttagtgtcagtaattttttaatgaaaaattgaaatttttcggagccaattattttcaagctgtgctacaaatctaatactcagctttgaaatcctgcaggtatttctaactttttgtacacttataactgtatattttgctgaagaggttccactcactgtgaaagagccccgccgtttatcagatgctgctcctttgctggaggatcaacaacaaaatggcattgagctttcaaaactaaagcatgatatctccgccataaatggtgccaatgtgaagaatgctactggtggccgtgaaagcaatgctaattcaaatgtggaggaagaacagaatattgggcatattgatggccctggcgctgttttagtcaatctgttgattagtttaaggcatttaccacctgcaatgcattcagtgctcattgttatggctctcagttgggtgggtattgtatagagtttgctttatcataatacgatcattgtcaattacctgctgtatttgtatagagtttgcaagtattgttgattaaccatgttatttttttgctcgctttctttcttgtcactatcttatgtttgacactgatattaatttatacagttatcatggtttccattctttctctttgatacggattggatgggaagagaggtttatcatgggaatccaaagggaaactcagctgaagtaaaggcctatgatgaaggtgtcagagaaggtgcatttggcttgcttttgaattcagtaagaattctaatttgagttgattccctttgaaattatttggttttttcctctttcccttaactccttggaattatgctgattctaatggttgtttgggatgaataggttattctgggaatcagttctttccttatcgaacctatgtgtcagaggatgggtgctagaatagtatgggctttgagcaactttattgtgtttgtctgcatggcaggcactgctatcataagtatcatagcggttggcaaatattctaaaggaattgaacatgcaattggcgagaatgatactatcaagacagcttcccttgttgtttttgctattcttggcttcccacttgctgtaagttgatgctcttgtactagaaagtaattttaggatttaatatttttaattgtttgtgtttgtttatgttgattgcttgtcttttgcagattacctatagtgttccattttctgtgacagcacagctgacagcagattctggtggtggccaaggttagcatggcttttatgttgagtccagcttctattttcccccttgctgctttctgatttttgaagtttgtattatgttattatgcaggactggctataggtgttctaaatctagcaattgttgttccgcaggtagttatagtgcattcttttaaagtttttccctagttctcaaattcaaaattttaattgtcactttttcaatatgtttcttctgcttagatgcttcttctttgcccctccaccccacattttatatagagatgtaaatcagttttgctttggctgcccatgatagaaatggttctttcatctggtttcctataagtctcttctacaaccttatttatttttattgattataatattgtataaattagatgattatatcacttggagctggaccatgggatgctttatttggcggaggaaatgtacctgcgtttgtcttggcttccttcgctgcacttgcagctggtgttattgccattcgcaggctaccaaatctatctaacagctcgttccagtcatctggttttcattttggctaatgacttaccgaatctggggaacctgatgaacaacttgtacatggctcttggcaattgtgtcgggagtagagagatggcccatcgccatacagcgtacgtgtaatatttcacatcagaagaattatgcaaatacttaacacaaattcattcattcttttcccacgtttgtgggtatttgtagctttttgtaatgtgtaaattttcatttatatggaaaggatataagataacataaagattgataaaattaatgatatcatatatattaccacgtattgatttctccctgatttgttcaaaagtcgaattataatggtcacaagaatggttagagaagcgtttgatgtataagatggtagtgatctgtaaattggtgagagcactttatattttccaagaaaataaaatgttagcattgagagaattagaatattactgttaacatgaaattgttccaagtttcatcgaagtagaattcgacgcagctgttgtgatcaatgaacatatatatttacacaacaacaaacttgttgacacaatactatagtgcctttggatttgataatgttggttgttacttgttagtagtaatccagccagggccgactgccgagggagagggtgtgggtgtgggtgtgggggtggatggagtatctgacgttctgactatttttgactttgaagcctcatcacattcacatgtgtttgatctttgcgaaatcaaattgggtaaactttgctattgcattgcaacctcttttcttccgctggaaagtggaaagtggacatagaaaaaggtccaattggggactttgtgattttactttccaactggccctaccgcctaaaattagcagtgaacatcttccaaacaaagtccgatttccttcagcgtttttttttttattttattatttttttttattttttttttttactactttaaaatatatttttttttttgtatttttacgaaattatacataaaaaattctatagcaactaacagaataacttaaattgtaattaaaatttacaatagcaacctacacaaaaactattgaagaaatcaccggaacaacctatatcgtaaattttttaaaaaaattaaaaaataatacataaaattatttttcgtactttttttaattgaactgttttgtaattgatatatatatatattaagagagagaaaaaagccaccttcactttagactacatccacatatacgacaacaaaatctaaaacgaaaattaaaatcaaatattag

SEQ ID NO: 184848 - DNA, 2402 bp, Cannabis indica
cccataattaatggaagaaaatggcacatttatggaatgaaatagccggtttccttttttgattggtcggtaggtgatattttttataataaggtatagttgctgaggtgtcacgttattagaattatatataattactcagcgttatttatgttttaatatgtgttttacgtatataaataaaaattttccttattttttagcccaaggtatgtgtagaaacaaataataataggtaaacgctcaaaaaagataaactaggataaaaaactaaaaatacatcaatgacaatgtcaagctatatctaatatagattttaatgtggttgatcatttggataatagaaatggaggacaacctatatctaatatagaattggaggattctaataagtgactttcccttggtttagaggatcttttgaatagtattggctctcactttacctacactaataattaaggttgtcaagctcatatctactctagtgtagaccatattttcaaagatgatgcttggctagatgattttcccaactgttcttctatattttagtaaaaaacaaaatcgaaccattgctcttgcttggttaagtcttctgttctaaataaagttagagttaagctttttaaattttattatttttggactaagcataagagttttaagaaaactttgatggatatttgggtaaagcaaatagtcagcataggtctgaaatctctttacctaaaattgataagacttaaacatgctttgaagagtttttaaaggcatacaattagagatattgagatttagctcctcaaagctaaggaagattgtcaagaggctaagtagaatgctcaagctcaccctaaagatgatgttttttgggaggcaaaaactatggttgttttttattacgatacccaaactaagatgtatcatagctttgttcatctgatgagtaaaataacttggttaaaaaagggtgatgataatacctcttattttcatgcttggctcaaaaaaagaagaaaggagaatacaatcaatagttttgttaatgagcaagggaatgtaatggatgattattctaaggtagtctctaattttttaggacacttcaaaagtttaatggagagcaaaaattttgtcacaactaggattaatgataagagccttggatcggatggtttcgactcaattttcttcaaagagatttggcttgaaattggtaaggaagcttataagatgccctaaacttttttgaaattgctaagattcgtgtggaactcaatgaaaccactatatcccttgttcccaaaagtcacactccaactaaaactactaattgtagaccaatagtctgttgtagtactctttgtaagttcatctctaagatgctttgcccattacttgctttagtgcttcattctcttgttcatcaaaattgaggattatttattaagactcgatatattgctcataatattatgatcttctaggatcgtatcaagaactatggaaggaaaaactcttctccaagatatgctattagaatatatcttagaaaggccaatgacacagtagattggatttatttagaagacctattaagagctctttattttccttctaaatttattagttggattataacatgtttgtgggacacctcttattctcttttgatgaatggtagattagaggggattcatttcaaaaaaagattagaggggatattcaacggaaagaagggactttaacaaggtgatcacatttcacctctcctttttgtccttattatggagtaccttactctgtctctccatcttgctgctaaggataagttgtttcggtatcaccccatttgtaaagtttaaatctggccaacttatgttttgggggtgatataattttgtttttcaaggaaaccaagcatgttgttggggttttaaattggtatcttaataattttagctctgctacaagtctgagagctgatactaataaatcccaaatatttttttaggtggcctcttgactttgacaattggaagaactggtgtagcaccaagcgaagtggggtgataggttctcttgttaatgtactttatagtttatatagtttaataggaatgcttgtatttttggtgttttttctcattctggcttgcatatagctaaagagatcaaaagtgtaatgcaatatagaatatacaatattgttacaaataagaaagcatgtagtcttagatttgtgaatagattattaactgtatagtagtgtgagtttgggtacttttgtggctacattgtttgttgtttaatgtaatcttattttgtttttaatgtagatttcttagaagttcaaaaaaaaatctaataaaaataaaatatagaaaaaagaatttata

SEQ ID NO: 184849 - DNA, 7340 bp, Cannabis indica
attttttttttcaaaatactgtgattttttaaaaaatattgtatgagttttcactgttgttttttaattgttccactgctgttttaattgttctgttttgttgttttacggttgttttataaaaaaaattagtatttttgtaaaacattccatgtgacagtaaaattgtaaaattttacccaaaatctaatattttataaaaacccttaaaaatattgaaaaaaaaaagtaaaggtaactttttcatctttaaactttgtgtaacaccttaattaaaagaacaacgtgttaatcacgttgattgatgtctaatacgtcaagtgaatttaaataaaataactgataaattaaaacaaacttataataacttaaactttaaaacaaaataatatttacataactaggatcctgtaaaatctaatttaaaatattacaagttgtttacataaaagtcgaaaaaagcagcaaaactaaactttttcacaaaaagtcttccaacaacctatactacaagtcacattgcccggaacatgtacatcctctacgcaagccctccaactcatgactaactagagacggccttatctttgtatgtacacaaagagaacccatgagctaaaacctagcaagaaaaataataaaaacatccaatccaatataattgatattacataagtaaatttaaatgctaaaaataatatcatagaatgatcacttattaagcccttgccaaaggtctaaggcctagtacctagggcccttgcttagtacgggtacatcttgtagaatgtgtactataatgctatcattcgtattaatgagttactctcaacacattcaagattgtcaagtgttgctttcctaagtaacacattgtggggttagaagctcttgattcacatctaatcatagtatttttaagtgtaatactttgattgaagtccaatcattattgtacttaggatgatgattaatgatatgttgaatttcagggagagagatgggaggagataacaattcttcatggattggaggaatgaataaatacttagatggagaacaaatccttacacatagaaggatctatactctcccttttcaattgttaaaaattacaattatactctcttaatatattattaaaaatctataagaataatatactaatttcataaacaaatactatccatccttctaccattctattctttctaccaaacaacttaaaaagaattattacttcactctccctccctcctattctacctctttcatcaactcttcgtcttctcttttctctatccctcctactaaacataacctaagagtaactggttaccatgtttttacaatattattaaaattttcctataaaatattttttacaatattattaaaattttactaaacataacctaagagtaactggttaccatgtttttacaatattattaaaattttcctataaaatattttttacaatattattaaaattttactaaacatcacctaagagtaactggttaccatgtttttacaatattattaaaattttcctataaaatattttttacaatattattaaaattttactaaacataacctaagagtaactggttaccatgtttttacaatattattaaaattttcctataaattttttttttaacaaaaatgttagtaaaaaaaaaaccataaatataaaaatttcccttgtgaaaatgctaaaaacctaaaatgggaagagaagtgatgatgccctaaaagttttatacaataaaaaagccttaatacataaaacaaaaaaacccgacccgatgacccaagaaataggcccatatgagtaaaacatactctctctctctctcaccaaaaccaaacgctgcccttctccactccagtttcggccgcccccaacattctttctaaagcttaaacctttgtataaccccaccaccgctctaccctccattcaaggtcaggactcacaaatattattattctctgcaaattttcactagggttttcctcaaactggtttctaagttaatggtttttgtttgatttggttttgcagcttctttttcttgttttttcaccttaagctttaatgggtagtggtaaaaagagaagttctgaatcaatggaagtcgaaactgaattgggtcaattagatacacccattaatgaggttgtttcgagtgataaattgaaaaagaagaccaagaagaagaagaagattgaaaagggtgatggtgatggtgatgataatgatgatgagtctccttattcttcttcttcttctgctgctggtgttgttgtgaatacggttaagcctatggagaggaggaaaaagagaaaagctttggataaagtgaggcaccattctgagaatgaacaagttaagcccaaaaaaacggaggttgttcaagttaaggcttcttctaatgtggaggagtcatcatcatctgttggtgttttgcctgagtttcacattggtgtttttaaggatttgtcttgttctgatgcttctttgagagaagcagctgtggaagcattggtaactgagttggagcatgttcagaaagtatatgatagacttgagactaaggatgttattgagggtgggttgaagttggaagctgagaaagatgatggcttgaatcaatgtgcaccctctttgagatatgccattaggaggctcattcgtggtgtttcttcatccagagaggtaatgtgtgtgtgtgtgtgttgttgtgaatttcttttatcattcctctgtttgatgtgttgtgttatgtttggttatgattattaaagaactgattatctttcattcattttgtgtggagtcattgtttgatttacatatatttcattggtatttgcttataagacttttgaaggtttatggaagggttggtagtatatttttagtttaattagctaatcttgtcatcatgcttattataactcataaagtttgatacttttttgttatatctcttaaggtgttagtttggttaataacattttttcagtgaaaaacttttaacaggattatctgatgatttgaatgttttattattgtagaaattagaaggcatattaatactgactaatttctcacatgtattgttcttgcagtgtgcaagacaaggttttgcattaggtttgacaatggtaataggcagcatacccagcattaaagtggactctctgctgaaactcataaccgatttgttagaggttacttcatcaatgaagggtcaggtatgcttgatatgtttgaattaattgttttatcttatctttctttatgtttctatagctttcttttcttatggtttatgacattgcaggaagctagagagtctcttttgggtcgtttatttgcttatggttctcttgcccggtctaggagacttgttgaggaatggaattctaatcgggatactccttacataaaggaatttaccagtctcgtaatcgcccttgcagccaaaaagcgatacttgcaagagcctgctgtgtcggttattttagatttggttgaaatggtatgaatgacttgatgagtaaaatttgtattagtacttgtaattgcattagcggcatagtctttctacttaatgtatgaacttaatattttatattaaagataaagaaaaggggggaaattggtttgagtatgacagtgcattccttttttattgattcaatttttcgtcctattgcagttgcccacggaagctgtgttaaatcatgtgttagaagcaccaggacttagcgagtggtttgcgggagctacagaagttggaaatcctgatgccttgcttctggctttgaaactccatgaaaaaacttctgctgatagtgcaatgtttggtaaacttctgccaaatccattctgtgcaaacgaacttttttctgccgaccatctgtcgctgcttgctacttgtttgaaggtaaatttgtattctacacatttttacgttttttcacatgctagacgtgtggctttcaataagttctcgaagtaaagaagtgattattttctttgaatatgtcaggaatcaaccttttgccagcctagagttcacagtgtgtggcctgttctggtaaatcttcttttacccgaaagtcttttgcaagctggggatgtagtgtctctttcaagttctatgaagaagcacaagaaaagtcgaaaatctagctcttctgaagaagaaattgtaaagaacttgcagtgtttcatcgaagtgattattgaaggatctcttcttctgtcatctcatgaccgtaagcacttggcatttgatgttcttcttctactattgccaaggttgcctgcgtcttttgtaccgcttgttttgtcatacaaactagtccagtgcctgatggacgtactggccaccaaggactcgtggctttacaaagtttctgaacattttcttaaagaaatatcgaattgggttaagcatgatgatgtcaaaaaggttgctgtaattgttgctctacaaaaacacagcaatggaaaatttgactccgttacacgaacaaaaacggttaaggaatttatggctgacttcgatacagaatctggctgcatactgtttattaagaacttaaagggcatgtttgtagatgaaagtcatccttctgaggaaccttcggatcagagtcaaacaactgatgacaattcagagatgggttcagttgaagacaaagaatcacttggggctttgggaaattcagattttttgaaaacttggattgttgaatcattacctagtgtattgaagaattcgaagcttgataatgaagccaagttccgtgttcaaaaagagataatgaagtttctagctgttcagggtgtgtttactgcatctcttggcactcaagtaacatcatttgagctagaagagaagtttgaatggccgaaagtagccacttccagtgctctttgcaagatgtgtatcgaacaacttcagttgctattggcaaatgctcaaaagggtgaaggctcacgtgctaagataaacggtgttgagccaaatgaccttggttcatatttcatgcgttttctaagtactttacggaatattccatcaatttctgtatttcgaccattggaagatgaagaagaaagtgtaattaagaaattgataaagacagaaacttcactctcaagagaggtacttttatttagatccgcagccaatgcaggcctctgttattttgtactccttacttatgattcacttgactgtcactgaatattttaataaacatgtcctagtgctaacaaatttgtttatgatggcaggagaggaatagcgggattggcaacgaggcgaacagattgcatgcaataaggtacttgctcatccagttgcttttgcaaattctcctacggccaagagagttttcagacgctgccactgaattaattatatgttgtaagaaggcttttccaactcctgatattcttgaatcttctggggaagaggacaacgatgatgatgctgcacctgcagtaatggatgttcttgtagatacattgctttcattgttgccacagtcatcggctcctatgcggactgctattgagcaggtcagatttcgatgcactaggattttcagctttgtctcatgagtagttgattataattggaaaaacagattaccctttactgtaatctgacattcatttgccttttcaggttttcaaacatttctgtgatgatatcacggatgatggtcttctgcaaatgttacgagtaattaagaaaacactaaaacctgctaggcatcaagttgctgagagcgatgatgatgttgatgaggatgaagatgacgaagattttctgaatattgaagatgaggatgaggtgatcgataatgctgagacagctgaaaccggtgaaagtgaggagcagacagatgactcagaggctgtaggggggctcgaggaagttcacaatgatgtttctgctgcttcggatgattctgatggaggaatggatgatgatgctatgttccgaatggacacataccttgctcagatctttaaagaacgaaaggctcaggctgggagcgaaactgctcagtatcagctcgttcttttcaaacttcgtgtactttcgctgctggaaatttacttgcatgaaaacccgggtaaagctctgacttctaaacagacaaactattacacaaaataatgggcatttaagcatcgaatatgcatatgtagcttggattttggatgattatgtctgtaatttacagaatttccttctcatttgttactgtgcttttcttaataaacaggtagcccacaagttctcttggtgtattccaacttagcacgagcacttgttagtccaccaaccgcagaaagtagcgaacagcttcggcaacgcatatggggaattctacaaaagaagatatttaaagcgaaggagcacccgaagggtgaagaagtgcaactacctgctctcgagtctttgttgcaaaagaatttgaagttggcgtcgaagccaattaagaaaaagaaacttgctaataagaagcaatcagcgtcttggaaccgacagaagatgattgcttcgcttgcacagaactcgactttctggatactcaagatcattgatgggaaaaatcttccagaggctaagttgcaaggggttattgatattttccagcgcgttttggtagaatatttcgatagtaaaaagtcacaaatcaagtcagaatttttgaaagacatattccgcagaaggccatggattggacgtcaagtgttgggtttcctcttggagaaatgtggcaatacgaaatccgactatcgaaggattgaagcgcttgatttagtgatggaaatatccaagtcacttggtccatccaacaacacagatgcattgcccaaaatttggagcagccatctccctagcctgtgtcacttgatagaggtcttggcaacaaataagcccgaaaagcagtcgaggagggctgatatacgaaaattttgtggtaagatctttcaaaccatgaagagcaccggcttggaagagcgttttcttagttctttaaatgaagaaggccgtgcactgtgtcgaccccaagtgagcaaatagtttttctttcttcaattccttaaaatgagattcaaaatactaaatactttattgtaccagttttgagagagattttggttttgtattaggaaaaaagtttattgttgctgaaaccatttagaacaatatactcagcctattgatttgtgccattgtttttcctaatagacaatataaatgggattttgttattttattttt

SEQ ID NO: 184850 - DNA, 14128 bp, Cannabis indica
agctttgtttttgtggctgtagcgttatagtttggctggctaattgcatcatcacgccattttgtttatagctttactgttgtggtgaaatgttttggttgttgtttctcttctgtggttcgtttattatttattgttgattatgttgatgtaatatggtaaattctagatgttgtgcgaagaaactgagaacaagttttggttcttgtgcaataaatttattgacaaaacgtgtttagtagagttttaagtgtctgtgtggttggagagaaatgccagagtctttgaaggggttgattgaaagttcagaagtggatgtgtgggaaaaagttaagttctggtatttaaaaccaagcattttgaggatttgtcctttttagatttatgtagagaatggaaatcactgatgtaggggtagtattttcgtctaacatattttgttcagcactgattataggtcttatttgtctctgtcctttgtaaccaaggctttcctccgccacaagtgagggttctcaatcttttacggggagggatctgtctaagacaagaggtccctttccttcaaagtccatgttccataattgtatggcactctagtgatgttttctactgatattattacgacataactggcactttcttaaatccaaatgcctagtatttgtgtgaaattgattttgttagagtacgttatacaatttcaattgtgtttgggattttctactggggaatgtagtttgttatgtatgctaaataataattatatactttaatactcggaatatatacaggatggacagtaccttcgaccgtcggatccagcttatgagcaagtattggattccttagctatggttgcaagacatactccagttccccttttagaagctctattaagatggagagaaaggtgtgtagttctatttttcctatgaggttcatgataacataaatttaaaaataaaagatgaagtaaacatgtgtatttgtttttcataaaaaagagacaaaggagggttacatatatgtatatacagtattttgagcacttctcattcttagacttaagtagagaatggagaactttgttgtaatttttctggaaaaatgagtattttatatacttgtatgttgttttggatactgtatgttttagtgtgttttgtgctaaaacttctgtaaccacggtttttctccgccacaagtgagggttttctatacaaaacgggggaggtgtcaatctaagacaagtgacctctttctcttttcaaaaaagagacaaaggtcacacatccatactgacctcctcccaaatttattgagagttctcacttgtggcggaggaaaaccgtggttacaacaccaacacgtacaaataaactagacaaaacgagaaaacaattatataacaagacaatcacaagatagggagaaaacttttacatcatagacatgaaggataatttttacaataaatacataaagttctcccagtttctacttaaatccaaaaatggtaatccttcaaaaccttttgatttcacctaagttgccacccaaagtttaatcctttcccaaaggttgtcttcagaattttccttgccttaaaaaattctgctatttttgtcaagccagactcctcaaaaaacactaagtgatgctgccatccacatggttggcactcttttagccccctttggtttgcactcaaataattgagtataagaccaaggcatacaccatgggatgccaaatttgttcaacactctataccaaagattctggacgaatctgcactccataaacagatggctaatgttttcccgattctcctcgcaacacacacaccaccgaggggacaaagatgtagtaagcataattatttgttgcagtctgccagatatgcgttttgagctagtaactgagttcacatagtgaaaacacatctgtttgcatgtacttttcatttttttcttccttttttttttgaaaagagatgaaactactaatataaagaaaaataaatacaaggaaccgggattacaaaacaaaagtaaataaagaaggaaccggggttacaaaacaaaagtaaataaagaaggaaccgggattacaaaatatactccacctcctaactagatctgaaaacaaaactcctctaaagcatttagctgtgtaaacccaaatagcaactcagaattttgttttcatgcaaagcaaattttctgtagatgaagtatcttcagaatttctgctattcctctccggcctagttgcacaaaacaaagctgaagtctacttctagccagagtgaagcacatctgccttctatactatacaccagcaagttgctgctgtttcggggcatacaataggataaacttattttgttgagtagctttcttactgttttcctgcttgtatcaaattatcaagtcaaacaaaaaataaattaaaaaaaaaaaaataggttccaatactaacggcatatgttaggtaaattatattttgagatgtttctagtaatcttctgctgatattattttagaatttttctttactctttcacctaggtttctatttgcgtacagtattttaatagttaagatgtttattttcaatgcttccggacatttctacatcgtatgaaaaacatcaaataatttggtttgttttcaattttaatatagaatttccattttcttttgttgcagtgaatcaccaaaaggtgcaaatgatgcttctacatttcaaaggaaggtctgtagcgagaaacttttttcctttctttagataaataattatataagctgttaaaaaatacacggaaacttttttccccttatctgttagtttctgccagatacatgttgtttactacactccataatgtcaagtttgtcacattttatttgcacagttaataattacctaggagggtttttttttttatatgtttgcattttaaaacttgataaatcagacctttaaagccacttgaggtgaaggagtgtagtgtttctgggctcaatttatagacaatgtaatatcatggccaaaccattaaatatcctttttcatgaacttttaagtaactgtcattgtccttttctttattttcctttttctggtggtgatgtttacatcatatcgtaattatttgcagtatggaatattttttttcaatattcactattattttcatgctaaaaataactatttgtatggtgagcgttaagctttaccccagaataactaccttctttttcgtgtatacgttaactctgtagtgcagaatggcaagctatttttgcttacatgtttgtataaatttcagcttgcagtggagtgtatcttttgttcagcatgtattcggtttgtggagtgctgtccacaagagggacttactggttagttctctgaattttcttgttggatttaattcatttttctaaatatatatatatatatatatatattataaataataattatttcaatcatcttctctgcagagaagctttggtcagggcttgaaaattttgtttttgactggctaatcaatgctgacaggttaggctgctagcctgctacagtggtgtgtgagcttctattgtattttggtaaacattatgccttaaggactgaacatattctctaatgcaggcttgttagccaggttgaatatccatcactggttgatctccgagggcttctcctagatttggttgctcaactgttaggtgccttgtcacgcatcaggtaactgaatattgttgattttaatggaacattactagggtagggtgaatgcaaaaaatttatcaattttgtagtttttgcatagtgatgtctcagtttttggaaataacaaacaagtacccccaattatttcaatttttgtaaggaaatgcaaaagtgaccaaaggttatcagtttctacaaattcctttgtaatgtaaatcctgcatagttaacacttataggcaatgcaatgacccaaatgttgttactactgttgatagtaaacaatttcttagtttttgtttgggtgctgttgaatacatccgtttattgaaaagaaaaaaaaacatgattttaattcatatggggcgatgaatttgaaatatattcaccgaaaaattaaaatagtttgaaagggctcataaaaggcttatgtatggtgattcactttgtgaggatttgaaatgctggtaaggttggattttgaaaaaaagaaacaaaaatttgggacaccatcctcaatattttttatgagacttttttcttgcaaaagttgaactctacctccctttagctcttttgtgtttgtgtttgttttcacctacaaaatagcggcattataatttgattcaaaatgaattggctaataattaggtttaaaaactaggtttctgtctgttttgggggatgggggtgggagggttgtgaaaagtataaaatgatcagccttaaactgtatgttgaatgtggctatgacccattagttgcttgacatttgacaaatttgttttgctggttgcataattgtcataaacacctctaaacatgttaaagtcttgatctatatgctcttagttgattggaccacggtataagctgtgactaaaatgtgacgcagtcctatttctattgcagctctagtttaaacacgtaacatatataatttgcattgttttttcacaggtttagttctgtgacggagaggttttttatggaactcaatactcgtcgaatagacactagtgttgcccgaagcgaaacacttagtatcataaatggaatgcgctacttaaagttaggggtatgtataaatgtcttctttctcctagagaaaaatggcagcaattcatcttaaaagaactttaattgtcaggtgaaaactgagggtggattgaatgcatctgcttccttcgttgcgaaagcaaaccctctcaaccgagctccgcataaacgaaaaactgagctttaccatgcactgtgcaatatgctttcaaacatcttagcacctttggcagaagggggaaaaagccaatggccacctttgggtgtagagcctgctcttaccttttggtacgaagctgttggaagaataagagcacagctcatgcattggatggataaacagagcaagcatattgctgtaagttcattcatcttcttttacttatgggaagaaacttttccttctgtataattttactgatgtttttattctcttatgaaacaaaagatatattaatgtggatgatggttcttacatttgtctgtacttttttttttttgaaaaagtgacagaggtcatatgttttagacctaaacccttccaattatattttttgttagcaggtgtttcatttctattgaatttggtgttaaaattgctttcctgtagaaggttttatgctattttgttttgttttttcctttacaaattgagagtagctaaaattgtttccattttttaatttatttattcatatcaacacatttggtacctttaatcaaaaagccagttttggtacttggatcttcagaactaaacatttcgaggatctttcctttttagacttaagcagggattggggtgtgctgctataataatcctgggttttttgtgactgctgtcacaattttttctacagttttttttttcgtttttatttttgtttactgtttgtttaccatggttttcctccgccttaagtgaggcttgcaatatatttcggggtctaagacaagtggtctctttctcttttttcaaaaaaaaaaaagccagttttggtacttttttgttatcaataatgctcatatggtattctggattttgaaattgtacatatttggaatacgaactcaaatttgatcaatttgaccaaactattctcagttatatgtaattaaatacttaaatacttaaatttgaatggactactcatataattaaagacaatttgatcatattgataaaattttaattatcaaatttgagtccaggctactaaatatgtatacaatacagggtaccagaaaaacattattgacaacaatgttacaaaatttgtattttgataaaacatagggtacctaatgagtacacacactagttttaatctatatatgtatgtgtgtatattttggatattacttttaatctatatttgtcttaaataataatgtgtcttaactctcacaccccatctctggcttgccatgtattttcttatgtgctcatttggattattctttttattaggttggttatcccttggtaactcttcttttgtgtcttggcgatcctcaaatattccacaacaatttgaatccacacatggatcaactctacaagcttcttagagtaagttaagttactgtagtttagtaaggaggagaaaacattcaatgattaagtggttttctttttcaggtttatcatacaatgtattattatgggggtttattatagttaccataggagccatacccttatggctttccatttcaggtgctaagttgtatgacatgatgtggtttaatcattcaggacaagacccaccgctttatggcattggactgtcttcatcgagttttgaggttttacctgagtgtccatgccgcaaatcaggcttcgaatcgtatatgggaccacttagacagtgtaaccgcccaactattgactgttctgcgaaaagggatgcttacccaggatgtccaacatgataaacttgtggagttctgtgtgaccatagcagaacacaatcttgattttgccatgaatcatatgattttagaactgcttaagcaagatagtcttagtgaagcgaaggttattggtcttcgtgctttgcttgcaattgtcatgtcaccttcaagccaatatgttggcttggagatttttaaaggtattagcatattttatcattaattctagttgcttgccatttattgttttgttgtcttcgtcttatgtctattgtttaagcaggtcacgatattggtcactatattccaaaggtgaaggctgccattgagtcaattttgcggtcttgccataaatcctatagtcaggcacttctaacttcttcaaagactgcgataggtaatttctctgctaatgtagggcaagaatagaaattgtaaggaaagcttagttttacaatttagatattaatatttattgcatgatttaacctctgtccagcaaactggctgctactggttcaccattattctttacaaccattaagaatggatgtccttttaagcttatctgctgcaatgtttagttgttgtatactttcaatcagttgacattaattttgaatctaaaataaaaaaagcaatacttctgctttgttttgctcttccaccaccccactttttgttttctcagtaattgctttcttattttctaatgggaggcttgggttgttgaaaacttgtagaataatgacacacatacatcatgaagctgtgaatttatttttatttgttttgccttttaagctgctgtgagaaggcatactgagataggctaaaatcaattttatgctttttagatttgttaatttatttatttgttttgactcttactgtgagaaggcatactgagctggactaagatcaattatatgcttttccagatgctggctgaaacaaaaatctcaaggatatctctttcggtctgtgcttaaatgcataccatatcttattgaagaggttggccgaagtgataaaattgcagaaataattcctcaacatggcataagtattgatcctggtgttcgtgaggaagcagtgcaagtacttaaccggattgtaagatatcttcctcaccgtcgatttgcagttatgagagggatggcaaactttattctgcggctacctgatgaattccctcttctaattcaaacgtcattggggagattgttggaactaatgcgtttttggagagcctgtctaattgatgataagttagactatgacactcaagatgcaaagcgtgtgggacagcttaatgagggattcaaaagatcttcttttcatcgatcaggagaacctattgaatttcgtgcatctgagatagatgctgttggtctcatcttccttagttctgtggatagtcaaattagacatacggcattagaactactacgatgtgttcgtgctttaaggaatgatgtgcgtgaactttcatctcgtgagctagcagactatacttcaaaatatgaagccgagccaatctttatagttgatgtccttgaggagcatggggtaggacattattcatctttacatgttctttcaagcaaaaactttgtattgatttgtaaatgaaaccaacattttgtccttgtaatttttctggttatttacaggatgacattgttcagagctgttattgggattctgggcgtccatttgatttaagacgagaatctgatgcaatccctcctgatgcagcacttcagtctataatatttgagagccctgataaaaataggtgggctcgttgtcttagtgaggttgtcaaatatgctgcagagctttgcccaagttctgttcaggaggcgaagtaagtatatatttataaagtttgcacacaatcttggcttgttatctttgctcttcatatctgcggatgctataatatattgtctatattttcatggttagtggctttctgtcacaatttttttcagcttgccatagggaccttattcctaacaattgaagcttttgggatgattagtataaaatggcactaaaagtgcagagcatggttattgttaaggtgtttggtttcatcctatgcatgtttggtccaatgctgagtgttttgttgaaaagaaaaatcaaaagtgctttatagcataccaactttgaaacaagaaaaggtgttggcatttaatatatttcgagaaataattacataatttaggacttttcattccataagaaatgcttgggaaatttgtcagttaagctgaaataatgtacatttacggtctttgcattctcatttcttcacttccttttctagcatggttgaaatcattcagaactagtttttgtaacagaaattttatttgcaggatggaggttatgcaacgcctagcttatattacacctgttgagttgggtgggagggcccatcaatcacaggaatcagacaacaaactagaccagtggctcctatatgccatgtttgtatgttcgtgtccgtcagctgctggtaaagaagctggtggtgcagctgcaaccaaagaactttaccatcttattttcccctcactgaaatctggatcagaagcccaagtagtaagtgtttgttaaatggatacatataattctcagtataatctcatgtacattgtgttcagatggttgattaatttgacattattttatttcgaagcatatattatacaaaccattgagtttcttataatttttgagcactcagtagtagtggttctgctggtcaagagtatttaatgttcctttccttgctagggaaagttatgtgaattaacattattattatttaatggctatagcctgtatttatcaaatatgctcactttaatgttacaatcagacacttggttgactggatttgattatgttttgtcatcttatgggtattccatttaattttagcatgcagcaactatggctctgggccactcacatttagaatcatgtgaaatcatgtttggcgagcttgcaacttttattgatgaagtttcttcagagacagaagggaagccaaagtggaaggtatactttagtattatgtgtgtaaaatgtcttatttcttgatgaattgacaaggttatttggtatgctatatatgttgtttatggaacaaaaaataatgtcaattttctggttaacatagaattcactattcaatcatcttccattgtaaacattaatgatcttagagaatatcaaatgccattttttttttcctttcctttatttaatacatggggaaagaagttgcgtacatgaatggcttgtaaggaagcaagcatttgaacgaggtgtggaaactgtttagacacttgaaaatcccctaaaagtaaaatactgtttgcaactcgtgaagtttttctccttttcattatttcagagtttacatcaacttgtttcattggaatgtcgtactaataacactaatattctctttgctttttggctttcttcatttcctctattttggtcacggtcagtattacaattcttttaacttgtggatgcagagtcagaaaggacgccgtgaggagctccgtattcacattgcaaatatctatcgagctgttgctgagaatatctggcctggcatgctggcccgtaagccaattttccgtctacattatttgaaattcattgatgagacaaccaggctgatactaacagcatctgctgagagcttccaagaaatgcagcctctccgttatgcacttgcatctgtcctaagatcactagccccagaatttgttgaagcaaaaacagagaaatttgatgttagaactagaaagagactgtttgatcttctcctctcctggtcagatgatacaagcagttcatggagtcaggatagtgttagtgattatcgacgagaagtagatcgttacaaatcttcccaacatgccaggtctaaagattctgtagataaattatcatttgataaagaactaaatgaacaagttgaggcaattcagtgggcctctatgaatgctatggcttcactcttgtatgggccttgctttgatgacaatgcaaggaaaatgagtggccgggtcatatcatggatcaacagtttgttcattgagcctgcacccagggctccatatggttactcaccagatccaagaactccatcttattcgaagcacacagctgaaggtgctcgtggaacttctggtcgtgataggcataggggtggccatcatcgtgtatctctagcaaaactggctttaaaaaatcttctacttacaaatttggacctgtttcctgcgtgtattgatcaggtaaacattcaactttaaccatttttcttcttctctcctgtttggctgaaactttgggttctgtctgcggtcaaacccaggacagaatgcagtgaggcagtgcctcttcttcggtgggatgatcaattaacaaaatccacaactaggatcagctagtaaattttagggcttaatctggtaagctctggagagtaattgagggctagcataagagcttcttcgattaattaaatatgtgttggtgtaatattgaggaaaatcatctcacggccaactcctggtctgatgtgatggacagggttttcatgtgacgtatggttatatttaacagagacaaatcaagagttaccttcgcctgattgcaacagtcttaactgcaaagcagtcttgcagtagacaaaataagattagattcatctttatttaatgttaatcttaggagaatacaatcaatcagtaaatttcgtccttgtcagaactttatcaggccttctcttgggatgcttcaaacagaattgctgtgggttgtttttattttttccaaataattgccctgggattttaaaatgaaagtgcattatgtgatgctttgggttgaattgttttgaaactttaaaattgtgtatctttctctaaatattccggtttaaatcatttgtttggttgccttataatctctggctgttgtataaaatcaaataaaatatattaaaaagttctggcctttgctagtgtctcatagctaacataagtttgtaggaagtgctggtctgttctttttgagataattactataatacaaaatgcttggttattttccttgtttgtgactaattgatttttatattcgaacagtgttactactccgatgctgctatagcggatggttatttcagtgtgctggctgaggtctacatgcgacaagagatacccaaatgtgaaatccagagactcttaagcctgattctctacaaggttgtagatccatcaagacaaattcgtgatgatgctcttcagatgttggagactctttcagttcgtgagtgggcagaggatggcattgagggctcaggaagctatcgggctgctgttgttggtaaccttcctgattcctaccagcaattccaatacaagctctcatgtaaacttgccaaagatcatcctgaattaagccagctcctgtgtgaagagatcatgcaaagacaacttgacgcagtcgacattattgcccaacatcaggtcttaacatgcatggctccatggatcgagaatctgaatttctggaaacttaaggactcaggttggagcgaaagattattgaaaagcctttactatgtaacatggcggcatggagaccagttccctgatgaaattgagaaactttggagcacaattgctagcaaacccagaaatataagtcctgttttagatttcttgatcacaaaagggattgaagattgtgattcaaatgcatctgctgaaataagtggtgcatttgctacatatttttcagttgcaaagagagtaagtttgtatttagcacggatatgccctcagcgtacaatagatcaccttgtttatcaattggctcagaggatgctggaggatagcatagagcccgttgttccagctgcaaataagggtgatgccaatggaaactttgtcttagaattctcacagggacccccagtagcccaaattgcctctgctgtggacagtcagccacacatgtcaccattactcgttcggggttcccttgatggtccgctgagaaatgccagtgggagcctcagctggagaacagcaggtgtaacaggacgaagtgtgtcaggcccattaagtccaatgcctccggagttgaatattgtacctgtaaatacagcacggtcagggcagctacttccatcactggtaaacatgtcagggccattaatgggtgtaagaagctcaacaggaagtttgcggagccgccatgtttcaagagacagtggagactaccttattgacactccaaactctggcgaagaggggctgcactctggtgttgctatgcatggagttaatgctaaagaacttcagtctgcattgcagggtcatcagcaacactcattaactcatgctgatatagcactgattctacttgcagaaattgcatatgaaaatgatgaggattttcgagagcacttgcctcttctttttcatgtgacatttgtctcaatggacagttcggaagacattgtgctagagcactgtcagcatttgctcgttaatttgttatactctcttgcaggccggcatttggagctgtatgaggtggaaaatagtgatggagagaacaaacagcaggttgttagcttgatcaagtatgtgcaatcgaagcgaggaagtatgatgtgggagaatgaggaccctacagttgtaagaactgagcttccaagtgcagcactattgtctgcattagttcagagcatggtggatgctatatttttccaaggagatctccgtgaaacttggggagctgaggctttgaagtgggccatggagtgtacttccagacaccttgcttgtcgatctcatcagatctaccgtgcattgcggcctagtgtaactagtgatacatctgtattgcttctccggtgccttcatagatgcttaggaaatccagtacctcctgtgttgggatttataatggaaatcttgatgacattgcaagtgatggtggagaatatggaaccagagaaagtgatactttacccccagcttttttggggttgtgtggccatgatgcacacagattttgttcacatttactgccatgtgcttgagctcttctcccgtgtaattgatcgtttatcattccgggataggacaactgaaaatgtgcttctttcaagcatgcctagagatgagttggatactggtagtgaaattggggacttccagcggacagaatctaggaataattatgagcttccaactactggtggacctttgccaacatttgaagagtacaactctgtgacttaaggactcatgtctaccgttagtctagtggttgtttc

SEQ ID NO: 184851 - DNA, 1708 bp, Cannabis indica
atttattaattatttaattttagtaagtacacgtattaatgttacatagaataaagtcgtggttgttattagatattttgtgtgtgtattttataaatataaacataaatatctattcgcaaaaatccattttacataacaattaattctattagctatgcgtcaaattaagcaaattttaatataaatgaaaaatacaaaggtcggggactttaattgcatgaacagtactctagatattattgggcttttatcagaaatttctttttgtcatcagaactttttttagttaaaaaacccaaaaccaagtagaggaaatattctcaaattttttaaattaaaaaggtaataattaataataagctgtgtaggtgcaggtagacaaaaatgacaaatatataataatattatatcttaaaattaaataggaattataagaaagaaaataatataatcaagatatttgaatggagatatgaaaggatgaggatggtgatgatgatgatgatggtgagtccgtaggagtacttgtggttgaagttgaagatgatgaagatgaggagagtagtagtagttttcgacaaataggacaagtaggattaagtcgaagccatgaatcaacgcagttgagatgaaacacgtggccacaatcaggtaacatccgaagaacatctttctcatcataatcacccaaacacacagagcatgatgatgatgctgatgatgaccttattaatgacaaataattacccttattatggttactatcacgactactaatactcttaataataaccttattattattagtactattactcctaataataaccttactattattgttattattaactccagctcctaataataacaataatttggaataaagaagcttaggcatgctttccagagcagcctcgtcgagacctggtggaggaggagtagtattattaccactaccaccaccaccagttacggcggctacgtggtggagtactccggggagcccccgcgctcgccgcccaatgcaataagcaaccactgttacgattgttatcactaccagaaaacaccccattattgcgattccgaacacaaagtggtctgatgatgatgatgatgatgatgatgatttgttgttgtactccattagtattatgattattatgtatcagaaaagagatagagataaagagataaagagagagagattagagattattaataattaataataataatttgtagagatttgaggccgggaaagaggcatgcattaatgtgtcaatgttgttgtgtatatatatgcgtagctactactgtacttaaaaaacagattaattaataagtaatgtatatctaaattatatgattgtcaacggaagttaggtaatattaatatagcttacattagtataaataaaatactatacgatcaattatattataaaaattacaaatacgaaaattttattaatatctcaaacgtcccatgggtactttaggaatattaacttcgtctatttatattattatgacatgaaacacacagttcacactagtatatatatatatacttgggtttgtaatttcaatttttaagtaaatttaccttattttaaacaaaatttggtgaaaaaaaagaaaacgctcggtctttgatattagtcaataaaacaacgatcctttttcaaaaaaaaaaaaa

SEQ ID NO: 184852 - DNA, 1579 bp, Cannabis indica
ttttttttttttaatctttttgagaaagtcccttatttgttggaagagcaagaaacaatttattgtttctcaattctctatgaaagctgagtatcatgccatcacatttactactaaagagattgtttggttgagagatggttactagtagatataggtatcattcactcttccagattggtcataactcaatttttcacgaacgcaccaagcatattgagattgattgtcagtttactcgtcaccatctgaagttgagcactattactttgccttttgtttcttgttagttgtagcttgctgacttttttactaagtcgcatgcgatttctcatttttattttattttaggcactctcgatgcttcttgcaacgatattatgagtttgagggatagtgtcaaataattaattaggattattttagttgtattatttacttgattttacaattaaataaaaccctaatctctctattttttttttttgcatctctttatttttatttattattcttctcaaataatcatcccaaactagactaggaaactataactatgcaggtacccaagagtgaattgattttcatttgttttaaccatatgtttcgccattttagccaccccttttaagcctttttgcaagtatgtaagttactattctcaaattttattattcttccatcctaatggttgatttgacaattgacaaatgtataactaaaatttttcacatattttattctcaacctagtaattaatcgtgtgtagatcatctcatacaatctcacgaagcaaatcaatgagacaatatgtgcgatttctttctttggataagcagaggttgcaactgcttcaatattatcttagtgtacacgtttaaaatcaattgctgctgccactttgctagacaattagaatcaaaataagagcactttaattaataatttttgtttaggtgtgttatcatttcttccaagagtcaacactttgtaagattaatgaactctaaactacatgaaacttatgcttagtatacctgtttatatatgatatgattatctaaactagcttgaaaattaagtttaattgtcttctctttttctggaaaaaaaatgtatttggccaaatcaacaataaagagtatgagcaaatctattgccacacgaaaaaggagtagcaatgccaaaaactttcaataaaagcacctaaaaaaactactataatcaaataatttaattgggtcgttaatttatcttttttttttttatttgggttagaatcaatttgtatttaatcagaatttatatatatatatatatataaatatattctgagttacttttgagttagagaatgttgcattctgtttgtataaaccaaattaggaagaaaatgtaaaggacgacaacatgcattttaaagtgaaaatgtgctttatttctaatgttgaaactactattaacaaaaacgagcacattctttcaaacaaggaagaacaaaatgactacttagccataaatgcttatgatcctaaccctacactgaagttatctttctttacaaagaaaaaaaataaaa

SEQ ID NO: 184853 - DNA, 6688 bp, Cannabis indica
aatttaatatgtactaaatcatgccccctgaactttcatccacattagaatttatttttaactaaaattagataaaagtccttaaatttaacaatcttaatagttcagggggaatttttaacggccaaaaagttcaggagcataatttagtacatgtcaaagttcgggggaaaaattattaattaggctaacaaatattttctccaaaaaaaaaaaaagtattgatttgcataatttgtcttgaaagtcccatttatcctcataaaaatgtagattataaaaactatgaaaatgagacttggtttttgggaagcatctttctgattctttgaacagatagaccccagtagtcagtagaagatgaaaatgagaatgagaatgagaatgagtttatcaattgacagtattttgcgtccaatcaacacagccctcttctcctccaatccttgctttctaaccaccaccaccactccggccctttcgcccaccggaataaccaaactttgctctcattctttctctaactctaccaatctccacactcaatctgctcttccaaatccaggttccttcttttctttactttgctcacaacacttgcttccattttaccatacccattttcttatttgttgttcgtttgtacgttgcagctaagttggagccattcgatgagggtaaagtgagtgttttgaagcagaaaatcgagctgcttggggtttcttgcaatcattcttgggtgcccggacgatactataatattttatgtcctaaggtagttattggctttttttttttttttgaatatgtatttttctttcaagtataatgttgaaaagtttgagagaaaactcccatttcttatgagagaatattctggttatttgacattgacatttcaagtagctattttgaactatttgtgttctgataaagtagtgcaatggtggacaatcaatggagaggagtttgtcatttcacattgtccaaaattggtgagttactttgtgttccttagtggtttgtgagatattgtagctgtagtgaacttttctaatttgatgttgtagggaatttgctatgtggaggtgctttcgctttgattgcggttgggctggtcgggtacagaatatcatttttctatgtaattattttcttgttctgtttatgctcaaaagctttgaatttgatttagtctcaggaaattcattgtttgcaattcaggtgttttcagatgaccgggaagcagaaaatagagcagaaaggaaattcaaatcacctagagaatcgacagaaaagagcctgggtttagtgcctcttggtgcaggggtatatggattaacctctcttctataatgcgtgttatgtgctttctcttttcattggtatccttgttatttattatggtaggatttttcgtaaagcatttctgttcctgtcatgtgtagtcctcaaaagggctaattggatttcttgatcataggctttgaatacttaatgtgtattagataacttaaatgctgttaggaggaaggtaaagcattcaatattggattatgtttgatactacaggagtgtataagcaatttcaaatgcaaaatgttgtgacattttttcctaaaattccagcagcgcattgtaaaatgacgcagtggccctcaaactttaccatctgtattcttgctgaagtcctatttttagaagatgtaccaggatgtacaattaacaattgtcaattactatggcattttttttataacttatcccattctaaaattcttttttttttcaaaaaaggtatgcaacaagtattggcctgttgttggagctacatagaaaagtcacaattacatataattagcattacagccataaaatgagttggtgtgtactttcaaaataagggtatcattatgcttcctattcaatagaatttgtttagtgaggttagcttcttggatttagaattcttgtgccatagctccctttggaggttttcatgaaactcgtgttgtactgattaagtttgttaagtcatctcctgttattcttcctttacacctcaagcatcaatttgagattgcaggaacaattatttaccttaagaggtgtttactctgtcttattcttcaggttattgcctacttccgtgagcgaatgatctccgaggagactctgcatagaaatagtgttatgcaactctctggtaataaggtacattcaattgcatgaactgttaaatttatccgaccatacagttcctcaaaatatccttaactattcttgggtatttgcaccagtctcttatggctgatattgtcttcagtcaacacctttctttaacaactaaagtatcccacacgaccagttcattctctaatatgaatttgcaaataaaatctaaggattgtggaatctgatatctatcgcaatgttaacaaattatgccttgcatacatacttatccatatctttttaaaattacactgtcagtttattttaaactattggtataattgccgaaatattatagttgcatgattagtttttcagtaccgactctttcaagcagttaattttggtttcagttctcagtaacttcactgatgaaaggttttatcatatctaaatagactaaatttgcagcttgtcattgcatttacttatagacgaaatggatttctagttggttgcaaataccgagcaatagagaaaagaagattttggcaggtacattgctccttattcctttaaaagtctctaaatgggaacatgaacatttggtatgagagtgttacatcctagttgctcatttggtttgtttgcccatcaattttttttgtatattttaaattgaaaaaataaataaaatcatatgatgataccatgttggcttgttcagtgtgatctggattggttcttgaatgtttttgtttagttttattttgtaagaaccgataattattttattagaaatcccctgcacagaacaaagtttgaaaaattaggctgtgtatttcctttttaaaagtttcttctatgtcatttgattcctatcatcccttgtttttcagatgaaggatactgaaaaagtattatatggactggatgacattattgatgcatctgaaatcatcattgtaagctaccttatttggataacagatattttattttatttctttttctctgggttaaactatgcccctctgatttgattgtttttattttgatgctgcttttaggttgaaggtgagttagataagctctcggtggaggaagctggcttttacaattgtgtgagtgttcctggtggtgcgccaggaaagatatctcatacattaccatcttctgagaaggttaatacaaaaaccaaccaaatacatgaaaaagtaacatatttccctttaaattatattaacatcccttgatttacatgctgttttgttttttgtttttttgtttgcatgaatttaggacgttgcatttcagtacctttggaacgacaaacaatatttggataaggttaaatgactgctgcccgttaacagcaataagaattaagtttcttttcttccaatagaatatttcctaacattttcttttataagtgaaggcttctcgaattatccttgcaactgacagtgacacacctggccgagctttggctgaagaattagctcgtcgtcttggaaaagacaggttgttgaatgtggcgcaattttcattattatatattttcttcctaaatctgaatatttggattttgagaatttttactcaattgatgatgcttgactggcacatcttgtgcttgcaaataaagattgaggttttgaacttcaagatgcctacgtagtacttggacaagtgaggagttcttttcacatatgataaactactgttttcaattctgttctaaaatgtagatagagctagtaatgtacaactgaatcgtgaagtggaccatttgtgacttccacaattttctgtctgtcaggtgttggcaagtaagttggccaaagaaagatgaacatagtcattacaaagatgctaatgaggtgctacattgttcccactctctgtttctgctatcaatcttttattcatattgactgaggttgctgttattttttagatgccaaaatatggatttgataaagatatgtgaaaacagagaacacgggaaaattcttactcaacttcaggaataagcaaagaatctgtattgtgtagattctgttgcatttatcatccacactaaaaatacatataatggttgcttactgacatagaacatatgatgtgaaattggcataactgattccaaagtaagctcttattaacccccaaatactgtttatcttcaaaaatctttttctataggtcagactggaacaacacaatattagcatttatacatcataaaaagtttatggattagttctgaaaagtagtaaaacgaaatgaattgattagaagaaaattttcgtacgcattggatttacttcttgcatgcttctctacaatgtttgatttatccacaggttttgatatatttgggaccaagtgctttgaagaatttaattgtaagtgccaagccatatcacaaatccatggatgaccaagaagtatgaagtctatactctatactctatactgtcatacagaatttctctatcatgcaattgcaacgacagatgaaggacgcgaaatggtgtagatagtgtcgacagaagtgagtttctctcttttaatctgattgtagataaagtgtagttgtacttgtatatgaaactgagagtgggacatagaactagttctgatagaacaagtagtctagtattactatttagtattgatgcttatggttgtgtcatgatttactatgagaaatgttcgtttgattcgtgaactaagttgcatcaacaaagactaggaagagagaaaatcacaggtcacagaatatcatttgtagaatattctattgaacaaattttaatagttgtctcaatgtttctatacagcttgattacattctgcaaaggctaaagttcttacagtccaactttagatattttcttatggaaaaaaattataattattttgtgtacgtactcatttattatagaataattatgattttttccctaactgtcacttatatagagtgccacccagtttttaaaaaaaaaattactcaaactatcaaaactattagaaatgcgtatcttcatttgcattgttttcatttttcgagttaatctgacgcagtttaagagtctagacaaaaaatatatacataaatagcgatctaataataaattttagaataaaatcacacaaatcaggaagtaataaagttacaactatcacttatatacttgattttattcgccagtagcttgattgtagatattaataagtccaagcttgtttgaaagaaagtagaacactttttagatagtcccttggttagtatatctgctagttgtagattagttggcacaaaatgaatgctgattaacattatccctccatcaattttttctttgttaaagtggtgatcagatccacttctacatgcttggttttatcataatgtacagtattatgtgctatactaatagtggacttgttgtcgcaaaatagttgtataggtgcttcatattctatctttaactcttcaagcaacctttttagccatataaattcatataccttgtgtgctataactctaaactctatttttgcactgtttcttgcaacaacagtttgctttttttgcttctcaaagtaactagattttcccatagaagggtacaataacttgatgtagatttcctatcatcaattgatcttgccagccaacatctgtgaaaaccacaacctttcttccattagtcctcaaagaattatccttttcttggggtttgttttaggtatctcaatatcatatacactgtgttgagatgaccttggcaagaattgtgcatgtactgacgtactaaacatacggtgaaagctatgtccagtctagtgtgggatagaagagcttgttaattagttgttgatatcctcctttatctgcaggatttccttgaagcatttttttcttatctccaagttcaattggggtttggctcgatttacaaccaagcatcccagtttcctctaagagatcaagagtatattttcattgagatacatgaatgccttttttgtttctagcaattgccatccctagaaaatatttcagtgttctgaaacttgaaactttgccatcatttcttttactcgtcttattcattcagtatcacttctagtgacaataatatgatcgacatacactataagaatagtaatctttccttcccttgagtgtttaatgaataatgtctgatcaatttgatcttgtgtgtaccctagatttttcaccaccttagagaaccaatcgaactaagcttgagggattgttttagaccatacaatgacttttgaagtttccagacaattttttcattatggatttcttcaaatcatggtggtctgttcataaaaacctattctacaagttcaccccttagaaaagcattttttacatcttgcttgtgtaactctcagtttagatttgctgctagagagagaaagaccctaatagtattaagcttggcaacaggagcaaagg

SEQ ID NO: 184854 - DNA, 2428 bp, Cannabis indica
tttttttttttgtagagagagaggaagacttgaattgggctctatttatctctttatttgagcccagccatcaaaccctaaaacccttctgaatctttgatcgtccttttcacaaaatcacggctaccagcagagaagaggtgaatagagccacacagagatagccatggcagacaaggcggtaaccatccgtactaggaaattcatgacaaatcgtcttctatctagaaagcaattcgtgagtttctaacaacaactctagcgtgttcttaattattgtgtgtggttaatgagaaaatttagaaaccaaaaagaaactctgtatcaatttttcctgcgattatagatttattaaaattgatattcaactgggttcagtgagaaaataactgatggttaagtggttttgatgcaggtcattgatgttctacatccagggagagctaatgtttctaaggtttgattttttttttttggtctttttcggtggtctttgattcggattaaggatgttaatcactctatgaagatcttaatctttactgtgcatagcttacaactgagatgaatgtcttgatttcgtaaaagctgtaactatagcttaactgaatgtttagcacaagctttggattgagtgtgattgttttgtttctctttttaaatctgattctttctacattaaatagctgttaatgattggagaaggattttagctttatccattttataatgtattaatcatgtatgtaggaaagctaatacttgtgaagtaaatttggcttctcagtgtgtttggaactttaggatttcaaaataataaaggttggggttttgcccttctgcagagttaaataatttcttctaattatttgttattcttctattgatatctactatcacgggtgcattaaaataataataaaagaattgactaaatgtacatctagcttcatatttattaatgacaattgtacatgtaatggtgtttgtgcagcaaatctgatttttattttatttgctcattgatcgttgttcctttccccttgttgattttttgtcataatcaaggtagagttgaaggagaagcttgcaaggatgtatgaggtgaaggatccaaatgcaatctttgtttttaagttccgcacacattttggagggggtaaatcaaccggttttggattgatatacgattctgtggaaaatgcaaaaaagtacgagccaaagtataggcttgtcagggtaagattaatctgctcacttggtattatttttatgtatagttatgcattgttgtatagttatgatgatagataaatagatttcatctattttcagaaaggtttttttttaatacctgcaagtttatgtttatgctatacattcaactagactccaacagcacttaatgtaatacagctcaagacacagtgaaatggggaaaccactgattttgaaggaatttctctgcatatttcctagacttgttttctctaaatttcactctcttttgaaaactttgcagaacggactagatactaaggttgagaggtcgaggaaacaaatgaaggaaagaaagaacagagctaagaaaatccgcggagtaaagaaggtatgacattttgttgtctttttgtacttgtttgcatcacactttgaatactatattatatgatttgtagtgctgtttcttttccagctgtaaatatatagttttactactaatgttggtatcttccatattttacggccattgctgtgtatgctcattggctttctttttcgattgtttctcgctcagaccaaggcaggtgatgcagctaagaagaagtgaggttctgcataaattttggctccatgttttgcagattttttcttcattacattgtttttttcatcttacgtttgcttgttaaacttggacaaaagttttgggaaattcaactttgagaacttttattttccgtttgtgttgctagttactttttatcaggaaaactgctaattatgatgttacatggagacagattgaattttgatttttaagttattcatgatgaaaagaaagatcagaaaatcttgtcttgagatatgttttccacatttccataaattttgaaaccgaaagctacagctacaaattttattcaagtggcaaaccttggcttaagcaagggtgaatttaagtctttgtgcttgctaggcaccttaatagaaggaaagaaaaaaaaaggttattatttgaactaggaaaacaagaacattttaaactaaatttagggtgaattttagttcttatacttgctaggcaccttaatagatgtaaagattaaaaaaaaacaagcttattatttagactaatttatttatgttatattaaatgtactatttaatagaaagtgttagttattttaaaaaatattaaaattac

SEQ ID NO: 184855 - DNA, 4020 bp, Cannabis indica
tgagtaatatataattaatatattaatacactacggcacatcgtgttaactaaaaaacaaagaatcttattattgtattttaaaaaaaggtgtcaaaaaaaaaaaaaaactaattatatgtttttacatatacaaaacaacacacatacaacaagaaaaaagtatcaagaataaactaaaaatacacactataaaaatacacatgaataaacaactaaaaagtaattgttcaacaaaataaataatagaaatcacttgaaaacaactaaaaaatatcatgaatacaacaaaacaaatgcacatatataaaacaaaaatattgtctaaaataaactaaaaatatacacgactaaaaatgcacataaactatacaacaactgaacaaaaaaatgtataaaaacaacataaaaacaactatagaacacttaacacaacaacataaaaataattataaaacaactataaaataacaaaaagacagctataaatcaaatagaaaaataacaagacatcaatcttgtcaaaatatgtaaatcattcataaatcaactttgaatatactacaaaatattttaaaaaaaaatgtatactcattttattaatcaagtaaaagatagaaaaatataaaaagagtgctcttaacttttttgttagagagaaaaagagtgttaaacaaattatcataaaacaatgaaagtaaaagaattatattttagtaaaagttaaaagaaattaaataaagatttttttattaaatgtgattaattaaagaaaaataatttgaaagagttagaatgagaatagtaagaaaatgaaaaagagaagaaaaaatagaataaatagtcaggtaaagcttattaaaaaaagatataaagaagagaaaaaaaaaactcttttaaaagctttgataagtaagtaaaaaacataaaaaaaataactagattaggaaagtataaatgtaaaaatttcttgtcaaagtataaatgtaaaatttagagaaatgttaatatttggtgtaaatacgcctatataggctaattagttttgaaaaattctatgctacacccttacaccatctccaatgtaagatttaaaatttatactaaattggcacaaaaaataagtttgtattatatttaacatattacttgttagagaaattgaattagcaaagagtaaatcgagtgctgagctaacaagaaacaaatgattgataagttagggaattccaagacagagtgactaattattgtcgtgtaaccaatttttgttatgcatattttaatgtgtaatattctctgctacatgtagctgttgtattggttctaaatactagctttgtaatatttcttggctatataataaaatatgcaatacttaacaaatgagctaagttttccaatcaattttttccctaaaattttacttggtatcagaaccttgaaggcctttgctgatgtcgaccaaccaaaggtagacgagtcaggaaacacctgaaaatgctagtggtggaaactctcgagtaagctccatggcacatactagttcctctgtggttgctacccccttcaatctagcgacttccttcaatattactatgagtcagctatttactgtctaactcgacagaaacaactttcccttgtggaaaactatggtgtataccataatcaaaggtcaccgattagaaggctacttgaatgctttggaaccatgtccaaatgagttcatctcactagaaaaagacagtgaaggagaagctatagtcactgaaattcagccaaatcttgatttcgaagcttggattctccatgactagttgttgatgggctggctatatggatctatgataaagaatattgcttcaaaggttatggggtgcagattgcattttcactttggacagctcttgaagaactttacggagctcattccaaggaaaatatgaatgatttgtacacaaaatttttgataacacgaaagggagctcaaccaatgactgattacttgaagatgaagagaatgtggcagactctttggctctattggcgatccttacccagaaagacatctaatagccaatatgttgttaggtcttgacattgagtacttatcaattgtgctactcctggagcatagaacaaatttaacttagtagcaattttaaggctctctctttagctttaatagtaaactcgaaagatggggagctgtttcaccaactagtaaacacttaaacactccttctgctagcatcgcacaaagaccctccaatccaaacaatataggcaactattctagaagaagtaatagatataagaataaccaaggtcgtagaagcttatactagggaaactcatccaaaggtggtcataaccaccaccacaacaacaataacaatcgtggaagaggcagatttagcagagatacctctagaccaaccgtcaattgtgtaggaaatttggtcactctgcatgtgtgtgctattatcgatacaacgataactacatgggccagccacctcagagtgagaaccaagacaaaaattctcaattgagagctcttgtagccactccacaaacactgaatgatgattcttggaacacagagagaaccaagacaaaaatgctcaattgagagcccttgtagccactccacaaacactgaatgatgattcctggtatgtagatagtggggtaaaaatcatctcactccaaaattagacaaggtcaccaacaaagtggactataatggtaatgaatacatgattattggctatggtagcaaacttgatattaaacacattggtactggtttgcttaacactacaggttcaactcgtctagttttaaatgatttccttcgtgttccctctattacccaaaatcttattagtgtttctaaattaactagtgacaataatgtttctattgagttttcccctggtttttgttgtgtgaaggaactaacaacaaggaaggaggtgctacaaggaacgcttaaagatggcctcaatcaacttcgtcctattccaagatagattcatgcctttcaaatcacacaaggtcctttttctactatttccactcaatatcatgttcaatctatttttatttccctaaaggatacctgccatagacacctagtcatccctcttgtcgtgtagtgaatcaagtgtaataaagttgtccaatgtacattttagtgtcaacgaaactcacaacctttgtgatacttgtcaatttggcaaggcacattccctaccatttccaacatctgatagtcatgctgctaatgttttagacttaatatatatagatttatggggaccaggccctatggcatctcacactaattgtagatattacatacactttctagatgaccataccaacttccaactaagagatttgttgcttgtgcatccactaacatagtctaccaggcccaagacttaagcttgatgttggcttcggcgagttaaattattgtctttactatgatctacttgtctatttctcatccacctaggcttattgtcatgttgttttcattatgactaggctactgtcaaggctcgccagttttctaagaacctgaatgattaaggtcacgcagccgctaccttaggagggctttcagagatgcaagccaaataaaagcatgtagaggaggaggtggagactcttaaggacaatgtcttggcccagaagacattgagggaatgggatcagaaggccaagacttgatgacaggcttagactcagctgctggcaaccaaacaagtgtatctttagaaagaggctgatttatctaaggttcaattggagaatgatagtcttaagcaacgtttctctcatcttgagaaacttcatcaggctaatttacagtctattgccaatatgtgtgtggagttggaggagcttcatttgtgtgggctctaacaaattggttaattaagttttaagataaaaaacgccaatccgacttccttctcccatcacttgcgagcaatgcaag

SEQ ID NO: 184856 - DNA, 5324 bp, Cannabis indica
attaatatatatgtatagcggtcagtttcggtcaatttattatccaaaaaaaaaaccgactgtttaatggcagtttttttggttttcagttttgtcgatttcggttccaacagtgtttggaaggtcggtttgaacgattttttcagttttctagattttatgctcacccctacatgaaattacttcaaggatacaaaccgaaaggcaacatacctcccaatgcagtatgcaaattgaaaaagagtctatctggcctaaagcaatcatcacggcaatggtatgccaaactcagcactaccttgctccaacaacagttcatccagtccaagaatgaccattctctttttatcagacaaaattataatgtcttcttagcaatattaacatacgttgatgacataatagttgcaacaaatgacactgcagctctaaatcacttcatcaacaaccttgactcccaattcaaacttaaaaatcttgaaccacttcatttcttcttaggcctcaaaataatcgtggtatatctgtcactcaacgtccattttggctcaaaacctgtctccacccccatggaacccaatatcaatattgacaatgagacaggtcctctacttgacaacccaactcaatatcaaagcctcattgggaagcttctccacctcaccatcgcttggcctgacatatcgtttgctgtcaataaattaagccagtacctacaagcacctcgtcccctcacctcatagcagccaaccgtgtcatccaatatctcaaaggaacccctggacaaggtttgttcttctacaaaattgctcccacaccactgtagtttcgagcatttgcagatgcagattggggatcatgcttggacacacgaaggtctatctcaggttactgcattttccttggaaagtctctaatctcctggaaattcaagaaacagcaaacagtctctcgctcctctgcagatgcagaataccaaccagcggctcctctgaccattctcgccatcgacactccatctgtcattttgccaaacaactatttacttccatcaaatcttcatttggattagacaaattactctttttggtgatctttagtccttacaattgcgtgccttcaatcttgatggatacattcttggcaccatccctgcactgcacctccaaatcttcttacgagtaatgttcagaacccacattactacaaactgcacttttagtattaattttaaacttatacttgttagttttatggtactaaattaagtacacaacgaaaaagtttcgtattatttaattatcatcgtaacatagctcctaggatcttcatatgtttgcacattaaatcaaaacaataaacaaaataagtttagattatacctcttgaagtctatcagggtatcctctaaacttctcataagttgtattccttaattcagttgatgaggaatatgcaatttgaacttacactagtgtcttccaaatcgatctaccacacaagaaatagtgtgggcaatgaggataaagtgtataacatttattctcaaacacaaggaagaacaactaagagaaaaatagtttcatttttctctctacaaatttcaaaatatacttttaaaaaaaagatgttctgatttctcaaatcaagcttcattttatagtagtaaaatccctttaattaaatcattatttaatagtttaaataaattaatatttataaccgaatttgattattgatatttatgagaaaaactcttatattctcaacaaccttgacatatttataatcacttaacaaattagatatttacataactgaattaattaaataattagatattattattattaattaaataataataacaataacaataataataataataaaaaagaagccttttatggcgaatggttccaactccaagtatataaacgagaaaacaatttcaaaatttcattggaaggaatattagtatcagcggccataaagtttgcccaaataaagagagacaatcatagcacacaaagttaagttgggttgtctactgaaatggaataacatttcaatttgtttaattagaaagggaaaaggaaatttcatcaatttgaacatggaatggttcattgcgtaaacacatttcaattattattattaatattttccatacataactccaaatgaaagcattcatacagttttttattgttgatcccaaccactgtaacaatcatcgaaaacacagtcaagaactaaaagatctcattccatctttaacaaacaagttggcatccaaaaagcatttacatacttattattaacactacatatatgtaatatttttggacatagacattgtcacttttacttattatgactacaaatgaaaacaaaaacaaaaactgaagaaattctggaccaatttacttacacatgtatctacaacttaaaagagctacaaagtacagcagccaaaatattcaagagattagtagagaattaatcacctgaatttttcagcagataccaaacatgtctgtgttgaccgagataaagatgatcaaacaacttgagcagccaaaaggtttctcagctgaagcaaatgttcatcatttgaaatgtgtagagagaggcgtagattagttagcatagactcctgttcccaacttaaggggccagaagcatatagtgccaaaactgttgacttgtaggcttcaagctccaagttatggatgtcaactcctagtttgcttccaagacatggaagaactgtgttccttttactgtacaacaagggcaatgaagatgactcagcgtccgaatcaggaaaattcttttcgttaagcttgagtgagcttcctcttgtggagttagcagactcgttcaaactacaactagcaaccgagcactcgttactatcttcagtagactgaacagaacaatgtaaccagttgtttgtttcttgttccggtttggtggtgttatctaatcttatttggtgaaaagtatacaaagaatggttttttaccaaagggctattgaatactcctgcaactggtttggatgttcttttcctaatgttttttcccaacatttgattcttggagactggttcatgaagaggatcaaaggcatttgttctcttcttaaggcttcttggtacatattcattttttgtgcaagtttttgattcacaaactgcctgaactggatcactgcaaaccaagctccaacactggtttgaaatagtttgttgtggagaatggctagcttcctgtccatggttttgaacctgtaaaacacatatgctaagacataagaaaactccattcacatagacaaacaatcatacaaaacattatgatactagaccgattattactaaacttcaaagaaagacaaaatagctgaaaataactaaactaatagttgaaaaagttgaaaaataaaatctccaaggtcaaattgtcaaaagaatacagaagacaaaaaagaaaaaactaaatgtgcccttactttgacaagcagtgaccacttcttctcatgccaaagtttatgagttcttaaacaagacacattgaattccttgagttgaatgaacccataaaacttaataaccaaacgaccctttctcaatactttggctacctttccaaccctccaacactgtgtatcaaacacctcagctatatcaccagccacccatcttttcttctcctgatcatgttgtggaggttgaggcctcatgttcttctcctgcaccctttccacaaccaattttcctcgactgtccataagaaacttgtacctgatcgtgtaatcattgccatctacaccaattaccctgccaggataccatggaccgtaaggacccatctgttctctcatcacctccactgaactcccttctttgaactccatttccagactcttcttaaggtcaacctgaaaaatccaatagaaattaacaatgaaaaaagaaagttatggggatttgaaaactacccaagattacattgttgtcctgaatctgaaataaatacagaattaagcaaaagaaaataaataaataaataaattttataaggaaaacgaaaaaaaattgatctggtagtttgatgtactaaaaactttgttcaatctccgagtaatcgatattttggaagctaaagcaaccatcagaaagagtaatcagaacccaaaacaagtcagtgtgaaatatcaattggccaaaacaatccatctcatcatgattcatgaccagtaaacaaataaaataacagaccaaattagcatttagtccctgaaaataaaaaattgtaccaaaaaccaaaacttagatttagcatcattaaaggtggtcaaatccagtaccattacatatgcaactcaagaaaagctctcccttttacattgcaatagaaacaaaattaagaacttgggtattaagaaaaaaaaaaaaagacccagaaaacggaggaggggatttaatgttggaaaatgaatgagactgacctgggactgaggattgaaaaaacgaacaacacgtgtttgagcttatgttgagctcaaaaccacatctttgtggaatgaatggcgtcccttaagcctttaatttctttttttttttcttttgttcttctaatttaattgattagaaaggttgagtgcgatgagaacaaaccaaacccaaccaaaagaagaaaagaaaaaacgtttcaaaagctttggcatacgtaatgaggacaatacgctattttgattttggaattgtttgccttaattggaccgttaatatggtttcttcctttgtaattacctgcgtatcctttgtgtgtcgtttttaatcattctaatcacacttttactactacactactcgtctctgcgtttcaatgacaggtgacaatctccaacttcgccttattattattattattaaaattaataataataattattgacagagtttgatgattctacgaacatgttgtatataacacgaagaaacgtttcaagggaattcattcatgttataaatgtataaaaacactgaatgagatgaagagaataataataataatataagaaggaacataacgtgacaagacaataatcctcgatccaaaacttcccaaaaaaaagggcagacacatttatttgtgtggtgttatgatttgattttatgattgtttgtgctaaaaaaaaaggttcttcctcgtatcacttcaaatgaagaaagcgcgcttttgtgactcatcagcgtctttgctctaatgttcacttttccaagcattcccgcacccgcagccatgatgttt

SEQ ID NO: 184857 - DNA, 1304 bp, Cannabis indica
aatacttaagtttcttgtagtgaattgaaaatcgcgtgagaattaatactgttgacctcgcttttaaccaacaacactgagtctttaaagtaatcgaattgaatgatcaattaataataaagttataataattgtttataaaggttccgcactgtgataatggtaatagtctactcctctttctgttgtattacttaaagaattattaagatcacaagagttcggccaagtgagtttctaaataatctcgagaaagcttacaaatattttagcaagatagtagctctttcgaaagtcaaaaaaaagatccattcgcagtgaaataactcccctgtttataggaaaaataaaagatataatgtttcaaaaaaatcaaagaagaatttgataatctaaatattaaatctcacgattctctcaattaaataaaatcaatcccataaaaatagggattccaattaagttataattgatgagatatttaaagaattatctttggagctcttcaattatcgcatccctctatacggagaatggaactcaattaggcatatctgatttgcttgtagaagtataaggcatggaacctgctcggataatgcttgctaacgaactaaactcaaccggtttggctgtaaatcgttctagatggaaccctaaactagtataccccgtccagctgcaaacatacttaatgtgtgttaccctattgagtgccacattaccttgtgcaaaaattatgataacatttgctcccaagtacacgtgggagcttctggtcgcatgggaacttccaaggttttcatattgcttggattagtagcacgtgttaggcttcacatgtcgtactggaggtgacatttgccttgcttgagacgagtgtatcttctttcgtctcttcaaatctcaaaatttaatacttattcaaaagttgagaaatgggttaacgtgctttgacggttgcaccctcactcatttaatgatcatactttttgtcattttgggggtgagaatccaatttcaattgcatactgagattaccctttagtgggtctataagaggaatttttaaattcattcagaactttcaacagctcttcatcttcaaagcttaaaaaaaggaaaagttgttcttcaagctatgtgagcttcgctttccatcctgacctcttccactaagaaaattactctcggtgcaatagtgggtaagttatttttttttttaacttcttctttattttttgtttctttgcttacgcatgtcgtgaattactggaatatatgtgtattttgttgttgcttgc

SEQ ID NO: 184858 - DNA, 4971 bp, Cannabis indica
tttttgctagtatatatataagcgtggagagtatataaagacttgcaaagacaaaaaaaaaaatgtgaacgttaatgttctttgagaagacttggattggaagagatgaaaatctattttacacatatatagttaattttttaaaataaaaaaaaccataagattaaattactttgccaagaagaaaaacaattaaggaaaccataagatatgaaaatgaaattgatatataaattagacagtagatcatattatatattaaaatgcttttattacaataataaattaggcaaaattagtagtcaaccttatatttatagcaattaattttaatatgtaataaataataagtaaaaaactatatgggatgtttagaaagtataaatatgggttaaatatggggggtagtatcactcccaaccctgtcctgaatccgttttgggttataaaattgcactccacccccgtcccgttacccatcattatccatcaaggcgggtaatctcaaccccatttggggtgggtacttgtgggtacccatctctgcaggttaagtttttgtctctagtcttcgagtgaaacactttaccaaacacaaaaattatcaagggtttctcaaggcattcatgcatgaaagaaatcaacagaaaattaaatcaagaatagagagggaatcaaagaagaacatgtagattgtagaggttcgcccaaattgtttggggtacatcctctatcgagctcgccacaatagattgctcagtcaatcatattactcaggccaagattacaacagtattcatcgattccagccaaatctcagaaggtaatcgataaaactttctttctcttaaagttttctctgtttttctcaactctgatgtatcttgttttactcttaattcttcttcttcttctctctctctctctctctctaactttctgtgtttctctctttttctctcaacaaggtgaaacagcttcgaatcacctagatctaaaaagggaagcgtctttaaatactattgttgttaagagaagaaatgtaataacttctaactgatttgtctgagctggcagtgaaattagttgagtagttcattagttgttgattgaccgttattaagtatttgtttaaactatttggacaggttggcacgtagtggatttatcaacactcctcatgatcttcacatctctgactacttacatgagttatggtttggagatcacattgcgattcagtgggaagaaataaagagtttccttatggttaatctctgtttttaccagccctgacctttcatcaggaataacactatagccgatggcgcaaaatcatcggcaataacactaattctggtggtgcaaaagtcttggcaattcttcctttattgtcgaagattttgaagtgttggtaaacttcgttactaactattttccactgatgtctattccgcccagttttgcattggttgaataggtgccagtcatagagacggacaacaatacaatacctagcattttaaactattgataaattctctttttttcgcagtgtaattaattactaatgtgaaaaatatttaaaagttaataacttaacgtatgaacaaatttttgcaacttggaatatatataaaaatgttttgtttaaaatattattttttaatagttagtcccctagtaattcattcttcgcttggcctctattatatattacagttttttttttctatgaagaaaagcgtgcaaatatattagaataaaatcagttagacctatcggtcgttacaaatatattacagttattaatacacactttaacttatatcttttcaataattaatttttattaaattatttatttttttataacaactaatcgtgtcattatttttttaattgataattagtgtattagatttaaatttatagttccctgatctgacataatattaacgattattacagtaacgtcattttaaaagtaacaataattatcgacaaaataattgtctatttctttatcgttcatatattataatttaaaattttactaacttaataatttttatgtcacaatatttttactttcaattgtgactttaagattttttgtagttgaacaatgttgatcatatttagaaagtaatctataattatgaaaaaaaaatccataatttatttaagtggatgtgttttctccttaaataaaaagtacatttttttacaaataattgaaaattatttttattgtgtatttgttgtcttagatagatttatttaagtgtgttacactgtctaattaatggcatttcatgcaaacaaaatctaacctttatttattttcttttaaaaaaatctaatctatttattaccaaccaattttttttcatccatttacatcttatatattatggtgataatataatttagtaaaaaaaaaaacatcttagcttcatcaaatttattgtcgagatatgtattaattctcttctttttagtttcttcaattagctcgtagttaataatacgtaaattaagtttaaaacagttttttatacatcaattcatcatcatataaccaaactatatgaatttattaaaatgtaaaattctggtaaataaaagtaaatattagttgcctggtaaatattttctccctttaaaaagtcgtttcatatatatggaacatattatttacatataagtaaaacatatgtgacatatatatagtatattagacttaagaagtacactaaatcctttataaaagaagaaaaagtgaatatgtttcctattagcattacaatatatgccacaataagaataatacttcatatatttggaacaaagacaaatataacaattttttattaccaaaacactagtaaatgtgacagtattatttcacattagggcacaatattcttttaaaaaaccaattaagttgactaaatttaatttgttcccccgtagtgacattttttcagtgatataattaaatatacaatgtaccatggttttaaaaaatatagttagattaatttattttttacttcccttttagaagacctctacttgtactttttattatcaaataagatcaaaattctataggaatatatgttataaatcatatagtacattaatccttaattatttattagaacgaaactataaattgtctgaatttgtgttgttcaatatatgcttttcttttttgttatatatatacatgactggaaatttttaacttctaaataaataaataagtgaacagtgtgtatgttacatataacaattatacgatatatattctatcaaaaatctattcacaggcctagaaatgcaataacaagcaagtggagaaagtaattttgtaatacaataaatacacaaatttaaagaaagagaatttaatatttacttaaaacatttgtttcatacatgtcaaaaactgaaaaaaaaaatccatcaaaaaaaggaatataacagcaaatcagagcctgtaaatcacaaaataaattcatgcttatcaaaataataaaataatattgaaaaaacttaagcaaaacgcctgaacccttcctataaataccaccctaaataccacactaacacatccacaaccacctctctctctctatagtaatattacatatcattataattattcctttttgccattcttgtttttgtttcacttcctttaagcaatggaaatgaacaacaacaacgagaacactgtaaacaatgacaacagaaacactcaaagcaggcggatcaacaggggaaggcgtagggtatcaatgacaaggatgacgaacgagagcaatctccaagtgacattctcgaagaggcgctctggtctcttcaagaaagctagtgagctttgcaccctttgcggtgtacagatagccataatagttttctctcccggaaataaggtttactcgtttggtcattccagcgtgaatgtggtcatagatcgatatatgaaccctgaacattacgctatgctgatggcttctcaggccaactcagggacctttcaactcatcgaggctcataggaacgccactctccgtgagcttaaccagcagctcacccatattactgagcagatggaatccttgaagaagcgcgctaaggagctgaagggtattccgtgtaacttcagagatgcccttaacttgttggatggtcctgttaggaataatgtccatgaaatgtcccagttgggaaatctcaagaatgccatggagatgttgcgaaatgtcaccactgaacagtctgctgttaatactaatatgaatatgatgaacacattgtcctccttctatggagccggagacggagagggatccgttggaggaggaagaggactgcctcagctgccaagttctcctgcacttgtgcctgtgcctgcacctgcttctgcttttgctgcttcgtcttcctctaattttcccaaccaaggaggagcagtaaccaatatgctgcagcaacaacaaccacaacaacagcttccaccttttgataactatcattattataatcataataataatgttaatacttctcctgctgttgtgactgatatacctgatttgcaggctataatgaattctggtgttggccatggcaatgtgaaccatgtgaatatgggtcataataatatgcaaggtatgatgatgactactcctggtggtggtagtactgtgaacaatcttctttctcatcataatcagatgcagcaccagcagcaagttaataataataataataataataataataataataataataataataataataataataataatagtcattttgatttctcctcttattgggctggtgatcatcatcagctgcctgctgctatggcctcgttgcctttgcgatcacctcttgaactgccattgcagttgcagcagcctaatcctcatcagcagtatc

SEQ ID NO: 184859 - DNA, 3261 bp, Cannabis indica
gtatccaagagttacaccctgctctacccaaatcaaactaaggtgcaatggtgccaacaggtttgggggagattgaacaccccaaagcacagctttgtcacatggttggcaatccaacagaggctcaaaactaaagacaggttactgaaaatggggttagcagtagatgaacactgtgtactatgcttcttgcataaagaaattgcatcacatctcttcttcgaatgccttgttgcagctgcttgtctccatgatacaaaatactgattacaatggcatgcagcagctaccaccttgattagcctcaccagatggattggcagatcagaacttagtaaattcagataaaaggtgtttgcagatgctctctcttgcttagtgtatacactatggagagctcgaaatgtcaatttgtgggaaaatacaaaagcagaaccagaagtgttaatcaagggtctaaagcagactgttacacaaaggattagcatatgttggctgaaaaaagtcagtatagaggatgccagttggttttaaagcttgtaaccaagcattcgaattgtatggatgagatttaagtaagcattgtacataaatgtatagatcatactgtttttaggcctttatgggtgctatttgtttgcaaaaatcatatttgagcaatacaaattttcttgattcataaaaaaaaatatttataatgtatatttataaaaaaaattcccctttttatattattttaaaattaaaatatgtaagattaataataaaatactttttttacaattttctaccgtacaaacaatatagcatatatttttaggaccgatttttatgaattaacccatgcataagatggtggtggcacactaggatcctaatatatatacaaaaccaaattacaggcaccacactcgactctttataaagataatcaaactgaaattatactctctcacctgactatcactacattaaaacaaaagatgaagaaatggtgagtagtttaattaaatttcaaattactatatatgttttccatttcttattcctatatgaagtactattcaattttattttgaaacaaaagattaattaatgattttttattctttgtttttttatggtgtgcatcgatcgatcagcatggtttggattcatcatcagtaaaagtacctgaatgggttgaaattcttttaggagagaaattctttacagtttgcagtgtccatagcagtattactagtactgagaagatcaagaacaagaacaagaatcgaaagaacttcttctgtttggattgctgtacttccttatgttctcactgcttatcacaccataatcgtcactctctcttacaggtttattatattatgttattattcctacataacccatcgatcaattatataatagcaatgactatatttatataagggatttgataattacagataagaaggtatatgtatcaggatgtgatacgcataaccgatgcaaaaacgttgaattgttcttctgttgatgtaagtatatttatatatattcttactaatatatatatacttgatgatgaagaaagaattaataatataaattttatttattaaatatatagccatacatagcgaacgagacaagagtggtgtttttgaggccaagaccaatatcatcatttagggtttcttcttctgagaaatcttgcatcaaatgtaccggaattctccacaacacagattatagcttttgctccctttcttgcaaggttttcaatttctccctttattgcttaattttattatataatatattaagtaatttatttcgtttaaactttaataaataaacaaaattaaaattacaataacagttccatcatgatgatcacggaataacagcaatgggtagttctagtactcccggctcagctagctccaccagcgttgcccgtactaataataataatactaactctagtagttccccgggggtggatgtggacgagggcggtaatcgtcggcggcgccggaagggtgttcctcaacggtcacctttgagttgatgatcataataataagtgttggggtgcatttttagtggtgtaataattgtataataattatggacgtagaaggaccaagtaagtgattaatatgaatattatttagatgagtatattgttaaaatgggcaaatatttctctgactctatgacaatataatgttttttcttgaatgtttggtattattagatattttgtgttaaaactttaattcgcttaaactgtaattagttgtaacaaattagtagtgtgagattcttggtcggtgtactcatttgtacaaacacaaattagaaactgctttaagccacatttttacgtttttactcaagaaatagaattctctcttcttttctcttttttttttcacaacacatatgttggaaattattataatccaatagaaataccaaaccaacaggatattacaactctatgataaataatacaaaagacaaaatggatcatagattaaataatgttacaacactatacacataaaatagagaatagagatgaagagaaaaattacaactcaaagcaataaactatacataacatacaacatataaatagcatacatataagagatgtgagaacaatcttaacaccacatacaccatatataagtatataataagggaatcactaaacttgaacaaggtcatgcacctttgtccaaaagcttattatttttccctaccacaagcgcttaggaaaaatgaaagaatgaaaatagctttccggatttaccaagcttatagtttctagcaaggtgctctctttgatagaaactcacaaaaaatgtgtcttcacaagtaaaccaaaaatatctatttatagtgtttaggatcacacactttgaaattcaaataacctacacacaagggctgttaccatttcttaacggggtgtaaatggtattaaattggctgatttggaggttatgagagttgttaaaagccatctctatggtaaaaaaagttcaataattaaagctaaaaaaacagttaccaaatttttcagcttttgcaaaaaactatccaaactattctcactttattttatatcacttatacactttataataggggtgagcaaaaaatttgaaaaaccgaccaaaccgaatgcaccgaccgtccgaacaccgaaaaaaccgacactgaaaaaaccgaaaataaaaaaaaaaaactgccttcggt

SEQ ID NO: 184860 - DNA, 1188 bp, Cannabis indica
acaaactgtgtgaatatacgggtcttctgcattaggcagccaaggatctttaacgatgtcaatgtttgcaccagaccacactcttatagcagcaccctttttaatcagaggttggccttccataatactctgccaaatgaaactcggattccctcccaattcaacagacaagaaagagcagttaggaaagtaccttgccttgtatattttgcccactaaagaatgaggatgcaagattagtctccaagcttgtttccccagaagtgccacattaaaatcataaaggcttcgaaagcctagaccaccattagattttggcttacacatcctctcccaactcatccaatgtatgcccttatctttctttgagttagactgccaccaaaacttacacatagtacactccatttccctacttgtttcagttggcaacatgaaaacactcattgcatagttcggtaaagcttatgcaactgtcttcagtagaacctccttatcttcgattagtgacaacaattgttcattttgcagctgggttatagttctttgtatacaattgacaacatcttcccattgtgaatcagatggtctaaaaagcttctgaaagtatgataccataacctcttgcaccccactttcccaatcaattacttggccaaactcattctgaatagtacgaatatgattgttgcgttttttggtttttacagtagcattatttggaattttagtccccctctttcagccatagttgtttcgacctttgtctccaaaagacctccttctgagtaagaatttcaaataaacgcttcttctcttcttgatacatttgaatggagtactcatctcgtttgcccttcaaagctttaataatttttttactggcagcaatatgtttttggaagttgccagtgaaatttttaccccattcaccgaaaattctggaacggtgagagattttctcagttataggatgatcagtagtcgatagccatgcatcttccacgagtgtatgacatatgggttcacgaaatcaggcattttcaaacttgaatttccttggcactgttacagcagtatgcaacatcaagtcaaggagcaaaggacagtgatcgaaagtggaaacctctatatttttacaagtttagcatcttgaaaatttgtcatacttattattatttttatttt

SEQ ID NO: 184861 - DNA, 3867 bp, Cannabis indica
  modified_base (35)..(35): a, c, t, g, unknown or other
gcgtggaacggggggctgcattggagcaagcaagngagtcagagtagcatggctatactgattagaatatatattaagtataatattaatttcattttaatttaaaagtttttctctgtacttcaattgaagaaaagaataattaagttactttgagatgggttggttggcaatgcagggagatgaagagagaaaaaaaattcttcttggaaaggctcgattgtgacatatcagtaataaaacgaggcaaatccattgaagaattgagagtttcaaaacaatcatggagaagtaaagaacaagaccatgaaattagctgtaatactaataaactgagtattggaactaactcaaaaccttacttaaggtacgatgaaatgataccaggaagcccagaagagaaacactctcaaacaaaaaggttagtacatgtgatattacgtataatattatccatttgttgcataataataccttgaatctactgtaataattattaatatcgaatttagtttggtaaaattcagaaagctttcaaaaactttgattctattaacggtgcctctttggaaattaattggatttgggtgtaaataaaaataattatataatttgacatatttgttttaataattacactatatagtaattatacaataatttttaaatatgtcctgttttgagaagaaaacaaaggaaacattttcctaatattaactttcaaatttactttcttaacatgtaaagtttttaaaaaaagaaaaagaaaaaaaaaacatatacatagtaataaaaaaaaattagtaagggtaaaatagataatttttattttaaaaaatcaaacaaattataaactaattacatgtacctgttttattttactggtacaacaaattattttaacttttcagatatatgcatacaaacatgaagtaattgtaattaatcattcttatttaagatgaatcccacatatatgttttatatttgtatgtaatttatgtttgcacatttcattattgtttaacttaactttctttttatttattttttgtgaattaactctgtttgtaaattttagaactaagacagcactttgtctcgtggaaaaaccgaactgcaggtaagaaggacgatgatattggggaatcatcatcattgaacatggaaggtgaagatgaacctaaaaacgacgaggattggatggcgggattcgagactgacgatgaactaatgtcgatttgctccatatgtgaaaatagaaggccaaagattggatggacaaaagagtttagttatgcagaactccatgcagctacaaagggattttccaaagccaactatatatcagaaggtggatttggtaatgtgtttagaggacaattaaagaatggacttaagattgctgtgaagcaacataaacatgcaagctcacaaggtgagaaagaatttaaggctgaagttcactttctcagcaaggcaagacacaagaatttgattatgttgcttggatcatgttctgaaggacgccataggctgcttgtttatgaatatgtttgcaatggttcattggatcgacaactattaagtaagtaacaatgaatagactacttcatgcattctatctataatgcatctcatattatttccaccaaaaatattttaatctaattttttttatagtgatatttgagatatcttgtacagaaattccataataatttataatatagaaaacaacgtttaaaaactacaacacactaaaacaagtcgtttggactctattttgttaaatttatttaaatttctcaaaattttgcaataagttaagttttcaatattatgaatatgtgactataaatgcacaatatatcaatggtctctctctgtgtaagtaaattattcttttctgtttaaattattattaattatgttgtgctatgttatccagaaccggcacgaaaacccctgacttgggatgagagaatgaaaattgctagtggagctgcgaaaggattgttgtaccttcataaaaacaatattgtccacagagatataaggccaaacaacattctacttacacatgatttcaacaccctggtaagttaaagtggtaatgtaatgaaattataaattgtgtaaaaaaaaattcatcaccatctctttttgttatacatatatttaatatttaatgtatgatcagcttggagactttgggcttgcacgaagtcagcaggaagatcactcgtcagagacgagggttgttggaacattgggatatttggcaccagaatatgctgaaagtggaaaagtttcaaccaagacagatgtttatgcttttggggtcattttattgcagctcatcactggacatggcactaatgacaagtcccttgaaggaaaaagtcttgtgggatgggtaagtatactcaaaaattctaagctaaaaaacaaaatcttccatcccatttttttttattaaaaatctaaggaaatatacatttattttattccaggcaagaccactgctaaaagataggaactaccctgatttaattgacgaaaggattttagattcccatgatgttcatcaactcttttggatggttagagtagctgagaaatgtctcatcaaggatcctcacaagagattatcaatggaaacggtaagccatgatatgttaattgaccaacaccttacttactactaataaatgcttcataatcaggctagctaggctcatcaagctacaatacatcatttgtgcatggttgattatcaatattgtgtgcatagaagtcatcaatacaattgtaaatggataaataataacaaaatgttaagtgcactcccaatggatttcgaaaaatagagtttacttcctctttaatatcttttccctctttcattaattttgtggttttttaaatgtgatgaggacgcatatataacaaaactgtttatatatatatatatatattgtttaatggattcaattactgtttaattcttacatataattgcagatagtaaatgctttaaatcatctaagagagtcagatgtaatatgcaacatcagtatttcacctgcatattcagataattccttgcctggcagtgaagagtctcctgaggcatatgataatagaggtgatgatggtcatgataacagtcatcatatagaagtagaatcttataagtccaggcatagcatggcctattatgatcatataactggaagtattcgcacaatcatcgtggtactcgaatctacttcatcatctagatcaagtttatccccaatgtctgagcagtccagtttggatggtagactcaagtaaatagcatttatcacatcaccaaaagtatatatttatgctatatggtagaagaatgatgattattagtaatgagatgaagtagtacattgtttcatgtaaactaaattaattagtcataaaagagttttactcacatgatgagagaaagtgcaggacattataataagttgggccattttccaacaaagtagtctcttttgaattttgtgtaatattaaagttgttatgttttatgctcataaatattaaatatattaaataagaaaaggagtagttctatgtatttttatttataatttttccatggaatgggataattttatttacattggatgtgggaaagattttttcttttttgtaaaaatatatttcagtactctttaaaataggcctcctcatgttgctgcttatctctcactacaagacagatgacctttgtcgcactctcaacagtcaacaccaacgtatttcatcatttttataattgacgcaacttatggtcattttgcctacgcaacaaagcgt

SEQ ID NO: 184862 - DNA, 3303 bp, Cannabis indica
gagagagagagagagacattttgtttgaaacatgttcaatgaacaaagaaaatgaacaaagaaaaaataaatgaaaaagtaactcaaacgattgttaatatcttaaatctttttatctaacaacatgggtaaagtccaaagtaatgaaaattggtattagacaatgtatttacatgtgcagcattatctaggcaatttgtatggcttttctaaaaatacgattactatgccaaacaaattttgatgagcgccatcatgtgaattctccacaacacattctataatatgggggtctaaaacaaaataaacaaggtctgcatcaaacacctagggaccagcctcaaaatttgcatcaacatcataagaaattgacaaagttgttcctcactgcatttgatctaaatccaaatcagtacactgcctattttggatacattttggtaacttggatcctgaaacattaactgcattattaccaaaaacatcacctatcgttccaaattcagtttcgtcatcatcactatcgatatttattggagttacacgattctgataacttcttttcaggacaaggaacacgttgaagtagtaactcaccacctgttctctttttttcctgataaaccacctggctttcttctcattaaagtgcatacttgaccttactatatccttgaatttcttttcctcttcagttgtccactgaagacaaatttcctcgcccatacgatcaattttccaacgataaaatgccaaaccaagttcgcgtttaagcttcatccttgcttcggcgatgtgaaatcttacacatccaacagatcctggaagaggacagttacagaattcttgtcttcccttgccaatagtatcagtagtttcaatggagaccttttggtctccacattccaatggccagacccttgttcctaaccatttggaatcactctcgaaaatcacaccagtccactcggggacatcagcttgaaagaggggtccaacagaaacttgtttctgtatggtgtcatcctctgaagagtaaacttctttaaccaaaactggtaaatcatcaactacagatgcttcctccttcggttcactttccaactccactttatgagtactaatcaatttagttggactggatgaacatggcttgcaacaagggcaactacgagatttcactacacttggaattcttgttctggatctcaacctgtctgaagaagggtaaattactgcattgttatcctcatacattgaggggtgcatctttaacttcttctgcaaatgaaaccacgatttgttatgaaattgtacagttacaaagagcacaagttccagacttcagctttcagcccctaaattgtcaagaagctaactagtccaacttttcgaccaactgtcacaatcactggttattgcttcaacagctaaggaacaacgaactgtatatatcttcaaatgagacattacaagtgtgaaactatgactagtcctcagtgctttcgttcattttatattaatttctatacttgattagtcctcaagaaaaacacactataattttattttataaggatgaatgaaagagtgaagggtgctaattcaaggaggtgtaaagacaaggtcactgaaaaaacctttgcaaatttaagggtatcagctatatttttatttcacctagaaaattgagaaaaaaagaaagaagaagaaaatctgccgataaagaattcaacttgaataaacaaaatagtacagatgacagactggagtccttggtagccacattaataaagattcaatttcactaccattagagactgccctcatacctacattggatcctaatttcatccagagtccatgaaagcgttgaaataagctctaggctgatcaagtgagaaatgcaagcattaaaccatgaccattacacaaatttaaggtgccaatctcgtgaaactcagtcgttggccgtggcctgacagcaaaagaagaaccagaacatatacaaaatggatttacatacataaataacataaaattgttacctgcactaaagattcttcctttctggaatcaagatgccttgtttgtaacaaaacctctcttgctctcattgcctggacccataaatttttctccccatgctccattaacttagatggccctgctataattccaatagaaggatcacccgagtgcttagcaatatcggttagccaattcagcaaccctgacaaagattctctctttctcttattgcatgtcttctctttcttattaataagagagctcaacaaaagatcatcgccttcttgatctttattaacaattttttcgtcattgtctcttttgcattgtatggtatctgacaaacacaactttttcttgttgcactcaccaccattttgggagtcaaattttaatttaactactttacaatctttactaccatcccactcaaccctgtctgggaacaaatctctaaactctgactccgactccatggacaacaacctaaaatttccattttccgaggtctgatccgtaaacctcttttcaccaagccatttttctaattcactcaaatactttaaataaaccaattttacagaagcagtagcaccaacacccaaacccgattccttggccaccttagcccacaaacgcttcttcgagcaaattcaaaaccccctttgttctcacaagaagaaaaagtttgaacaaatccacaggcggtttactgtaatcaaccacaaccggaacaggcctaaagactccatctttactaactgccttaagaaaagccgctaaaaccttatcaaacaaacttcgacctcaggaccaccattatcatccgagccattctcaacaacggcgacgccggcggcggcggcggagccaccatcttcttccccgcgtagaacatcgttaccctgatgagctccgatattttgcagggaatccaaagcagatccattttccaatatcgaccatcccgccatgaaaggtatcgtaaaaaacgcagacaaattctaccttgagagatcgacggttcaagaacgataaaaaaagaccaaaaaaggtatcaacagaatggggtcgatttgatctgtggaacggagttagaggtgacccttccgccgtcgccggagattgtgacggtttttcagttcattttcatttctgggtttgaatggaaaacgacaacgggacaggagagctctgagatgggacaaagccccaaaacctacaaaacagtgtgtgggtagagctttttattacaaacaccattataataat

SEQ ID NO: 184863 - DNA, 2920 bp, Cannabis indica
tttttattttcttgttatcatctcgatttgttttcagtatctaagaactgaaagataattttgatctttgcctcctttgaattttctgaagcttaataataatttaaaaaggttttattttcatattgcaggtcggtatcaaggataggactatcttccttatgatcttgaatttattgtttaccataatcatggccagtattatgtttaaaatttgttgctaaaaaaataagtagcaataataatattgataataataataataattctgtaacggatttattaagaaaaaaaaagcaatgttctctgttccaacttatcatgccttcagtgtttatgtcttgcattctttgttctttttaatccttccctttcctgtgctattataaactggagttataagtttctccaaggtcttatactctggcatgtggtatgtgagcaatttgcaatcgagtcgtccacgaaaagaagcagcttatttattctaatgcatgcaatgaaattggtccaaagaatacatcacatgaaggttcagcttattcaattacaaatacattgagcagggtacttcaagtcggcttgatcaattactggtcattaattaaaatattaagttatctttaccaatgattctaataaagaacgatagagcatgcaactagagtgagcataattgactggtaaatcactgagttgggcagtctacccttatcctttcttaaaaagatggcttcgtaaattggcaggttgacgaaaaccagcagaccagaaagaacgacctgcagtgcaaatgggttcatatacaaactctgttgagtgaagattaacttcttcaatccccagataaaacccaaggcattaagcaatgcaagtgttgtcaagatggtaaacattggtgaagcaataccgaactccattagctcttgcttgtatctctcagaaacatcgtcatcagctacctttgcagttatgatgaaggcttcatcagtgaaccccaataactttagcatgtggtccaagacagtaaagaaataggaagttgtcctgttaaacagccacattctttgattgttcaaccattcccggtatgttcctccacacatcagaaattctccaaggctgtaccctcggttgcctaagaagacatagagaaatggtgcaacccatatgctggagatctgccatgacaaggtactatttattttgatgcattattctacttaagaaatcataagataacaatttacctgaggaaataaggagattcctttgagtagacagagtgatggcacagtgacataatagagtgaagcaaaggagtttagggaccatagcaagtagactaagtatgaaactcgaagtcctaggggaatctttttgtagccataggtcatgggacaatactttgagagaaagatttgaagacatccttcagcccatctcttgtgctgcacaagtgtttgcagcagtgttgtaggagcagctcctagaaaggcctttttctctggattataataaactgatctccatcctctacactgtatcacaagtcctgttaaaacgtcttccaccaaacacccatacatcacacccatctgcatatcagtataatgtaagcacaaatattaatagcagaatataattaccactcatactgattttgccaccgtacgttattttcaactaatcagaaattgttaaagaaaaacttattattcgactcttgaagaggagaatataagtgcaacctcttttccccactgagtgttctcttcgaaagtacaactggcaagaactttggttgtttcttcaagagcttctgcactaattccctcatcttcattctttcttttccagtctagtattactttactcgcttcgttgtatttcttaccagaaagagattcccttctgtgaaagcacccagtgccaatatagcaaggacctccactagtgtcgaatcctcgaagctcaacctagggatcatcatgcatggtcttatcaaatcaagagtactaacttggaaccaaaaatagaaagggtttgtttgtactaatatagtaagtacaaacaagactaacctccattataactctcaaggaactactgtaaatatcatgctgggtgaggttctcaaatgcctgcggaaactgaacgaaggcaatctcgtggcccttctctttatccagaaagaagcacattgcatctttcactgatttagagtggtttgaatacatgtcgcagtctaagttgaggattatgggagcattgctaatgtttgccgatactcttatctagaaaagaaaattcagctcttagctagctattacattgattaaaagaaggaactgattaattatagcttaagtattattatataaccagtgagttcatcgcccctgctttgaagttatggtggtattggggtctcttttcacgtgccaaatatactaaagttggcaaaggatgtccatcaatgtccatagcctcggggtctcttccatcgataagaatctgtacgatgcatgtatgattaagatcctgattctctactattgacaagtatagcattaatatcatgattggaattataacggtagtaggatagtaatacttgaataatggtctgatgatcacgtttgcttaagacatagtcccactcacgaaatcccttgtgtcccctacgtatcgattctgaaatttgaccagcttttgtggcactttcaatccttgtcttcatgtcctcatatagtctctataaaatgaggaaaatataggaggaaattaattttcaaatataatcatgcatactcaatgagggagctaggggccggagattaaatgggtcattatttgtgtatactctgtttttattaaaaatttgaaattctctctatttatttatttatgcttaaaa

SEQ ID NO: 184864 - DNA, 3511 bp, Cannabis indica
tttccaaacgcaccctaagtaaatacttggccaataagaagagtagtggagataggccatgcttagaccccactctaacttatgctatattttccatgcagtagttagatcgtttgtgtgcatacacaaaggtaaacatataatgagaaaaacgaagcttagatatttctcttatagtatatatatcttttcttttattcttaaaaaaaaaaaaactaatcacctcattttggccaaaatgaaaaaaaaaagaagagaaataaaaatgattacaaattaaagagttataattaattctacataaacaatctaagaagcttagatcttttatcattaattcctccaccgcctaaaaaagtatcagaatcaactgaactactacccaacgtcgtcgtttcggacccttcctccgaagtcggactcacctctctactgatcttcttctccattttagtcccggcagccatcaagcacagatcaagatccgacggttctaaaccgtacggatccgatgttccctcatcaaaattattaacggtactacatggtcttttcttgggccatcgccgccgcgagaccgttggatgatcagccgaagacgactcagagagtgtccccaacgcgccgccgcgaagacagtctcgacggccgcctgacacacgtgccagtttcccatccataacagacctacggcgccgttgaccggattcacagtccttccaacggcttcgtataacagagattagaaacagagctgttcgatgaaaaagcctgatcagtttattaattaattgtttgggtttttccattttcattgaattgaataagtaaataaataaataccagggcggtggtgttgtgggacggcggagatgaaggacatgaggccggctcggccgaagaacttggcgacgaagagagtggcatgagcttgggcctgaggcgtttcaatccactgtagacattctctaagcatacaattatcactgcaaccttttcggagaactcggcagccattgcagctcattctgagtttactcaaatatataattctcacatatatttatttatatttattctttgtgggggcaaaatggtaatcttacaagactgaaatgaaatgagagtgagagtgagagtgaaagagggaatatatgtttttgcatatatagagagggaaaatgtgcattgcggagaaaattgaggtagattagttaagaaagtaactagggttaagttttggtatttaaatttaaccggggttgagttttgtttttatgggttccaaggagttagggtgaatggtaaacggttccgtgtttccacacaagaggctgatccaatatttttattgaaatttatgtgatcagatcaagttgttctttcattctccaccgtcgattctttggaaaacaatgatcgtacgtatctatatctatgtccatctccaaaagattctttttctctttttttttcttctttttatctccttatttcggatcaaaattatacagtattttttagtcaattatatttacttacaacacaaatcacactcttggtagtatagaatagtcagatgtgagtttctttatcctatcttttaaaataactcagactcgtttagtatgtattaagtattatattatattaaattaaattatatatataataatatattaaattttattttatatacaaaaatattatatttttatatgtccagaaaaataaatatcatattaaaatatttaatataatatgaaatttttatatttcttttcaatactatctttcaacttttttattattattaattaaatattaaaaaataataaaagtaaataaataatgtacaatttaaaaaatagacaaagcaaaaattgtaaaaatatattataaaatattttatcccatcaataatttgtagctatatttagctaaaaaaaatagctaaaaagttctttagctaaaatagagaagagtttggcacattgatatggggaagaataagataattaaagtttcagctatatgttttacctcttagctattatatttcgtgggtacatattattactcaaataataataatgccaagacttcttaattttgaatgaaattaataatggaagttgattggttcaattacaattttacatgcatagaattattacaggaatacagtcaattagatagtacatatcaattattgttttcctttttgaagaaaaaaataatcaaacatttttaacaaggccagtttggtaacttgcatgtttgaggagattctttttttattatttatttagctctaatataaaaactaaaagacaaaagtttgtgtatagaaagttaaataaattagcataaaacaatacgacgcaaatatgtataatattttaacttattacaaagggaattctttagttgatgaattgaattttccattgtaataagaatatttaattataaagcgattaaccaaagcaaatagttgctatgaaagtggataagaaagagtggtggatctagctggctttattagccgacctagctagttgagtacaaatgtgaatccatattccatgaagctcaattctttcttttacacattaaaatatcacataataataataattattttttcaatgtcttattgtaattggtgttattaagtatcagattttatatattttaaaaaattaatttaaaaaaaaaattactaaccaattatgggacgctatctataaaaatactccactattaaaactcaataacaatattaaaataatggtttaagaatcttttaagttttaaccctataaaatcttcaaccgatggaggatcctacacccaataaattaaaattaaatatgttgtatacattattaatcattgaataatataattttcttggcaacgcatgatttatttgttgaaattgtgatgagataataagtgatagctagtaatataacatgcatggactttctaataatcttgatcagtacttgaaaacattaatgatatataattgataattattagaaaacgttaatatatatataatcgtatatttctatgacttctcttgcttgactactcgagataaacgtagagatatatatatatatatataacgtatataatgtacataatgtgttagtaactagttactagtgagagagtgactgcgttttcgaggcgctgattagtaagaaatggagataattaaattaatacgaaataggcattaataatgaagttgttgcagtcattggatttggctacctacgtaggatccttgtcattctaatatttttacaaattttctgaccaggaccacacttattttttttaatatatataattgttctactttaattgcttttatttataattaagaccaattattagccgaatgtatcattgtatatgtgtattatatatatacacatataacggtaaaatctaaaaaaaaaatattttgatatatattttatatctg

SEQ ID NO: 184865 - DNA, 2706 bp, Cannabis indica
tttttttttttttgtcttaacaaaaatagtgacaacaataggaattagtatattgaatatataatataatcaccattacaatgtaatcctatgacatttttaaaccaaaccaaatattataatgggcattttaattctataataacacgcctattataacaaaccaaacatactcttatggtcgagttataaaaaaaatgggtcatcacacagtacattgtagttcataaattgacactataattagtaaatatatctgaattaatacatataatacaatcctcacttataataatatacaccccgtgtggatgctctatgacaaatacaagtaataacaaaattaattttacttattaatagttcaattcaaaatctataattagtaattttcccttcttaatttagaataattattccttctattataaaatagaatactattccattcaaataacattctaatattttaatgcaatcatttcttttcattctatttcattacctccaaaagatcacctaagttttaaaagttcatgttaatttgcagttcaacaatactcttgcaatatcttagttaaaaccacaaaagaggttagctctctgagagcgtttttgaactgaaagtacatacttggacattgtgcagtgtttactgtatatgtacttgtgttgagtttcttctttacaacattccatctagatttattactcttcataacataagtcttgatttaaaataaatcaaattccagcctataacattctgaccatttccattttaccctcctttaaaagataatacagtacaaccttgttaacatgtatcatcaattagaggcaagagcaagttatatatttcttatcattagtgagttagagagattagtcatatagaaagctaagcttacttcaattatatcattaaataaagtttgtgtgtgtgtgagagagagagagagccaaatatgctacagaatccgcctttaatatacatgtatgcatatacatacactcgaaaaatgataaataagagtcaaggagggtcacttcacttgcttattgttcttcaatttcacgcaaaccccagaataaaaaacagatgacaacatatgcacaacgtcattgttttttatttctctgatgttttaaatgatcagcctagattttaataaggatggatggcaagttcttgtgttgttggcaatggcagcagcaagaggataataatatgggaaagtgaggagactggaatgaagagaacaacagcaaacccttttttgttctcttttcttttcctctttaataccatcctaatatctaaaggataagacaactaaacttagaactttatcatgatctgtgtgtcttgtctcatgttacaggcaaaatggttctccgtcaaaccctaagatcggggaaaatttactgtgaccaacggagaagtctagaaaatttatgaaatagagggaatagaaaaggggggaggaaggaaagaccatttgtacaatatggggccctttacatgaaatagctgagagccttctttcttctggaacccccttcaccgtagagttcattccactgcaaaagctcggtcatgtttacagactccgatgaaacactagcacatacctgatgaccaagacataaaaaaagatatatttatattgccattaaagaaaaagaagctagtttattttacagtgaaagtacaaaatgactggcatctttacccgttcatgtgcgtatttaaagtcctccaaatttagagaacgaatatctgcacagccactcaaagctggtgaaggtttaccttctgcaacagctgcggcccgctcctgtaattggttcagcacatcaagaaaaaaaaaataaaaaaataatatcaaactatcatatacgatgaaaaaacttacatttccaacgtaaaaacgatgaagcataagaaaaattatgtgactgtttattcaattttcgaacagaaggtataatttagcagccaataaaaaaaaaaaagcattgccattcagcagctaacaacacagaaaaaatctttcatttattgatttctaaaagtttcagttcattacggttagagaataagatggttgcaagtaggaaatgataaaaacaaatattttagacttggagatgcatcagtgaaggcagacattcatgcctcaagataactaggaaaaaatcatttttcattttgaaattggtaacttggaaaactttgtgtttggtagaaagtaggaagtttgcaccaaccgtcatttttctattttcctctttccgagacacacacaatgggaatttgatcccctttccgacacacaaccacttaaaaaaaaaatttcttcgattgttgtcgaatgaaacgtacctttttctccttttccaaaatctctttaattggacggtgtgcagcagctacacatagattctgcaagaagtgaaccttaatatagtcactcaacttgtctgtaggagaaagccaaaattaaaataacaaagtaaaatatatgtaaccttgagatcgcttcctgaatatccatcagtcatatttgcaattgcatcaaaatcaacaccaggagataagtcctcttttgccaagattacttttaatatctttgctctattaggagcatctggcaaatttaccatcaatctggaagaatatagaaaattatcaggaccatt

SEQ ID NO: 184866 - DNA, 7903 bp, Cannabis indica
gtgatatatatgtatattttagtgggattctcattctatcccaccaccaccaaccaaacacatcaactacaacaaacatagcatagtatataataatatactactaacaaaaactactacattaccattaccacctatttctcttcccatttagatttttcatttcttcacaactttttctttttctctttgctttgtgggacccttttcattgacccatcatttcatttttatttgatgtatcacacacacacacaaactcatgagtcatgaaagatatgatatatattaagagtaattattgcctttttctttccttatttcctcttcttcttcttcttcttctaactccaatatccatccatattgatatgatatgatatgattcccctttctccttttggattcaacacaaacaagtaagtttcatttatcaactcttttctttctttctcacaatgcaacagaagttgatcatgacataatattttgtaaagggtactaattaaacaacatggctgggggtactggactactactttcaataaagctcaacttaaaatggcttatgctaatcctgttattaaaaaccacttctcaatcaacagatcctgatgtggaaggtaagtaacacccttcttctaaatttctttattattactaagatcataattgaataactgatgttgttcttttgtgttcaggtttagctttgtctgatttgctaaagtcactcaatgattccaatggtagaataacagattggagtctcaaccttgtgagtccatgtttcagttggtctcatgtcacttgcataggtgcaaatgttgtatccttgtaagttcaaccctttcacacacacccccacttggactttttggatcattagattcagtatgtgaaaatgaaaattatgtttactttgcaggagcttgccttcaattggatttacaggaactctttcaccagcaattactacactcaaatctttagtttccttgtaagtaaacttctaatcattttggcccccaaaaaatgaaaaaagaaaaagaaaaataaataaaatacttaatgcatgcagagaccttcagaacaacagtttgagaggtggtttacctgattaccttgccaacttgactcaactaaagattcttaatcttgccaacaatagcttcagtggctctatacctgtcacatgggctcaactttcaaatttagaacatttgtaagctttatatgtatatatatatatatatgtatatattttcccactctgctcaatcatttcttatcttgtttgttaataagtgtatacatgtttcaattgtagggacctttcatctaatgacttaacaggaagcattcccatgcaactctattccattcccactttcaagtaatcaaattttgttattctcatcacataattaatgatgttgattacactattgatgtttaaagtataagaattttggctgcagttttacaggaacacatcttgcttgtggctctagtttggagcagccttgtgtttcaagtgatcatactcaaggtttttatctctttcaactctctttttgagtctactttcttatgtatcatgatctagtttgagttgaactttggttgttgtaaatgttgacaacagtttcaaccaagaagggaaaagttggagctattctaacttctgcaagttgtgttgcttttatacttcttttcattggagctttgattgcatatcgataccaccttcatcaaagcaaactcaaacaagatgtgtttgttgatgtaaatggtaaacaagatgtgattacagtcatttgtgtagaaccacttgtcatttgtgtcttaacccaatagtcttgtttttcttgtaaaaattttaggtgaacatgactgcaagatctcgttaggccagttgagaagattttcttttcgggaaattcagctcgctacagacaacttcagcgagagcaatgtaattggacaaggaggatttgggaaagtgtatagaggtcttcttctagacaacactaaggttgcagtgaaacgccttgcagattgttatagtcccggtggggaggctgcattcctcagagaagttgagctcattagtgtggcatgtcaccgcaatctcttgcatttgattgggttttgtacaacctcaattgagaaaattcttgtttatccttttatgcaaaatctcagtgttgcataccgtttgagaggtattgttctttcttaccatacccttcatgttctcaactttgttttagttactaacttacagctatgtagatttgaaaccgggtgagaaaggcttggattggccaacaaggaagcgtattgcgtttggtacagccaatggtttggaatatctgcatgagcactgcaatccaaggatcatacatagagacttaaaggctgcaaacatcttgcttgatgatgattttgaacctgttcttggagactttggtctggccaagttggttgatataaagatgactcatgccaccactcaggtccgaggcacaatgggtcatattgctccagaatatctgtctactggaaaatcatcagagaagacagatgtttttggttatggcataacacttctcgagcttgtcactggtcagcgcgccatagatttctcgaggcttgaagaggaagaggatgttcttctccttgaccatgtaagttcttttagatttaatctcatatggctgcagactattaattaacactctggctctggttctggtttttgacagatcaagaagttgcaaagagagaataggctgcatgatatagtggatggaaacttgaaaagttatgacttaaaagaagttgagacaatcattcaagtggctttgctctgcacccagacatcgcccgaggatcgtccaacaatgtctaaagttgtgaaaatgatgcagggagtagggttggctgagaaatgggctgagtgggagcaacttgagcatgtaagaaatcaagaattcccacttcatcctcaccaatttccttggttggatgaaaccacacatgatcaagaggctatccagttgtccaaaccaagatagaggcttttcattagtatgtaaatttatagagaaagaaaaaaaaaacataactgactatatgagatagggaaaactaaatgaatgaaatgagaaagaaaggaaactttcaaaagtctgtaatctgcatatataagtcttacagccttgttatatatatacatgtcttacagccatgtatatatatttatatacatgcagctaactgttgctctagtctagttaatgtgtttgcctacggttatttttgatctgtttcttctctatttttttctcctttttcatttcatatatataactagttgtatctgctatttcagattctttttctattgttgtttgtaaaaactagcaactatagcaaaataaataaataaatgctgaataaggaactagctccttgacattttcttttcctttcaaaaaatttactcttacaaactaaacattcaaatattggcaccacagaagaaacatctacaagaaatcaagtgaattttacacagaaacatgtgaagaatttatatacaaataaaacattttttttttctaatatagaaacatttgacaaatcgaagaaatcattcgagttctctttctaatacacatacatgcctatgtcgttccttcttagtttcactctctccccctttaaataattcggtgttgtcagaaatcttctagtgcctcttcatcaggtaagatcatggtcagaagagaatacttaacccggagagaaattttacccttttcaacaacaagtcttgccccagaaacagcccaatacccgggagagtcctgcggtcctcttgtcatttctgcagtgtcaacaaacttcagaagcttaggtgcctgagatggaaccggagggcctccagggtaaacagcggagtttatgttaaaatcagaaggttttggaggaggtttttgtgcagtcgagaaatgagtgctaatcaatgttgaaatgattccagatctctgtcctaatccaggggaaccatcccactcaggctgtttcacaattgttgcacctacaactttagcgaaatgcagtctcaagaatagaactttcttcaagctggagtctccaacttcaaagtgagccccagtgacaacagacagatcatcattagcctcaacaggggctgtgtagacatgagagaagctcttccactgaaccttctccacgtacctgcggtcagaggacgggtgtggcatgttcccatttacttcgtccttgagttggaagctctttggcagcgatgaaagatgctgcaagtggattgctaagcagttgcttcttttgccttctagatacaatcgaagaccagtcactggtttcttacccacatcaacctacaacaatcatcctaagaatatgaagatacgaaaaaagacaagacaaaaaactacatgtgttcaagattgcaaaaatatcaatattattgtttttctaacaaacaaaaagggaacagtagaattaccggagttgtattaacataaagtttagggcccatgaaactaaactgcaaagatgcaccaccttgtggcttcttctgaggaccaagggcaagctcaccgaatactggtgcccactgtcttggaagttggaaatccaaaaactggtgcagttcttcgattggtggtttatctgcaaaatccagaaaaaggaaatataagattcaaaacagtactcataaatcatactagcatcttaatggataagcaaaccgagcgccatgaaagagccattcttacatcgaaggtaaagattaatggcatggcttagaaatccactcccattaatgccactcagcaatgatgtgatgggaactaaagacatggaaattacatccggatcgaaataaacagtctgacaccactcatcgtgggatagatttcttttcaagttcccccctttcctcttgcaagtgaatttagtatcttgcatctgaaatgtatacaaaaacataagctgtctacaccaaacgatcgaagagatacctcaaaattcaagtttgagaatgcaacacaaatgaagataatacaaagaatgcaacacaagtgaacttcataaattttataataatattttatatcctatcttaaattgaaaagcataatgaatcagtaggctcttcctgatgtgtacctcagtagaagaataagaactggaaggaagtgagtccatgatatttaggccacggtccatggagaactgaaaaaagaaaaaggtagtaaaataagttggttaagcaatacatataacatgatctgttccatgcaagtacgtaaatttgctaaacaaatcaagtccgggaaacttttccgtaattttaaaattgctcagaggagtttcatgttgaattctaccaaaagaagaagagaaaaaacagaacttcatgcaccaaacctaaacagaaacaaaaatacaacacatgacaataacatgaatgaactagttttgcttaagcaatcccagtcttgaaaatgatttctattataaaaggaaggaaaaagtgattatcaatggaggcaggcgaggacagcttattagatggttcaaaccttgtctctcatattggatttatcagagttcctattgtgtacatccacgaacaatttatcagccatgtccttaagttttttctgtaaatcagctggttggagcggtgatgaatgttgctgcttcacatagattgtatcctttcctcccattttcactccaacaattacgtgcgtaccatacttttcaataaacctgtaaatcaaaaacattgaaacactctaaaaaccaaagcttttatcttgacttttgaatgaaaaatatcaattttccatttctctgaaactaagcttcccacgcctaactctacaacaagatatggagaccagtaaattatagcaattgctatggaaaatgccctggagggacttgaatgtcagaacaaagtacatacctgacagtttgagctatgaacaaagtttttgaacacttgattgaacaaaaatagaaagaaagaatgaatcaacgaaccttgccaatgcagcaggatcccatgaagaagggacagcttgtttgacatgatcacgcaaaaggaggtgggatttgtcgagggcaatagtgtaaagagttatggaaactccatcaaaggccagagctttggtgttggcagcgtctttctgccaacctccggtgaattcaaaagcgctgttgaaatgaccacttgggattttaccagaaagtgataattcctggttaaacagctctgacatctacaaaccccacaatcacaatcaataacactcttgtgtggtatgaattagtaaagtaataattggaaaggaaaggaaaggaaacggacctgttgaaaagagagaacatcagagccaaacctcatgcgctcgcctttatcgcagttaattgatttaggaacgttgggtatacaaacaccgccgggaatcgaaatatccctcaggaaacgatcaggtatggcgatgagacgagagtcaggggaggaagatgaagctttacaagacttgagacgcaagtcaagggtgagatcataacccaaaccaattgaacggatggcagagtcggcggcggctttctggtcggcggaacgaggagccatatctgaatcacaaaacccaaaacagaaagagaaagagagaagaagagaaggaagaagaagatgaaagaggaagtgggtggtgaaaaaggagaaaaagtttgggttttttttggggtttggggtgactggtcaaacctttgagaattagaaagtcaaaccaagagtgctgttgttgttgttgatgaaggcaaaggcagccaccaaagaataatcacctgcactcgcctccatcaacccatactctgttcctttctttcacttttcttttcttcttttagtaataaaatcttaagttaatttgaatatttgcctattttaattttgatatatatatttaagggcacgttttggacaatagtaaaattaattaaaagttaataaatctaataatttcgattttcagtggttcgaaaaaaaaaaattaacgatataaaaaattttgacaaaataagtttgaaaaataaaaatgttaatttttaataaaacatgcgtctttctttagaataacacaaccaaccacaaatcactcatggacatggaggtggctccctaaattaataatatttaggagtattattaatattaatattatgggtgggaatggggatgtataaaatagtgttacagtcaataaataaaaataataatataaattgtgtaggattaaaaaaacattgacacatcacaaacaaaaaaaaaaggaaaaggtaaaggggtttgagagaaacaaaggttgttgagttgaccaattatttatttgacggtggtggtggtggtacggttgttgggttcagacaaagaattcttttaatattcttagtattctattctataatatgaattaggctttgcttataatatgatgccatgatatcatcatctctttcacatttaccttttcttctttttaaaaatgaaaaagctttgaatttgaaactcagttgaaatttgctgaaaattgaacgaacctaactcccccaattccacttttatttatgtgagtttcccagagattactttatgtatacacaaacacaagtttgttatgaattttgcattgataaatatgtgtaatacactattctttgtttgttagttaatgaaaaatattgctacaaaaattgatattatatatcaacaaagtaaagagaatgagaatcacaatacttccttttcaagtttcaagac

SEQ ID NO: 184867 - DNA, 2315 bp, Cannabis indica
gtacagttaagaaagcttaccaaatggttaccaagagcaagctagctattaataaaaagaatggcataacaattaatataatatatattatatggttacaaacatcacagaaaattggtttaatttagtgtctcgagcttttaattaacaatattctattcgtttattggctattccaattatgtcggccaacaaatgaagattttaatattctacatggaacttttattttgaagacattcttttctttcttttttagaagagattctaatctagctgaaaacactagtaaaaaattagttatgctgactattctgcccttttattcttttaatttatcattgcacaaaataattgaatattacattggcctcatttccattgacctataattattacatttactcatagttctatcttcaaaaatagtttccatctcttccaaggtcttgccttttgtctcaggcaaaaacaagaaaaagaacaaagtagccaccaccattactcccccaagcacaaaaaacattcccccaaatgttatttccttagaaattgtcaaaaatgtcattgacactgccccactcaccaaccggttcaccgatatggccaggctcgtaccttgggcccgaagcctcgttgggaaaatctcagacgagtaaacccatgttactgggccgagcccaattgaaaagaacgaaacatcagcacacactgctacgatgcacaataccagagcccaagtgggcctgctactggaactctccataaacttagagcccaaaccaagtccagcaagtgaaatggccatcccagcggatcccaataacaaaagaggtcttcttccaaatttgtccaaatacaaagctgagaacaacacgaaagaagtctttgcaagccccatgataacattcacgccgaaaagatgcgttttcttgtgtatgccagctgctttaaacacttcaggacagtagtatataacggcgtcgtttccagatgcttgcataaaaaagttgagcccaatagcggccacaaccatccgacgtatgggccttgatgggcttaataaaagctccttccaaacccacggcccaccatcccaaccctcatgggccgggcctgctgccttgacaatttcctcatatcttaactcagcttcagtttcagtggatgatatcttaccaagaacctgctttgcctcactcaatctgcctttcatggcgagccaacgtggagactcaggcataaccatgacccctaaaccgattccgatcgccggaactgctgcgagacccagcattagtctccaatttatgtgtgcaggcaagcctgacaaggcgtagttgaatatgtaacctattaagataccgaaagtgatgaagacttcgggtaaggaggtgaggaaaccccgggacagggctggagatagttcggctgtgtagaggggagcgatcatgagggcgtagccgacgccgatgccggcgactacgcgaccggcgagtaggaatgggaatgagggtgctaggcccatgagaagggcaccaattaaaaatgttgttgcagctaagactatggtgtaacgcctgcctatgtaatctgaagtcttaccagaggcaagtgatcctattagagagaatacatttagggttcctactaaaatctccacttgggttgatgttatttttaaattctctttgatgaaaagcactgccccactcatcactcctatatctacaaaatgcacataattgagatgaagtgtttaatgtcagtagaataaggataagtaaaagggaaacaaatatcatatgaactaaccataacccaacaagattgagcttgtggaggccaaaagtccgcaaagaagagtgtacttgttcatccctggtttgttgctattaccatcctcaatggtattttcatttaactggggatcaattgcagtagccatgttcttctttttggtaaaaaactatagccaattttttaaaattttgggttgatgttgaattccatgatagaaaaaaatgaggtgggattaggtagcggctacggaagtaaatgaggtatctgctgttgccataacttatagccaaattttgcatgaagtactaagacgtggcattgcacaattaaagaatgaagaaaacgttcaccaacagacaaatactactattgcatattaatttaactttgagtgtggcatttaatagtagttagtcaactacaaaataagcatgttacattgtacaagtggcttttgtcagaaaagttataacataaaaaactgatatctatatctataatctataactact

SEQ ID NO: 184868 - DNA, 2919 bp, Cannabis indica
atatgtaaaatatttaagtcgaattcaacttttttatcacctttttgccaaaaaaaaatatttttttagctgatggaccaatctcagtccatataatgtaaaaattaaaaaaaattctaattaaatagaaaaattaatcataaaaactcaaaattttctaatattacctatacctacatatgacaaaaataaactaaagggagtatttcaattttgtactatttttttttaaacaattcaaataatttttgttacttttcttttttttttgaaaccactaatttttgttattaaaactttaaaaattattactaatacataataattaatgtaaatatatttagccaccataagttatatatatatatatatttattttattaaattaagaaactttactaatcatatgactatgataattggtttttcagtaattgttgacaacgtagtaaatgacaatgcaaaagaccaaagcccaacttcaaattcagcccggcccaatatacaaggtaaggattagatgggcctggaattgtttgttacctatttgaagaaaaacaaaacaaaaacaaaacaaaaagagaacaaattaagtcaggggcccatgtccaaagcccccaaacaaggttcaaaatattctttaacaaaagttttaaatttattttataaaaataccatattgtatttttactattttttattaaaaatataactattttctaaaagaaaatatctaatttattttttacgatattatatttaatattttaagataaaagacccaactatatttctcaaaatactatattttagatttttaccattatgtatgaaaaaatcataattttttcatataaaaaaaagtccaattaagaccaacgaaatgaaaagctgtggtgaaatctttgaaaaaattcaaaaaaaatcttaataattgggcaagtagaaatttgtcatttgctgggagagttcaactgattcactccgtcttgttgggcatgaggaacttttggatgaatatcttcatcattccttaaaagattatagaggccattgataagtgttgtagagatttcattttgggtattattggtaatagaagcaaattttatttccttcttgggaaaaaatttaccttcctgagaagtttggtggtattggcttttgtgaaggtcgtaagtggaacattgcaatgatggcaaagtatatttggatgactatgtccaaacaagacaatctttgggtgaaatagattgactcaagttggtacgtcaagaaactaatcaaaattagaaattcaatcaacaaggaagatttggctaaggcagtggctccaaatggaaaattcagaacaaagaagttccataacactctgattaatgcaaatagagtgaattatgcaaatgctatttgacatagattatgtgtcccaagcatagcttcattgcttgacaaaccatgaacaaccaactccttactcgtgacaacattggcagattcttggagttgtcttcttctctgtgttcgtgttcgatgtgtgaagttgctgatgaatctcactagcagttgttctttgattatgtttatactaggaaagtgaaggaggatataaagacctagtttagcattctgcagtggccgaattctctggtggaatggagcagttggtgcaataataccaagttttctcttttgaatttaggtggtgtttggttgggaggaatgagaataaggatgggaataggaatagaaataggaatagaatggaataaaatttaaaacgcataaaaaaattgataaaaaaagatcattaaattttttctaatgttacattagaataatctttcctttcattttaatatggaatagtcattccactaaaataatgaaaaattgtattatattggaatgacattccaatactttaaaatgcaatcaaccaaaagaatagaatgaaattatttcttttccattccatttcattacctccaattaaacaccaccttagtttttaatgttgtaatctctacttatatattttatttggtgtaatagaaacaaatgtttgtttgatagtgtttttaatttagccaagataattagctgttctgtaaagttagttatcaaagctggaattagataactaacaagtgtaagaatgataaaaaactttaaataaattttacaaggacgaaaccaagaccactggatatcacatccctctttagtttgcaattctgttttgttggggcagcttttgctgtagcctttgtttatacttttggttttgtttgaataaatatttcctttcccttaaaagaaagggtaaataccatgttagatcctgtgttttacaaaagttatcagttggactctctgttttactaaatgacgaaatagaccctgtattttccacaaatgtacaaataggatactaaattaattttttgtcaaaataaaacttgataataatctgatctatagatgttatgataaatctggttacattttctgtatttgttagtattaaaaattatcttaaagttagttatattaaaaaataaaattgttgaaaattgagttcaagaccctatttttattttagaaaatataaggtctattttgtcaaacaaaatacatggtctaattggtgacttttgtaaaaatacaagatcaaaaatagtatttaccttaaaaaaattaaaaaaattcaattaaattttttaacctaagatcccaatgagattaagagaggctagcttgaagtcaagtaccaatttttgggaggccaagagctttgagctttgagctatgggaggccaactggatcctgagaagactcaattgtgcagccgacttcgtggctcggtgggcgattcaatctgagcagtttgggtcgattgaattggccaattttga

SEQ ID NO: 184869 - DNA, 11277 bp, Cannabis indica
ttttttttttctgaattgacccatgtcaataataaagaagaatttatcattgaatttctaagtttgtcacttacacaacctcgtgggaggatttctaggaatccagctcgttaaggacttgacagggaatccaacatgggttgttaaaaatacaagtgatgataattcattgacttatgtacaaacaatgactagtcttaacaaacatttatgaaacaatgccatgaatcaagtggattccatgcgttcaaattctatctagaaacttgtacttgcatctgatgactttagggccatcgaatgcaagtggaaatacaaagaaaacgagatgttgatgaaaaagtggagacgtacaaagctcgattagttgtaaaggagtgccctcaaaagaatgtgtggttggattaattttttatgaacaacttagggtttgtgaagattaacaatatttggttatattcaaaattatccatttttatgtttttcttttttaacaaatctttttagaaaattccatcttctaataagcttgcactaatatatttttattttagatatgtagagaaaaaatataaaccaattttttattttttacactttctaattatttaagatagagtttaaacgctgactttgtaaattatcactatcaaaaaaaattagactgaatttttcttttttactatatagaagcacccaaccatttttatacctaatttaaattaataataaaaagaaaagagaaatttacgtggtatactaacttttattaattttttacaaaaatattgtcaggtggtattttttatttttttactatattttttataagtttcatactacagtatactgtattaagttttcactagtgttttactggtattttgtaattgttctactgttgttttgagttgttctgctttgtgttttactggtgttttataaaaatacgatatttttgaaaacttttccgtgtgacagtatatttataaaagttaacctaaattagagtatttttgtaaatgtcctaaaagaaggctatgaatatgaatcactaacccttgaaaacgtttccattagtacaccgccattgaatcatagccatcctccattgaaacaaagaaacagagaaaaaaaatagagaaaccaaaaatggggaagaacgacaaagcagggctgggtagggctctggtgaggcagcacaaccagatgatcatagagtccaaggaaaagggacgcttctatcagagtcagcataagaaagttctcgaatcagtaaccgaagtcaccgacatcgacgccattatcgagaaggctgaagaggctgaccgtctcttctccctcaacgcctttgagcctaaagttcctatcgctttgtgagtttcagattcttatctacctattctacttgttagggttatattgtgttgatattgtttttgagcttctgttatggactccggctttaaacctgagcttccctaagtgtaggtgtttagggttaattaggaacttttcaatttggatatgaaaaacataaactttaagctttaaattaataccaataacattcatgccgcattatcgttctgtctgtcataagttccctggaccttaaaaaccttttttttatttcctgtttataaattttataaagtaccatgattatagaagaaattcaatagtcactacaatctgaaagaagagaactgaggacatctgagtattatatgtaaccaacttgagaaagaataatcttgttcatatgctctgggtgattttctcttgttgggtacctttcttacctatccttgaacatctatgtatgagtttaggtagggtttaggagatgttactactaaaatcatgactttaggctagctaatttgtttttaacagttttctaaatgatatgctctttttcttttttaatttgttggcccttatgttaagcatattgaggtttagctgaggtttagtgtgcttaaactttcgttatgcctgtttgtttgtgagtagggatggaagttcgagttccagtgatctgccttctaaggaaaagggggaaaaacaaaaggaggaggaggaattacatgccagcagtcttcgagttcctcgcaggtatgcttgtgtatattttcttaatgttattacctttaatattacttttacaattctagttcattttttgataaatccttccgcaggccaaaatggtatgctggaatgtctgtggacgtgcttgatgccaatgaaaagcagtctttcttgacatggcgtcgaagccttgcaaggttagtttactactttaattctaatgcttttttgttgatgttttaaaacgaaatcgaaataaagtttattgttctcttgatgcaagatgaaacagtgattgacaaatattacataatataaaatatatatttgtgtccaaagctattatctttaatatttttttttgttattctactgtctcccctacatttgttcgaccacaataattataaaaaattcttgaagtggaagtatgtgtgagtttaatgactttaaattagaacagggttgatttatttgcgtcatttgaaaaaatttctactgaattcagcttgtgaattgggagatttttgaattaaatactttatttgagattaatggcagaactggcttatggatattatccttcttttgatatgaatttgaaatgagcttgctatgtgaacggactgcattaatttggataatatatgactatgaagtcttgaacctgattgaagcatattgactattgatgataataaacaataacatataattatattttgtactaagttaataatttggatccaagctatagtgctgtaagataataaatattgtattgcccagaaacagaggaacatgcatgttataggagctctaatttcctttaatgttgcgatatttcactagtaaaatggcgagtatagtaaataatgagaaaaataaaataaaaattagattagaacttagtccattgattgagggcatatttatttctgttctttttattatgccttcaagttttaccttctgaactttattagggatttggtttaaaatacttgtaatcttcaaatgcttgtcattaattaccataagttggaaattttgaataaatattattagtatcttttaatgatcttacatgaatcaagaatgtcctgttattggtttattctagtttgaactacttgcttaattttatggacgcaatattccatactattttcttgttgttttgtgaatttgattgcaaattactattgttgctcttccacgttctcatatgatggtattcacttgcagactagaagagaatgagaaccttgttcttactccattcgagaagaatctagacatttggagacagctttggcgagtgctggaacgaagtgacttggtaggcatttattttctattgataatttagatcaaacaccataaacttttcttctgctgtttgaaaacaaaaagagtcaagttattattgacttctttagcattatctgtttttatgtttaggcaagaaataatcagattatgctgagatttttggctataaaagtaaaactaagaattagaatggctggtaatttctttgctcttgatacagattatgttatacttgaaaatatatttgtatgaagttcatttgttcaaattttagcaattatgcaaaaataattatgtcatggtgcctagtaattggaaaagccttttaaaactcagatatatgaaatcattaatcaattaaatatattatgctttaatggtatgtctctgcatagtagaagcttttcctgtttagttattaaatcatataatttacaatgtaattcaggcaaaggcatatgatataaaaattaagatatttgctgcataagttccaaagtttcacatttgtaaccggcagtgattttttaggctccatttattaagctttgttaggtgttgactggaccaacacatttcacttcgtgattggtggtcgctgcctgttacaaacataaaattttgagaatttatgcctcaaatatactcataaattaccatcttataaaaaatatatgtagtaataagctctgggatttgaactttgctgtgttggtaaccgaagcgagaaatctctgactttgattccgatagatggtatctctacctgttgcatattgtgcgttcttatctgaatatacattaatgatcaatatgaaattacaagccttttagtcgtgttctgtattttatcttgagtgactactgatcttcttggttcattccagattgtgatggtggttgatgcgcgaaatcctttgttttaccgctgccctgatctcgaggtaatcatttgttttcttgtttcaggaaaaaaatgtttgttgttactaaacctattttatcagatgtgctgtcccaaatatggcacttcaggaagggagaatagaaaagttttggatatatctagctaccgatccatgaaaaatgacccttctgcttgatatcttacattaacaaatagaaattttttgtgtttcataaatttacaaaagaaaagatgttacaaatgtagtggtattagttttgctctgtgagatattgtagttttcttttatggtgtctaatctatattctcgtcatccccattctagcatggtcttaagactcttagcaacattaattttttttaaagctactaagcattgctctttaacgatgacattactttttagaggattatttcatatttgacacttgagcaattgatgccatactacttgcacagatttatgcacaagaacttgacaagcacaaaaaacgttacttctggttaacaaagcagatctattaccatattctgtcaggttagtagcttctcaattcaattttttgggttcatctattttcagttcgtgacacttattaaaaattttattggcagggagaaatgggcacagtatttccgtcttcatgaaattctctttgttttttggtccgccaaagcagcttctgcagctctactagggaaaacctccagtgatccgcagagcagcattcaggaatcagatgatcccgatacgaaagtatatgggagggatgagcttttggcccgtttacagtctgaggcagaacaaatagcgaagaggaggaggaatgctggctccagcgatgttagttcaactgatgccaattcccaaggaggaagtgtatctgaaagttccgcttcaaacaatgtggttgtgggatttgttgggtatccaaatgtgggcaagagttcaaccattaatgcattggtaggccagaagcgcacaggtgtcacctctacaccagggaagactaagcatttccaaacattgatcatttctgaggagctaacgttatgcgattgccctggattagtatttccatcgtttacaagttcaaggtatgagatgattgcttcaggggtactgccaattgatcggatgactgagcacaggcaggctgtacaagtagtagccaaccgagttccaaggcaagttattgaagatgtttacaaaattaaacttccaaaacccaaaccatatgaaccacagtcacgaccgcctctagctgcagagctgttgaggtcctattgtgcatctcgtgggtatgttgcctcaagtggattgccggatgaaacaagagctgcccgccaaatgttgaaggattatatagatggtaagcttcagcattatcagcttcccccaggaatgacagacgatgaggaagataatgtaggaactagttcagacacgtctgacgttgagaatactccagctgataaaaacaacaatgcccctaatcttgaaaatgtgctcgacgatctcaattcatttgacatggctaacgggcttacttccaaaaagggtactgcaaagaagcctagggctccacataagctccacaagaagcctcaaaggaacaagaatcgtacttggagagtcggaaatgacaatgatgatggaatgccagttgtaagagttttccagaagcctgtgaatgccggttctctaaaaacagtctgattactttcctggttcgagtaatctctccaaatcaatggcattatatgccaggccatgagcccttggcaaccaccaccaaggcaatcccagatcatatgaggttcaagtattaagaaaaaagttcaaaaggaaattaaatgtgctctaaatcttctaaagcagtgccaagttaaatgatgtttgttgggattttacaaggatggcctgtgtatatttgtttctgttgttcttattgggttatttattagtactgtttttcatataagctatgaacccactcaattttgattgtacaccataagatcagtagatttcaaagactaattatgaggatatgagttttgcttgagattcaaatagattggattatgtttgatatagtgtgtgatcggttttaaaacatagttctatttatctaaatataaaaaacataattctatttaaatacgaccaagtagaataggaatctaatgtatgtctaaattatttttattgttttattattattatttattgctttcaaaaggatatattcatgttagaattttcttacaaaaataaatttagtccaaacttgatatgagatgcaacttttaattggtaagtaatgtcagatttatggcaactaagaggaaaattttaatctagcagctttacacatttccttatgaaaaaagagtgttcgatgtaaaaaaagtaatggaaaactatcccatatatacttttaatatattacgaacaaaatggcggttagttagaggtaataaaataaaaaaagaatataaaagaaacaatttttgtttagttgtgttttaaagtattggaatcatttcaatggaatgttctttccactattttggtggaatgactattctaatttaaaaagaaagaaaaaggatcattccaatataataagagaaaaaaaaggtaaataccattttagactctgtgttttgtaaaagttaccgattggaccctcgttttgttaaatgacgaaatggaccctatattttctaaaatggtaataataggaccctgaactaattttttgtcaaaataaaatttaataataatcctatctaaaggtgttatgacaaaactgtttatattttctgtatctattcgtaatttcaggttggttatattaaaaaaaaattgtcaaaaattaagctcagggtactatttgtactattttgaaaaaaaaaatagtatctgttttgttatttaacaaaacagatggtctaattggtaacttttgcaaaacacaggatccaaatggtatttatccgagaaaaaatttaatgattttttttatcacgacaccataaacaatagaggaaaacataaagagaacactctttttcaaaaaattaaatgttttacaagtcaaaacattctaagcaataagcaaaaatataaatatttatttttataattattaccagacaattaattattcacaaacctgtagggttaatattttttcatttcctatctcatagaaaaccattagatctatatctgctagtgcaatgcacgttataaattttttgttgttctgttgcatttttattaaggtcaattatgtgtaaagccttaatcatattttaagatattgaatacataaaatgtatgtaagccatttaatttaaggagaaaatatattttatattatttattattttttttttttgaaaaagatatattttgatattcaagaatgagtatatgttatgaatatattattttttttaactctttttgttttcctttaatttgctgaatcaatctccattaattaccaaatactattagttggaaataagtttttttgggcaatgtgtactttttttttctttaataattttttgagatttttttatttttacacttcaaaacattttatttttgtatttttatgaattttcgtattagatggctgtcttttactgtttacacttcaaaacaatcctcaatcaaagagaatggctgccttttatattggatgttgaagttgtcttcgactagttttagctctaacaaactaatagttttttccaactaggattagggagcatgttgatatggcagggagttaagtgagtcaaatccactataaatctacctaatttgattcacttgctcattgtctaattagtattaaaagagttgaccatactcttgcaatcgagtatgctctagaggttcaaacaatggataaatttttctctagttacactttttgtgaaaatgttagtaggcaaggttatcatgagtacaaatttttgttacctaaacctattttttttatcattacatctctgatgaaatatagcttgatgtcaatgtgttttgacctctcatgaaacattggattcttcatgagatgtaaagcactttcgttgtcacaatggacaataatgtcctcagagttgaatctcaattcatttgtcaatccctttaaccaggtagcctccttgatagcctcagttgcagccatatattctgcttttatggatgacaatgcaacaactttctgcatgttagacttccagctaacacaaccttttagcacagtgaacacatagcttgtacagctccttctagtgtttatatttgcagcaaagtctgagctaatatagccagtaacttcttatttctgttagtattcactattaaacacaatccctgtgtttaatgtaccttttacatacctcatgatccattttaatgcttcctagtgttctgtgcctggatctgagatgtatctgctaacaacactcatggcatgtgtcaaatcaggtctggtgcacaccaaggagtacataagactcccaacacagctggcatatgggattctggtcatcttgattctcttagtttcattgtttggagactgagatattgatagtttaaaatgttgagtaatgggagtagcaactggctttgatttgtccattccaaacttgtctagaactttttgcaggtagctcctttgtgatagagtgatacaagtttgagtaggtctatgtatatatatttctagaattcttttagcctttccaatgtctttcatttcaaactcttaattgagtttcatcttgagattatttaactttgatctctcctttctaattattaggatttcatcgacatataataataagtatatgtgatcagtgaaatagacacaaggaacatacttacttttgatgaatcctattttgatcatgtaagagtcaaatctgagattccactaccttggtgcttgcttgagcctgtagagtgatttcttcagtaagcaaacttggtttgcatattctttgtcaaacccttctagaacctccatgtagactttctcctcaagttctccatgtaagaaagcagatcttacatccatttggtcaaattctaggccaaatttagcagctttggccgtcattgccctgattgagacttatttgaccactggtgagaatatctcattgaattctacaccttctttctgtgtaaaccccttttgcaaccaacctttctttgaatctggtgggttttgaatctggtgggttcagcactttgaattccttctttgtgcttaaaaatccacttgcagcctaccaatttgcatccctctagttttctgaccattatccaggtcttgttcttcgctagagagaccttttcctcatctatagcttgtaaccaagttgttccctctttcccattaactgcttcttgatagatggttggttcaaagctatctatttcctctgttacagtcaatgcataggtaataaaatcaacataaccaaacctatttggtggcctgctttctcttctttctctgtcttttgctagttggtagctgcttagatcaccttgaccactctcattctcaattgtgtcttctaattgtgaagagttatcatgtgattagtccacctcaatttgccttccttcttgcaatgttgtttgaacaattttaggaatgaccttggtcttcatagccatttcctcttccttaaacacatctctgcttatcaagcatttcttgtgtcctggtttaaggcatcataatttgtagcccttgactccctctggatatcctagaaacaaacaccttagagcctttggcttcagtgtgtcttgtttgatatgtacataggttgtgtaaccaaacactcttaagtgttcaaacctaggatggctgccttttatattggatgttgaagcagtctttgactagtttcagctccaactgttttaactaacagtttttgccaagtagaattaggagcatgctgatgtggcagagagttaagtgagtcaaatccacctaatttgattcacttgctcactgtctgataattagtatttacactttttgtgaagatgttagtaggcagggttatcatgagtacaaattttccttacctgaacctatttttccatcactacatctttgatgaaatatagcttgatgtcaatgtgttttgacctctcatgaaacattggtttttttatgagatgtaaagcactttcgttgtcacaatggacaataatgtcctctgagttgaatcccaattcatttgtcaatccctttaaccagatagcctcctttttgtttttttgctaagacatatagcctccttgatagcctcaattgcagccatatattttgattctgtggaagacaatgcaacaactttctacaggttagacttccagcttacacaatctcctaacacagtgaacacataccctgtacaactccttctagtgtctatatttgcagcaaagtctgagtcaacatagcgagtaacttcttatttgtgttggtattcactattgaacacaatacttgtgtttaatgtacatttcacataccgcatgatctatttgaatgcttcctagtgttctgtacctgaatttgagatgtatccgctaacaacactcgtggcatgtgtcaaattaggtctggtgcacaccatggagtacataagactcctaatacagttggcatatgggattctgatcatcttgattctcttaatttcattgtttaaagactgagatgctgatagtttgaaatattgagcaatgggaatagcaattggcttgcatttgtccatactaaaaattacgttttaaaaaaattctgattttttaaatatatttttataatttttttttttct

SEQ ID NO: 184870 - DNA, 1932 bp, Cannabis indica
atacgataacaaaaaagaaaaaacctcttaatgttattaagtgccatatcattgatatatcccccttctatgagcccaggcgtatcaataacattcaatgtaaatcccgcccttgagcgggacaccatcaccggtcttgtaccttcagactatcaaaaagaaaagcatacataagctatgtaaaatggaggcataaaccagtcaaaacaatttacatcatatcacaagcaaccaaaaaaatgtaaaggaaaacgacaagtacctgaaaaggactaatagaaactgccctttctccaatgagtgagttcacagtggaagattttccaactccaccttttcccatcacaagtatagtcaaagtattcacattctacaagtacacccatgaacaaatgttaataaaatatcaagcttttaagcccacaattgagtaaacaaacaaacaaaattattcatgataaaacgaaacatggattttagaattaagaatgaaaaactaataatggaacctcaatcttgagctttcctaacaattcaaacaacttggtttgagtagctggtgcaaatgtgtttatccctgaccattctcggataacttgggaagccatggcacctaaaattgaaaataaacatataaattagcactaaatacacaaatatacaatgctaccaacgaaagcatttgtggacacagattttggaccaagccatgaatttaaaattgcaaaaatcacatgcaaatagactattgaatttgactttggtcatagaaaactatggatcaaaagtcaatcaaatatttagtaatcttaaatcgacttaagaaactcctcttgcatagtactcacagaacacaactctaattagaaaatacaaatgcataactagtatctgcaatgtactctataaatataaatacatcgtttcgaaaggctaaaatgtgagaagaggcgttttcccgtagtacctaccgcgaggcgttagcttcgaggtgcattgaggggtaagcctcgacaataagaataacataaaattcatataacaacacataattccatatcaaagtcataaaattcatgaattactaattataagtcttaaaatcataaccaatatcattaaaggttcaaaataaaaatcattgacagagatggaaggactgctttgaggagatggactggttgtgtgattaaagagaacagagaagatgagacctagctgtgttagctgcgtgcgtgactgaggaggacgaaagcttagctgtattgttgcgtgtgtgaagagaagagaagagaaggggagaggaggagactatcgtgaaagagataagggtaagagatgagtgtttttaggctattctcatttagttatagtttgggaatcttccaaaaatattaaattttggttaatttttaaaaaaaaaaaaaaaaaatactaacacacaaaaattttaaaaaatactgtatttttacaaaacagtggaaaaactttacatagtacacagtatttttaaaaaaagaatacagtatttttaaaaaattccatcccacactataaaagtaacaaaattgaaaatttcaatatatatggtgtaattatctttatttttagggaatcaatccatctacagtagaatctctatttaagaatactctattcaagaataacctctaatttgttataaaaaaatcaagtcccgatttgggccagttataaataagaataacctctaaattgtaattagttatacattttttaagtcccgtattaacaaagtatacctctatataagaataattacatcttaataaaatatatacatgtattttgtaaatttatttatgtaaaattaataattttattttaaattataatacatgtatgaaattatatttactctaaaatatttctattatgatatagtattaatga

SEQ ID NO: 184871 - DNA, 8425 bp, Cannabis indica
  modified_base (156)..(156): a, c, t, g, unknown or other
gcccgaaaaaagtccggccagatagtacaacttcaggcaggatactaaaaacgtttaacttggtgcgagagtcatacttcatcttacagttgaattttaacgttgtgggcactattttcaatcccttcatatttagtatagcagtttgaaagtacnctatatatttgacaattttttctttttcaagattggatgatagatatagtataatgttgatgaatgacctgtcaccattttgaaacagatggagtgctttctgttacctcaacaattttttttgggtcaaacctttgcaatgatagggatcaggttgttgcttttgcattataactggtttgcaatggcttagaggaaagcctttctagtctcattcaatatgatactgtagtttatttttcatgaagttgctttcaaaaatgttgatctttttgattgatttgcagctaggtaaacaactgccagtaaagtcacaattttagagcataatgaactaatttttgtttctaaacatggagattaattcttcaatgtatttaatttggagatgtttatttgctacgctaattagtttgaaaacttaaaatttaaagcaatataactttcttgttattaattgaaactgtataattttagtttgtgtattttattattggtgaaatgttgctctatttttgggttttttaaacttatgatattttttacttttattttttttagaaaaaaaaaaatcttttacggcatatgggcaggaaagcatttttttcaggtgttacaaaaaagtgtcacttttgaagaaagtagttcaatcaagcatacagtcaatttttggaaacatcacttaagtcactctacctaaatcaggaaatattacaaataagatagctcaattactcaacatctaacagcttgaaaaaagtggaaaataaacacttcgggacagaaccggtggtggaggtggtggcaggcagttggagaatttcaactaactaaacaaaagttcaaagaaaatactaaaatacaagtgcaccatcctaccctccaagatttccctcctaacaatacctgctcactaaactgtttttagtgcttgcttaccaatccctaccattgtcttcattcatctcctttattactttaaccccatttctttcatctcttatcttaacgtattgcatttccattttgtagtagccatggccaagatcaagaggcttggcctgattatattgaggctagctgcgttcgctgctaccctttccgccaccattgtcatggctacaagccatgagaaggccagcttcttaaccatctcttttgaggccaaatactcacaaacacctgcctttaagtaagaattctaagcatatcttcaaatcttattaatggctagatagctacttttttatttattatttatttgtttgctaacaacactggtttataggtacttcatgattgcaaatgccattgtcagtgtttatgggtttctggttattttcctcccttcagaaagtttgctttggcgtctagtaattgccatggatttggtaaagttgccatcacctgccttttcacttcaaattgtgttatactagaaatattctataatttaattgttgtgatgaatcaatatcctaattgaagaacttttcgatgttctcacaaacttcatgcagcataataagatgggtttgatagctagagagagtcccaaatactgtgattaatgtttagatttataaccccttgatgaactttcaaatttaaaatcaaaataaaaagttctacaacttactgtttaaattttattcattcggtcaggtttttgcgatgttgctcagctcaagcatttcagcagctttagcgatagcttatgtgggaaagaaaggaaacacttacgcaggttggctgccgatatgtagccaagttcaaaactattgcgaccacgtaaaaggagctctagttgctggttttattggagtaatactttactttctgcttcttatgcatgctctgcacaccgccttagatccctttctcctgaaaaagacttagtttcttcttcacaccaatctatgagtacattaaaaacttaacgtgaaacttgtattgattttaatactctagaggaaaaaaaatcatatagtatactacagtgtatccatacaagcaagtagcaacagtagagaattcatgcttataagatatagaataattgtgtcttttctccttcattctagagtttctagttcaacatgtgtaagaaaaactacagttatgcaacttttgaaagcaaatgttttgtttttaggttgacgccacaagctttgcaactcaattatataaatcttcttctgttgacttgtgacattttaatctccaccttttgggcacaaatgaaatgaggacaattagtcctgtccagtccacctctactatttcagataaaaatatgatataatagaaactttgttattgcagcatgagaaaaaaacaaaggtgacaaaactttgaaatcctcctcaaaatgactcaagccccataccaaattagttgaggtatgccctacctctttcaatgtttttggaaaacctaaagtagacactaatataagaaagatgtgaacatggttaagcaaaacatgcctgttaatggagggagaataaaattgaaaaatagagttcatctctaatcttaccaccaaacacaagatggtgcaaaccaaaaacttgtcctgaactatcaaaaccaacagaagcaaaagaaaaaacaataataagtgaatcttacattagtacagagagaatatgaaagcccatgtaactcttcgaagattcagattattccatcatttgattttccttgtatcatctttagtagttcccaactgagtgaaaacaggagagtacctgtgattgcgaataactgaaacaagaaggtatgtatttgcagccagaaagaagatactggccatccatagttgaagaaaaacattcttccccttaaactcaagcaaatacccccacatcaaccaatgaagctgagctcctacccatatgattatgcatgaaaggcctttccatttaagtcttatgctgctccaaggcagcaacagtggcaacagacagaagaaccatacaaagtactgtgctgtaatcacctgttaacagtcagatggagtattagaccttatggttgatgacagccttgttcttgcaattcagtagaaattaagccttgtaaaataaataaataattgattgatgatgatgatgattagactaaccttattaaatgccacaaatgccacagtctgtacaaagaagcaaaacgggaggtcttcagcaaaacttgaaataagtacaagctgaactaaaaactgaggcaaaaatgagatgagcttctctgctatcatgagctcacggtcatactgaaggtagatgtggtaaaaataaacagaaaagttgtgccttggatctgtacgggtaagatgatatagcagggcctcgtgcagaaaatcccacccatacaaacaaaagaagaaagccgtacaggaaaagaacacagaccccgaaattaagccaaaaagtattctctccttcgttagtacacttttcataaggaaccacggatgtatcaaatgagccattcttgtaatacatgattgttgagatgacttctgttcaatatgactccagctttgaagagcaggccgacgaccagattgaaagacttgtgggtcaagaatcagaagaatgggaagtgcatatataatggggtagattctaaagtgaacaactaggccataccaaagtgcagcttgaaaaacacgtcctgttgcaaaaagggagacaaaccatagggagtaagatagatgttggtgaaaatgcatgagtcatcattagaaacagtgctatttacagaactagctatttgttaatgctgacgggatgctaaggacatgtcattttcttaatcaaacagtaaatattgtaataaccagatgttaagactactatggaatagttagtcatgcatataatttgtatcacagagaaaaataatgcatagtcataaaacataacaaactacataagtctttctactcaaatacaagaaaaacttcaaattagcaatttgaacaaatattgaatacattgtctaatatcataactgtaatcctaggtcatgtttgaagagaaacggagaaatagattggatttgataagtttatctaatattattttgttggtgtgatttagtaaataaattagaaacattaatccaaccacctaaataatccacctagcaataatcccactgagaaactttgaataattctatactacaaaattagtattgttcttttatcaatttactcatttagtttttgtttcttctctaatttttcttaagccaattcagtaagagatattaaaattttgttccccgcaaccaaaatccctatgtatatatagcatacaattgtggaccaacttcaactcttaaaatctctcctttcccatatttcaacgttctttctagtgttgttttttgattcacacttactatcctacaaacgttatagcatgtatatttccatatagagaaacaaaaacaaagtaacaagagtgaaacttacaccgttcatgagacatataatgatccaaagaatcatggcgcagacaatcggctcacagtttccacgagtcccaatagtaaaggtgaaagggttaaagagccaagaaaccacagaaacaatacatagattctcaggcaccccacgcatcttcaaaatagtacgtatgaagaaacccacaagcaaatctgcccaaaaaaaaaaatcatattatcagtgaaaaataaatgtatctcttagtgaagatattctctggaaataaatgcataaaaaagaagaaaaagaaaacgacatttctagttagtatacctgaagctgagaagatgaattttccccatgaccgatggataaaagaattgggcgtcagcaaaaaagcgagcaaaggggagtatctataagtggatctctgaaagggagagttcccagatgccattagagaagcagcatctgagaagacgaagtaatcaacatctgtgtacctaacctccatgtgtgtatcttgccattctccatataagattagaataatcctaaatattgctgagacaatgatgagcgtggtaaagctcacgaaggccattggtctgaatgagactggtaaaaccctagttagtgtatttgttccataacccaaaattcacgacttgtgtgtttggtccacatttaggaccaaacttgcacaatgtgatgctagtattgcttgtattacattatactaagtttagtctacaataatattagttaaagaaacaatataaatatattcaaaccatataatatgtgatgctaaccaaaaccgtaccacaatacatacccattcttatttcgatccaatcaacttcaaataagtaaatatatcataaatatatcctcattctaaccccaatcaacatcaaaattgtcagaaagtataaaaactagtgttttaaatataggctgtgctttttgacacggcacgaaacaggcacaagcctaggaggcacgagcacaatcaggcacaaaaaatatatggtttggacgcaacacgtcgacaatgttacaaattgccacaacacgacacgaaaagcgcaattgatgaactccactctgttgtagcctccttcccctatttaagtgtcactgctgacgtaagggctcatcgctcttgtctacaaaagctagttcacaaactagagcaagatgatcgcttccccatttcttactagggagtcctccagttcttttcaagatatcaatgggcaaggtttcaagaactttgacaggaacaaattcctcggtatgccaaatatagtcaacagtgcccataaacttggagtggtaggatgttgctaggggttctccataattatcccttgttctacaacttccagaagcaccaagatatgcactgcaaagctttaaatggtgcttgagatgagtggtcacttcactgcctgtagcaagccttaattcttcttcactccatctatgtgacacgggtaagctgcttatcttcacatttgaaggcctgaaggatttgcattttgaattagcttcaatttgtcctgagattttacagcgatcataaagtcgaatgtccagcttggatgatgccaagaattggtatataggactctgtggaatgctatttagatctccacaaagtataacagggatgcagccccattcacgtgatagcttggatgctttttcaataagtagtctcacctggcctagcttgatgtccccacgtttcggattgaaaagcacgtgtatatttcctatcacgaaggttcggttttggaaaggttgaatgattgattgggtatcagcatctaactttggcatatgttcgttcatctttagaacacaaagttgggcaacattgttgcgaagaccataatcttgatactctatactctcatgatgcaaaagagaaaataattcttctttccaaaatatagcgcatccatcaaaagcttcaccagtccgtgccttgtaaacacccttaaatccatctttctgaaaaagatcttttaactcagtaaagcgatcaacctcctgaaggcataggatgcttgcattgtactgcttgatctccttgcaaacaagtgtcttccgcctgtcccacttcagatactttggtgatacattacaatacaggtcttcatgattggatgcattttcaacacctaatatgttataagaaacaatcacaaccttatctctataagatgaagaatcacgcgaagagaaaacccattttctagagttcatcgtactacttgactccggtatagactgcttcttgcgccgccgatgagatcggcaaatggcattgtaactattaaacccgactaagcatcgaggtggatcaggattcaaagcgatggtttgtgcttctggtgataaggtgcttttatttttgtgatggctatagaatcgttttgatgaatggcggcgtttagaaagaggaacaacatgtgcgtgctccgacagtggttgtaatcgtttaggtggtttcatggtgcataaactgctgggtaaactgcagggaagtttaccagcaaaaatataaataaaacgcttggaagaatctgcaattaatttatttgtagtatgtaagcagtcaagtgcacacaaaatctaatatgttccaagtaacagcaagcatcctaatttagtcgtcgcacacacacatcttatcttacctatataataaatacctatctaacagaatttcttgtggtttaacaaaatacctttaaaaacttagttttaaagatgctgtcaaatactaacaacaatgcagatgcaaaagaataaagcataactgttcacatcttctctaaataggttattagttggtagttattcaatgaagtattttccattttggttcaaaacttctctaaacagctcattactttcaacgaagcattgccttttttgcttctattacaatgccaaatcaaatttgaaacaactataaagtatctatccaatcaacaacaacgcagcattgctccacattgaatgcaaagtaacttatttgtcactatgagaatatttccactttaagttgcttagaaacaccataaattaaattttatttggagagaagtttgtcaatgtcacccaacacttagtcaaaaccaataccgttatttctcagaaccccgtatatggaattatcctacttaaatacagtactaaaagaaaacaaaataaaaaaatcccacaataatatccatttacgaactattagtcatgtcacaaggaatcaataccatgttattcgcatgaaagaagcagtaatcccattgaaccaaaatcacaaaaacataaaatttctttcatttcaaatggaaaaagattgacccattgaacaaaatctcgtatgatcattacaacatatttatactgttaatgtttaaaagatttggataaggtgtacacatatacacaatttctaaatcttaaaactaaacatgataaactaattatgacaaacctgacaccattaaaaaaacgaaaaaaatggatagtagctaaatcatatccggacagagagaatcacttgagaaaaataaaacaaccagataaagtttcaatcgtttctctgcatttatggctgcacgataaaaagacatgttcaagtagagaaatcaatttagagcataacagaatcaactcagtatagtatgctcttcttctagactatttttcagagcaaaacaagggttgatttaattactttaccactgatcagaaaatataaataaaactacagtacacaaccataga

SEQ ID NO: 184872 - DNA, 2015 bp, Cannabis indica
aaaaaaaaaaaaaacataaaacatcatagaaatcccctctttggagcatgtgtagcacgaggaacgccccttatatttcaatgttaacgaaaatcaagtgaacatgtcactattgagagtgtccgtacgttttttccccggtaaatagccgttagcaggtaaactcatggaaattaaaattccactctccactgtccactgtcacacttcactaaaaaaaattaaaaacaaaaataaaaggagagaagcggagaattggaaccccaccattattatagccaatccaattagcgacccaaaaacaataatacagacaaaaccttacgtttctccactcaaaaacccttcctcactcctcactcaccaccaccacctcaaccaccgccaccaccgccattatttccgacacaaggttcttttatttcttatttgttcaataaaagttagaaaagaagaaatagaaagaaaggaacacttcgaaatctgtattattctaaatattatatatatatttgttaatcttagctttactttcagcgaatatctgactctgccaattttgagatggtttgagatagtagtgcctcgtttacagtgcccctttcataaatcgattccggtggagtgtgtcaatcaatcaacggtcctgattatacaagttgcctaaacaaaagaccgttccacctcttgtgatctgttctctctctctctctctctctctgttcttgttccaacgcaggtattttgctctccgatgcataatagttattttttattttatattatttcgaagctaataatgtcaatgtgtgtttttctctttcgtttatttaatcattttcatgggttattgaagcagaagcgggtttgagaagaacgaaaatgttgacatgcatagctcgtccgaagaaactcggagatgaatcgctgagtcaacccgaggaaaccgattccactaacatccccaacaataaacagcaagccgcgatcaaatcaatcacatctcaggtatgtattactgctgccatttttgggtttcgaacgaagtatgaactgtgtgtgtgagtgtgatcctgttttattatttatttatatttttgggggaattttcagctcaaggatatggcgttgaaggcttcgggagcttacaagcactgcaatccgtgtactggaccggcgacagtccaaggccgagttagaaacaacgtggaatcggatgccgactcggaccggttccaatggtcataccggcggacggggagttcgagctcgacgacgcccaagacttgggggaaagaaatggagttgaggcttaaagggatctcaagttcgagtggcgaagggacgccgaattcggcgagtggacggagagtagagccgccgatcgtgttcgtcgaggagagcgagcccaaggaatgggtagcccaggtggagcctggtgttctcatcacctttgtttctcttccgcgtggcgggaacgatctgaagcgaatacggttcaggtgtgcccttctctcctattttttttctttttaatttattttttttagccgcaatcgacggacaatattttatcatgcgtcatcatgtgtttccgacattttgatccgacggtgatcgtgactttctttggaaaaagtcacgctttgcttgacatcactatatgcccaaaaaagaaatgaaaaatcttagtataaaacggtaacagttaaattgttcggtggtttttcttttttttttttattatagaaaatatatttggtggttggtatacagtacttatatattttagatagggagtgtttggatgctttttctttatggctcattaaactttcccaaattgcttgctggaaatggattacatttaaaaatatttctagcttttttaataaaattgtatagtgtatatgtgtttattagtcatttgggtttgacccgggtggaaccaacaaaaactctaatcaatgattgaaaatttaaatcataatgtttttatttatttatattcaagg

SEQ ID NO: 184873 - DNA, 3020 bp, Cannabis indica
aaaagaaatatggatggtacttaaaaaacatatctgttttgtgaaacaggttgtgagcgacccgagcttgacaaagtcaggggtttactggagctggaacaaggcttcagcttccttcgagaaccaattgtcacaggaagctagtgatgttgagaaggctcgtaaagtgtgggatatcagtgaaaagcttgtgggtttggcctaataaattaccaacttgagtttctcaactaatctcttctgttaccaaatatgtgagagttctttttacagtgtttgggtttggagaatttaggaagctttgttttgctgtagagaaaattctcttgtagatgatttagaggtgagtgtttgcaaccactttcaataataaagaaaaacacagcattgttggaaagtacatctcaattaacaatacttctgaagaggataatagataacaaagactctgcaaaatcaatttgtatcaagatttcacatcaatttagtgagaactaagatatagtttcaagaaaattcttcaaaaaataaaattagaaccgcttattattaactcccaaagtttgatgacgaataacaagattcattgtattgttgcccattattttgcaattcagataaaccaatttactaaaaatcttcccttaatatagaaataaaaatgaagggaataagaataagaattgaatggaatcaaatttaaaatataaataaaaaaatattaatttttttactcatttttcatttcaaaatgtccacaaaagcggtgaaaaagtcatttaattgaaattacatttcaatacttcgaaatgcacctaaacaaaaaaataaaataaaaattcattccaatactttgaaatgcaaccaaataaagaaaattaatttcaattctatttcattacttccaatcaagtgcaatcttagtttaaatccgtgggagtaatacttctacttctatgagactagtttctgcttttaccaactcagctttaaattttatatctattgctagttgttaccctcaagccttgcataggccacagcaatatccaaaacaagtctccatcaatcacagtactaggaaggtaaaagctaaatttagaaagtcccggaccataagtttttcaaacactagagtgttaccccacaagccaatcagtctcacactctcacatagattccacatatagatacatgtaattttcctaatatattaaaagaaaagaaaaaagggaacctaaagttcataagcaggaaacctggcctcagaaggttcaatcatgtctagaaagagataagccattcctccaataccttcaaacagtgagtagggacaatcaccgccatgcatctcaccatcacatacgagtctttgagctctatcatggaggaagcatgcaaaggctttagccttgtacaagtattccactttatttgttaatcggtagagtgcaagaaagacataagcatttccactgatgccatgacagataccaactcgctttagcagcccacgattccatacaacatcccctgcatccattgctgcttgcagaaaatccttatctccaaacacctaaggttataaacgattagaaaatccttattttgttcccactgaaaaagcctataaggaatattcactaagaataatgtataagtgagaaggaaattcacaaatagaaaaggagctagtacgtcaagcctttatgtggatggaaacactgaagggttaagttaaactggcataaaaagacttagaaacttgcatatctataagcagtggctaaataatgtatttcatttctactactattacttaacaaatatgcaaggaactacctcagctgcctttgcaagggtaagagatactccaggagcaccatggcaccaatgcacaagacgatctgattcgcttccttcactggaaggataattgccactgggaaagcgattattaatcatgtagcgtagcgtgcccttgacatcctcaacctcatcaggtgtcagttccatgtccatcaagacatgcataatccctgctagtccatgagcagcaccccagtacttcttcccatgccattcatacatcaagggacattttcctttcttggctaattttctaccatcatttatgatctcatccacaagcaatctctaaaagaatttcattgccaaattataggtacgtgattctgttctcagagccaggcacaaagatataaaagggggaagttacacttacactgtggttactagagattgtacctctaccaatatgatgatttatgaatgatgatgcccataagaacccaactcttccatatagtagctcatttggcaatatactagagagtttaatctgtccaagaggcaaaggagaattttaggccgggaccatttttcttaattagagttgtatatatatccattacagaatcaatgaaaacaaaacgattagcttttgaaaggaacaaataaatttacctctttgaattgcgtcaagtagtggtcaagtagtcgttcatcgccagcatactttgctgcaacagcacctagagcacaaacaccagctcggccacacaagaatgtcacacgactgcaactcattgagaaagttattcgggatatattaatcaataaagatgcaagaaaggagtgaaacaacaagctcaaagtgattaaacggacttcagattattctccataagctgcttattaaatatatttcacagattttattgacacaaacatgtaagtcatgttggttttcaataaagaatcaccaagtatttaaagccaataacaatcaagttgaactatgctggtgagttagcacaactcaagtaaagtggcacaagcgtaactagtccaaggccaagcaaagcaatcccatgaatcaaatgaaaaccttagttaatctcagtcaagatgtaatgtaacctacatcacccatgatatcaaacacagaagagttccataaagtttgggtaattctgttaggactaaggtgcggttca

SEQ ID NO: 184874 - DNA, 2386 bp, Cannabis indica
cttgcctcgctaatcccaggcaaaaaggcaacaaccaagtaatccaacggctccagtgaagtaaggacctgtataagaaaacctgaccatgtaagaatatacagtgggatggccaaaagcaggagacaggaagaagatgcagctattgaagattgatctcgactatgatatggttatggcttaataagcaagttcatattttctgcagaagcatttcaaatatctatgacggaaatttaacaatctagtagttgtactgtatagataattgacgataaaccaaataataagctctcttatgattttttttactgttataacaaattatagagctacctgccgattggcagcttcactagactcagcaaaatctggccatgtcttcaataaaagatatcggcttgatgatatcactacaactaatcctgtaagcaactgaagatgccacatctcaaaatcaactgcacacaaggggagaaaaagtgacgctctataaatgaaaaaggttattccaccaactgttcaaaggaacctagcattaaaccagaagaaaaaaatcataatcaaaacaaaacaagagttccacatgattctgcatcagccctgagttctcgaatatgctataagatcgccacaaccaaatgtagactttgttgacaatgctgaatgttcccttatcaaagaggattaaagtgaatttataaaccataactatgcaataacagaaatgatgagacatacatgatactttcgaggaacaatctagtattggcaatccttctgttgatgcaagatgtgatacctacccattgcaaaagaggatattctaattaaaaaacagttgtatagaacatataaagtataatcatgtttggtttcgcaaaaaatttatatagcttataatatagttggctaaccaggtaaagaagaatctttcaagatgaactcccacagagttggtccacatattattgatggaaattattacattggagtataaggatactaagtaagaaaaaacattgtaagaatactaagtaaaagagcatacttgtcgaagcactacaccgaaagcagctatcaagccagaagtaacagcacatgcctgaagtactgtacccctggagggaaccatattcagtttttgtgcagctgaactatcagaagggtcaaatttagtgtcatcttcttgaccatattcatctttagaagaaatgtcagcaacacctccaagtggttttccattctttttcaatttcttcactgagtttcctcttgcaaatgccctgggattacaggtaaagccctgcaatgcaagcattacagcagcacataacatatattaaagaggaaaaattaatatttagagagaaatttactaccaagctttgagaagttaagaatctcactttgtgaaatctgggatataaagccttttgcacataatgccttactttaaaagtcccacctgatcacatgtttcaactttcaatcatcttaaaaggcaatccttaacataaatcacaagaacatgtccatacagaaagaataatgcataagtatcacactagtattaaaagtttttataagaaagaaaatttcctcgagctctactagaaattagaatgcaaattcagcttacatggaaaagacattcaatcaaaggtggaaatttctaaattctaagtgaaatgtgttaaaaaataccaacttttgagtaatgttgagccaaaacaagttcaatagagcaattcaatgtagcaatttccacagggacatggcttcaaccccacttatattttgtgaaaagaattaagcttgaaaaggaataatcttgttcctcctattctattggaacggttagttagttacttagttagtgttcttaaaagctaaaaccaagcaaaacccagaacacaagaagaataaaaatgaaaacaaaattaaagaaactcaagcaataattataaaactaaccacctatgaaggtagaacttatacaatgaggtgggtttgtggcagaacccatgaacatggtactggtcgcccaatagttaactgtgagcgaccgcatgctaaaaattcagcttttgggattccactgggttcttcaactgaacccaaaaagagaaaaatagtgagacgaggtttaacaaagaagaaaactgcttaatctcagaattgagaggagcaatggaaatctcagaggcattgaaaatggcagtagtattacgaccaatgacaacagaaagactaattatatgaacaaaaaaaaaaaagaatgacttaaataatgtaacatttactttagtagttttattatgattgaaatgaaacaaacgaagaggccgtcaaatgttcgagtctgaataatatgtcgttggtg

SEQ ID NO: 184875 - DNA, 9028 bp, Cannabis indica
  modified_base (8750)..(8750): a, c, t, g, unknown or other
gcttctctttttgcttcccctgctttatgttggaaggatgtctggtctcctcctcctatggattggatcaaattgaattgcgatgttaaagtggagcttcaaagcatgtgtatagctgtagttgctagagaccaccttagtagggtggtcggggttcacacttctcttttggatttctctgatgcgctttgcggagaagcgacgacttgttgtttggcggtttcggttgccatggacttgggctacaagtttgttattgtagagagcgactcgagggtagttatcaatgctcttaatgggatggattctcaatggactttagaaaattatgtctcattttgtaatagttactcttctcggttttctagttgtattttttctcatatcaacagaatttgtaattttattacccgtaatgaggttaggtgggccataggtttggagttgttcaaactattcctactgaactattttgtaatgaccaaaagatctaatatggttttattatttaatcaaaaaaatgcttttcaatccaaaaaaaaaaaaaaaaaaaaaagatataatatattatggagttttccttttaaatatatcaaagataggatgactggaaacaaaacacaacacgtggaagcgaccctagcgagtatccacactagaaatctatggcctgagattgagctacttgttcctttatctcctccattttagtcaaacaaaaaatcaacttcttgtggaactctcatcttcacagacttgaatttaaagggttccttagctacagaattataagggtcatacagagtttgtgcgttcaacaatggcgtctatcactaatccattgctctcttcttctaacttcttgggcactaaaatcccaactccaaaaaccactaaaccagtaccaacccctttctctcttttctctaaaagaaagtttttcatcaccgaaaacagtctcagcaaagaccccaaatccaagacgttgaattccataccatccaaagctactttggccgcccttctcttctcgtcgctcgctccacaagccttggcgttggacaacgtcaaccctccaccaactcctccacctgtaatcgaagcccaacccagccaatcagaatcttcccccttctctcagaatcttctcctcacagctccaaagccccagtctcgtaacgcttctgatcttccagaaggtgggcaatggcgttacagcgagttcttgaacgctgtcaagaagggtaaggtggagagggtcaggttcagcaaggacggttctgctcttcaactcaccgccgtcgatggccgccgagcttccgtgattgtccctaatgaccctgaccttattgacatcttggccatgaacggggttgatatatcggtctccgagggcgattcgggtaatgggttgtttagtttcattggtaatttgatatttccattcattgcctttgccgggttgttcttccttttccgtcgagctcagggcggtccaggtggccctggagggctcggcggtccaatggattttggaagatcgaaatccaaattccaagaggttcccgagactggtgttactttttctgatgttgctggagcagaccaagcaaaacttgaactgcaagaagtggttgatttcttgaagaacccagataagtacactgcacttggagctaagatcccaaaagggtgtcttcttgttggaccacctggtactggaaagacccttttggctcgagcagtggctggtgaggccggcgtgccgtttttctcatgtgcagcttcagagtttgtggaattgtttgtgggagttggtgcgtccagagtccgggatttgtttgagaaggccaagtcaaaagcaccctgcattgtgtttatagatgaaattgatgcagttgggagacagagaggggctggtcttggaggtgggaatgatgagagagagcagaccattaaccagctattgacagagatggatgggttttcaggcaattccggtgtgatagtattggctgccactaacaggcctgatgttcttgactctgcattgttgaggcccggcaggttcgaccggcaggttactgtggacaggcccgatgttgctggtagagtgaagatcctgcaggttcgctctatgcaaacttcattcgtatgcttagactatagtttagtagtgtttccctgcttttagtgtaatgttatcatttgataggtaacactaggaagaaatctatagataattaagcataaaactggtatagctatttgagtaagaacattttgagaaaagttttaaaggtttatacagaatggaatattgactttctggtgtaatcttgattcaagtttagaagcctcaaatatagtaattcaagtctttatagaataaatagttgtcatcgagttcctgttttctaaatgcactatgctttcaggtgcactcaagaggaaaggcacttggaaaagatgtggactttgagaaaattgctaggagaacaccaggtttcactggagcagatttgcagaacctgatgaatgaagctgccattcttgcggccaggcgtgacctgaaagaaataagcaaagatgagatagccgacgctctggagcggatcattgctggaccggagaagaaaaatgctgttgtctctgatgaaaagaagaaattagttgcctaccatggtatgaatgaaatgttctctgttcttttcattcccaattcatgtgctactcgttatttgtttaagtgattaccatgttttgtgttccatttgcagaggccgggcatgctttagttggtgcattgatgccagagtatgatcccgtggccaagatatctatcattccacgtgggcaagccggtggtcttacattctttgctccaagtgaagagaggcttgagtctggtctttacagtagaagctacctggagaatcagatggcagtcgctcttggtggaaggttggttaacaaaaaactaatactttatatgcatttgtcaaatctttgattgttgaaatgttttggtagtttaggacttctctaatgtaagaatgattccttacacttccattactgatacagagttgctgaggaggtcatttttggccaggagaatgtgacaacaggtgcatcaaatgactttatgcaagtgtctagagtggccaggcagatggttgaaagatttgggttcagcaaaaagattggacaaattgcaataggcgggcctggaggaaatcccttcttgggtcagcaggtaaactaatgattagtcctgggttttttgcacaaattctgtgtttagaatatattttggttagtgctgtacagtccgagaacaagctcatcacgggtgagatggtcttttcttattgtatggtgtgttactcaataaggaaaaatcattggacccgtgaagggctcatcctcgtatcagagagcattttccatctatacggtatgatggcctaatgatcaagttaattaattgtgtgtcaaattcagatgtcatctcaaaaagactactctatggcaactgctgatgttgtagatgcagaggtgagggagttggtagagaaagcatatgaacgggccacgcagatcatcacgacccacattgatattcttcacaagctagctcaacttctcatagaaaaggaatcggttgatggagaagaattcatgagcctcttcattgatggaaaagctgagctatacgtctcctaaatttagttctgtgcaattattgagctagctcaaagtagtgaaatcatgtttgtattatatgaatcatacacatgtacacatcaataaccaatttattatttcgtgaaattcaaagaaaaaaaaatagtgtgaagttgatgttcaagaaacaacctctctctatgatacatcttcgacaaagccacattttttccactgatacatgatataacttcccatgctctatgttactacatgaacctcacttgatttgttacaacaatgacaaccaccacttaagtagaataacaaattgaccaccaattgtgcttttctgaaccaacaaaaaatggaaaagaggaaaaaaaaaaatatacaggagcgcggcttctcaagatgctctcccaccacgttgcttcttgtcttccagtgcagcagcctcgtttaacatgtcggctgcatctttgtgcatgtctagctttgcaagggcaactgcctgcatgtaaaatgctgtagaccaatcgggataaacacactgtgcttgcattgcatctctgagggcggcatctggttgatcacaaagaagatgacagaggcttcgtcgggcataaacagttggtgaaaccattgttcccacatctatgaactgcaaataaagaatactagtaaacaaatattgatatatggtgagtttcaatagtttgcaagtcacacacctgagaataacagtctattgctgttttgaaatctttgtcgcgaaatgccaagtccccacgctttcttgcctccaacatatctctcatctgctgggtccattcttggaaagataactgacacaaaacccaaatttgagcatacagcaccgtacaaacctcttaaaacctacatgttaagcaatcaattttgaaatacctcattggttccttcatcgtctttgtagtgcgtcattaccaaaatctgatgaatggctgtgaggtccatccgtgaacaggcatcacccattgcagatagagggtgttgcggtgtagaaggtgcttcctcgtgctttgggatcccaagcatcatataagatggcacctacaagatatattcatcacaacatgctgaatactacaaaatcttgtgattttattatttaagttgtggacagaaacagacacaagctgttggtgtacctcaggcttaactttcagagcgacaagtgttgcaacaagatctttcgtatttggtcgctctctgggttcatactgcaagcaacgcgaggcaagctcaaaaaccacagtagcctcctcagttgaaaagtttccttccaagtgggaatccattaagagaagaatgttttttccccgtatcatatcaagcgcctgcatatatacaattaccaaaaccataaaactacacgtattatgaaaaaaaaaaacagctattaaggtaacaccgtaactgcataggcaagcatcatctatattacgaacaattgtttaatggtgttttctggatacaaaactaaccaccatttcttttctttttctttaaactaagtacctgaccactttgtcattagacaaccataaggtaacagaaaacctagtatccaccacttagtcgattgttaattaacataagaccaattagttaaaaaataaaaatgatcaaaacatcacacatcctcttgtgaccctttaatctttgatcgcaagaagtgttagtgttggtcagaggactattaagtaaaccctagaaagcatatccagagaaataatgttctcacataatactactacaccactcatgtaaattgtaatgatgaattttgagcagaacttaagtttggatggatcagtaaaccaatccaagtataacattattcttaggtccagtgggagattttattttattttaacttatttagtctccagtgaaatatttattacattaaaaagaaataagcttgtaaaactatttgaatgcaagttaatggtgtacaaccttctgtgattcagtatggctaaattgaaataaaaattgcacttatcaaaaaactcacatgacttggaggaatgtgctttccgctgagaaggtccaaaaggacagttccgaagctgaatataacactttctggagtcactcgtcctattatacacattgtatcattttaacaagatgtattaactagtaagcagatcatttttcactttcaaaatcaaatataactatatatcaaaagacaaggacaaagggataacaaaagatacaaactacaccacgccaaaataaggtactaccatattttcagctaaacacaaatatttacatgagcaaagaaataaatagttaccgtttcttaaatactcgggaggcgtatatgcaagattagtactataacttcttccatccctactgtttttcatcaagccaaaacaagaaagccgaggatcaccattctgcgaaaaaccatggacaaagttatcatgttgctcagatataaaaccaaaaccatgcacccaattatattgaactgaactactaaggaatatatcagcttgtccaaccacactgattaagctatgtacgttagcttaaaaaaaccataaatttcacaagcccaaatgaaagttcattggaaattacctcatcaaaaagaactctatatgcatttaaatcatggtacaatggacgaccttcagtactgcaataatctaaagcttctgctatggataaagcaactcttaaacgcatggcccactcaatggtttgattttcccctgtcaagaaagttggaaaactgattcagataaaagctcccgtatatatgggaatcctaaaattggttacttaaatcaggaaacatttaccattaatggttaattctcactaattgatgaaaaagaagaaaaaaattataactaccacattgggagaatatgcataattatccagtatttaattttaccattaattacaaatgcccatcttttcatgtaattaaaataaataaacaaaattaataactgcaatgacggctagagttggaaccatgacctctccctttttcccatccctccctcaccactaagctagccttagtggcttgacggcgagagtctctatttaatgtgctttcgtattcaaatgcaacatttccctatttgtcacttcacaaagccagaaatgcacttgaaaaccaacagaaatacccaaaaataaatctcaaaacatacaatggaagagatgcttcgcaagggtatcgttaggcatgtactcggcaacaagcagcctctcatcgccatcgcagcaatacccaatcaaattcgcaagccttttgtgtctaagctttccaacgcccttagcttcctcctaaaacagtcaaaatcgaaaaaagaaaagaaaacaaacaccaatcaagaggccaacaaaatcaaaaccctaaaagaaaaatcaaaaagttaagcaacaagaatgagagtgagtgagtgagtgagtgagtgagtacagcaaattgctggggatcgggccaggcgagcttggtaaatttcttaatggcgatccatctacgattgttctggttctgaaggcggcctttataaacgacattgggggctttctcaccgctctcggaaacgatgaattcggagctgaagttgctggtggcagcttttaagtcagcgagcgagaactccgagaagaccgacacaccaccggttccggcgacggctgtagtggtagtagcaatggcagtggcagtggtagaagagtcagttccgttgggggaatgaggttggattggattgttattctgcccctgctgagttttaaatccagagttgagtcctttgaaggcagaagatgcacaacagcccataactcggtcgagttgactcagtaactcagctccgccagctattataactctttatatataatataataataataataagcatagaaagagaaacaaagaaagaaaggaagagagaaaaagtggttcactgactgagattatataataacacagagaaagagagaaagggagaaagagaagaagaagaagaagaaggcctcgtgtggtggtagagagagaaagagagatctatagtgtgtgtgtgtgtgatattgagcattgagcagcagctttcttcttcgtctcattgccttctctctctctctactgacaaaaacctgtctttctctgcttccccctacagttgaattgtctcttttaaatcgtagagggtaatctcgtcattccacacacacatcaaccaacgtctcatttttctaacttgtttttactttttttttatgtctcggtattttcagcctttcatttcttgttttttttcacaaaattttccatgttaaaaaccaacttagtatccaattaagggatgttaaggttccattttaaaaaaaaaaaagggaatgttaaggttcctatacttaaggatgcacacctagcacacctagcaggaaattggcggggagtgctctctcgtctttgtcttgttaaaaattttaatccacttattatttctcatcaaagatgagattggaaatttccaaatagggcgaaaaattttctaaaaaaaaaatttataataaaaatttaaatatataaaaatattaaactacataaaaattaatatattatatattaattattatttaataaattaataattatttaaaattcataaaaatgatactaatatattaaaaaaatacaaacttaaattataaaatattattagaattataaactaaaatactaaacgaatcccatcgaagcggagagtgtgatcctcgtcctcgttcccgtcccgtttaacatttcggggacaaaaggtaatcctcgtctccacgctgtttcccatttagacgagataaccctgccccattaggggcgggtccctgcggggcctatccccataggaaaatgtgcatccctacctatagctgacatgtgttccctaagattgtcaaaatgactaaaggagtgggcagggctggccctgagttgaaatgggttaaggcaaaaaaanaaaaaaaaaaaaattagcccttactataaagatgaatgttattttaaaaattattaaaaaatatgtatatttttaaaaggtattttttatttggcccctaaaatgagtgggccctaggcgcgggcctagcctgtctatgcttagggccagcatgagatgggaaaagaatttgcaccacgtgatctcttttatcatttatccaaaaaataataataatttgaggagtaataattataacttcttagtcaatctctgtgtccgataacacattttagaat

SEQ ID NO: 184876 - DNA, 1370 bp, Cannabis indica
attaaattattattaaattttaactacgaaatacaaaattattattaaatattaccttgataaaaaattatggttttattttgtatcattttaaaaaataaattattcattttactatttagcaaaacaaaaaatccaattacaaaatacatgatttgaaatagtatttatagttattaagtattattaatactaatttaatcaaaagtgaacgtaattaacggctttaataagtgttttcttctgcttcttcacttaggctatgtacaacccaagattctactcattgactttctgaaacagagaaaaagaaaagaaacacacaagaacaagattccttaacgaggaacagaaaaaaccacagatacatacatacacatatatataatataaaatatatatatagagagagaaagagaagagagagagaaatgggttttatttgcttttgctttttagtaaggtcagcagcaaaaccccattgacattacatgttaaaaatgaaaactttaacaaatgtatgtggttttggtgtgatgtggggtattacccaattcttctcctttctctttttttcatgttatagccaaaagaaaagagagtgactaataaagtttggtttttttttaaagaaaattataaagtttgtatttttattttttggggtccttaagaatccaatgcctaagaattttcactcactcactcactcacatagtcaactactctctcttctctactttcactttgtgagaaaaatttagtatatagaagagtataagaaaagcaacatattagagaaaaactaaaagagaatttttttcattgtgagttaagatattcaacattcagacaaaatttaacacacaaaaaataagatttaaactgtataatttacatgcgtataaaataaaagaatctcatatgtaacaaattatttaaactttatttttgacgtgttaaatttttttaaatccttcaaaattttgcaagatgttaaaaattaaactaaatttttttctcaaataccaaaacagatagagatacatttgtatttgtattatagaagtatctcatattatatatacaagtttacacatttatacactcacttttccttttttctttgatataaaggattgagcccctcgtgtgtgagttgcactaggccaaaccaaaggggtctcaagaaaagtgtcaacgcctccctaaaaagaaaaggaaaaaagaaaaaggaaagagctttggtaactaaggaagcttcccaccttgcttccttctcttcattctcatttggcttgtcaatttatatgtgtagtttgagtgagtttatgaccctacttgtagtactcaatccattctcaaacacc

SEQ ID NO: 184877 - DNA, 4089 bp, Cannabis indica
tttttttttatttttattttaactcacatttacattacattatatataagattctctatattattttcaacactttaaatattatatctttaaacaattttattaattgaatattaaaaaattaataaaaattaactatttaaagaaaacaaaagcaatgtaaaaatatattataaaatattttctcataaatagtttttttttaaatctatctcataaatagtttgtagctacatttagctaaaatagagaaaagtgtagctcatttgattgaaaaggaaattaaagttttaagctatatatttttaacctctgggaatgctcaagcgtaagaaaatattgattcaaaacaaggaaataaataaacgaagaaggttttgaaatgacaaattgtgtaatagtaatttagggttctttctctctaactgtaactagagagagggcccaatcgaatgtggtaaattagcaaatataagcttttgtaatgataaaacccgtttttcactggctacttcctagtcaatttctaatcatttctacaatttaaaaaaagaaaatcaaaatgttgcaaaattttgggaggatattactaaatggggatagataaatacaagggaaaatcccatctcaaaattccatcctacacaacacagtacgcaccatgtatgtatgaaggagaaaaggcttagcaaagcaatgactatcgcttccactcataatctcctccatatttaggactagcattattcccgcggctcatttcttctggttttatggagtttgcaaatgcactccaccctaaaaggtgtggcaagataaactgcaagagaagagacgatataattaaagtcagaatcggtagatgaggactcgaaggtgttccaaccctgcactcgcactcaaatcaaaccattcgagatccatgaactggtgcgaggaatcgaaccacagccctcgcaacatcataagcaacaaaagagagagccgagtatgatagtgatagatgcaaatcttacattgaaagctgaattcagaaccgcaaactctgctctggtgaccgggatatagatattctcatccaaattaataagtttgttttggacacctgcaacgccaaaaataatattataagtaaactcaacttcatatccttgtaaagtttacaagattaccacatggtaaaattaataatttatttacatacaatacagatgagaaggaggatatataaaaataaatcacatacaatggagaactaaaagcacatttaaacataacgggcctagtcaaacaaagagacattggaaaagaaaaaaaacaataacctgaaaaaaatgaaccttaataaactctcatttatgacatgcatatattaaagctctgccagtatattaccaaggacaccttatttatcagcttatgattctctacacttaaaaaaaaagacttttaatattacatcagtgaaaaatgtactactgtatgagacaaacacgtattcgtgtataatgaacatcaaacataacaaagctaacattatccagaagaagaaaatacatagactgatacaaattaacaaaacgagattgaaatcatgagcaaacatcaaacataacagagcttacattgcccaaaagaagaaaataaataatgatatgaatcaacgaaagagaatgataaaaagaattactgagattgaagaagtgaccagatccatctggaagaggctccacctttaacatcttcctaacctgaccttcatcactaaaaacaaaagaatttctttatttacttcgtcttgttattaacaagaggtcaaataacccattcatacctataataagcaaaaatagcaaaaagggtagaaataatatgttaacttgtcacgcttcaacctcttcaatttttttctcgagacaaataaaattaaccttttttcaaccacacacaaaacaaagcaacagaaggattgtaccttctccctttaaaagggtcatgaaagaattcacaggagccagtagcaccaaggctaactagatttccaatttctgttactgatagggaaaatacctacaaataatcagtgtaagcatcagtttcatattcaaaagatgtgcacgcacaaattacaaaaataaaataataaatatatgtgtcaaatggtcaattcgggacaagcaaaataataaaagatgtgtaaaataatataatatatatgagaagcagttaggctaggaacaattcgggattatggtcaatgtggctagaaataactagacgtgtcaaatggttgaaacaagccttaaggaaagcaagaaaagaaagagcaatgcctgcctttcgggactaggttctgacagaatatatttattttgaaagctatttctgagagatgtgaatctgaatccctcattcccaacaacaaaatggaatggaaaagaaaggaacatgattcaatccaaaccggtatagaggaagaattaattgccccacacacacaccagccggtaacgagttcacacatactcatactcagtaacgagttttcagttacattaccgattcgctcctactcatcagaagcccaaacaccctgtctatcaccatatgatcttttcacaaaatctaatcataacatcaagggtcaaaatcaaaatgatagccttataccataacgattccattcacacattggagcctaaccttgaagcttttatatgagagtctgaatcaaatgtttgcagaaagctaaaaatgtcatcatgtggaaagaaaaagaaaaatgatccacctttaaatcaaaaacataggacatactaatatactgaggttggacatctgcacaaagtaaattcacttagaaacaacaaaacaagtgtacctgctttctgctccaatcatatacacgaacacctgctgcaggagcaaattgaagaagtacaaaaccttccttggatactttgaatgcccctgactggaagacccagtatcattgcagaagaatcaatgccataacaagagttatatatcaacaaggcacagtggaactcaaatcaaagttgcacgatcaaaaaggaattaataaaaaaaaaaaaaaaaaagacaacgaaacatacatctagagctgtgaattccggagctttgggctcaacagtaagagcagcctttcctttgtatatcgagtggcccacgtagaatctagccggcacttgatcagctgtacaaatcaaccatagaaaaaatgagaaactatacttggtcctgtttacacgtgtgtgtgtgtgtgtatacagatttgttctttcatccaccttggaaactctaggctctagccacaaaaatgaatttgggcaaggtgagtcgagtaaagtaagaagccgtcttgtttgtcggaatgaacgcattcaaattaaaaataagtaaaaggggccgttcagagtagtttaaattgttgctaccttatccaatattatctcggaaaccaaacaaaaaacatcactaactttttctctgggcagtcaaacaagaacgtacacaaatatatatatatatatattaaaactaaaagaaatacctctagaggaaggagtctgtggagcaaaggaggaggagttatcatagtgagcagtggtggtagccaacttttgctggtcgaagtattcactctgacggcatttcagagatagtctcttggtgaggtgagtagggttagaagaaaaggttaaggcagtggttccggaaaggggagggaagaagaatgaatgggcagcggaaagtttagggttttgcggggtgactgtgagtgaggacgaagaagataacgaatatggccgcatcatcatcatccaaaatttgactcctcgcccttctctctgtatctctctttctttccccggttttgctttatgctcccatttttattctttaaataattattaatcaatgatttgacacttaaaaatcaaggttcataataagatgttaaaaatttatatatcttataaaataatataaaatagaatgaaaaaaaaaaaaaaaagtgaaatcaaatattaagaaattaaggaaaatagaatgttgattacaatt

SEQ ID NO: 184878 - DNA, 7379 bp, Cannabis indica
ggaaagaaaataatcttcattctattattttatttagttgcatattaaagtattagaatgttattctagtagaataacctttctactattttaataaaataactattcattttaaaataaaaagaaaaactattctaatatataataagaaaaaatttaataatttttttatctaatttttttatacattctaaacctgaatattatttagaaaaaaaaaaaaaaaaaacgggacaagaaaagtgagtctctagtggctactagaagaagagaccgttttatttaatctttactctttcctttcttttacaaaatatccaaaaccctaccaaaaaatatcccaaacccaaatggctgcagctgcaccaccgccacctccggcgccggtaccgacgcctccgtcaaccgttccagaaggctccaccccattgggcttcccagtattcgcccgtatccgcctagcccaacccaccgacgtcccccatatccacaaactgatccatcagatggccgtgtttgagcgcctcactcacctcttctccgccactgaggcctctctctcctctactctcttcacctctccaccatttcagtcctttaccatcttcatcctcgaggtctcttcgcagccttatgttgaggacattcttcacaataacaatcctctgtatcaacccaaagtccaggtcgtcaacctggatcttccgatcgatgatccggaaagagtgaccttcagatcgaccggttcaagttccgatgtcgtcatcgctggattcgttctgttcttcccgaactactcgacgtttctggggaaaccagggttttacgtggaagatctgttcgttagggagtgttacaggaggaaaggattcggaaggatgttgctgagcgccgtggcgaagcaggcggtggaaatgggttacggaagagtggagtgggtggttctcgattggaatgtgaatgccattaagttctacgaggaaatgggagctaagattttgcaggaatggaggatttgcaggcttactggtgatgcccttcaagcttatggtaatggtcattagggttctactttgtaacttttatgcttgcttgtgtttttctctggtgaaatgggaaatcgctcttatggtctatgttattagagagctacaaattgaagattaatgccatggtttttagggcttcttcatgaattgtgttaatggttttgtaactttgtaccctttcagcttttgattctacattaactgagagatgaaccctttttaattcaaataaaaaactgttaatgaaacaaagttttctgaattgggtacctctgaggagtgtaatttacttgattttattattattactcaaaatatataagtatagatatatgaacaccaaccggttaaatctgtaactaaaacagattgagataagtgcactaatgtcaccaataaattatattcacattctaacgaacacaagaccatttctaaattcatggaaggaaagaggagtggcaaatcaacagtctaagtctagtacaacacatacaacaatagaatgactttgttcgaatttataatctctaaaagttcattaaatatttgtttaaaaccaagtcattattataatcgcattagtttcaaagcttctgagcatgctatgagtgccaaataacttaacaaattgtttctgaaaacaattctatttctttttcaaacggctaaaggaaaataccatgctaagaagagagaacttgttttatcaaaacaagtttgatccttacttaccatttcatcataaacctcggagaaccattaacataaaccctaaacatagtattgaagtaactcaaaaaacgtgataataacgtggtggaagggtgtttagaaagagattatagaaaaatatgggataacatgggaccagtttaggtgtaaaaagaaataggggttaacatgtggtttcattcacatatcatctttgatttcttttttgtttggagttttggggttgggtgaggggttccaatccaagcataaaagaacaaaacatactctgctcatggttggttagccacccatatggagcagtggagaaagaaatctactgaatcacggcaatagtttatttactaccagatttcctccaaacaattagagacaaaaactcaaattattctcgcaataaaagcaaatgcgcattcaaagattaggtatactagatatatttcacgtcgataccaacacaatagacctaggtcagcataagaacaagatattttattaacatagaaaatatgtacaaaaagatgctaagttccacattgatttcctaagaaggttacaatgcctcaccaaggttggatacagagacattactgaggagcttattcaccccagcagccactgaaaacttgagtgttgttaaacttgcagtgagcagcgcaattgaaacctaggctcttaaacttgaaacaccctaatttttcgggtagagatacaaaggtacccaacaagattaatctcaacaatgtaaaccttcccctcttatctcttgtaagcggttaccaggttttaatggcttaatctacttattaatcttgatgctggcaatcacccattctattcatccggcagagatataaccctctttcttaggattggcaacaaaaaaaaattgtcttctttggctcttgcaagttctttaataatttcgtcaacatgacgtccttcgccattgcttcttgcttttcttttgaggtaacttgaatggactccagctcttcctgcgtttcgatgtctcacaaaagaggccagaagccagtgcctcttgaagccatagctcaaatgcttcttcgttttcatccatcatttcagcatccaaatcccatgggtatctacttgagttcgatctttgagttttctccaatccaaccatgtttacatggaaacttggtcgatgtgtgttgggtctacatgccattccctgaatgggcacaaatcaaatttgtaagatatatacctaattagatgcaaggtaaaattgccaataaaaaaaaaaattgttccagtatttttgaaaatagtgattgtattaacatggaattttgcgtaggtctctaaaaagtaggcatatgaaacagagcactggctaaatgacacagaacatatagaccaagtatataatacacaactaatttaacccactgacctgacaaatggcccattctgaaacatcaaagattttgctctcagcacaaacaaaggcacgtggtatctcaacctaaaagagagagaaaaaaagttcagcatcatcaattgtatcatacaaaagagcaattatttacgatgtaacagcaaattccaacttcaccaaatgtaatcagtcaaaactcaaaagtaaacataaataaatcccaagacaaacatgtctctgatgatgagcttttaggaataaaggtttgtttcacaattgaggcaagcaagccttagtcaagcgagataatcagaaacataaaagatcatcatcaaataacaaatataacaagttcataaatgatgcaatgagaaaacacatggtccttttcccctctttcaaaaaataaaatcatgaagttagcagcttcagctgaataatttaacagagtgaaggatagggacttcatgcatagtgtgcaatcatatgaaaaaaatcaagaaaaaacttctggaatttaccttctgaggcctatcaaagaccagagagcctttgtattccacccatccatctccatccttcgcttggtggtattgacagcaatcctgatatcagaaaaccttcaataagtcacacattcatagagagtgcaaattgatatcatctacagtgagagagagagagagagagtagtgaatgataagactggtatctaacctggcaccatctagccttcgccttgctcctgttggtgcacacccatatatgagaatttccacatttagtacattgtatacgtcttgattcctcagagcaataatctggaccgtcctgcttacagtaaaagtatggtaaggcaattaaattgagctcaatccgcatttaataaatgttcaatttatctttagtttgaagtacatatgcatttggcataacttcacaaagtacataattttgtgcagatttaaaacagatattgcaacttttaccactatctatttgttattctattgcttctccatatacagaattaacaaattattaacaaaataaaaattacaaataggagaaaaagcaactttctatcaaacaaaataatagacaaaagaatcattcatcaattccttccttactactagaaaatcccccaatatagcccagagcattttttataccaaccttaataggtttacataatgaaaacacacaacaataagttccccaaagcttgtgaggtgtaacaagtagcaatatatgagacaatttacacccaaaatacacaacgacttggcatttttcaattttcattcaccaaatcaaagagaaaacacactaagttcataggaagttgcaaagcaagtcacactagtgagtctacaatgttgtgtgcctttagcatcagtcttacaagtataatctcacctgacttgaagtaccatgtgagttttggcagacactgcgagtcctggattcttcctttctcaactgctcatcatagtctcttttctttgtaaaatcagaaagaacctataatgcatattgtcagactgttgtaatctcaaactttattaaactgattcaaatattttctcttataggtactatttatttactaaaagcctggttacagacaaaagataatatcagagtaatttcatctcacgtgcattacactctaagctattaggcaagcaatcacaactcttatctgaatgagtcacctattatccttaacttaatttcaattacccacctaaagtatatcatagatcttttcggtagtaaagccaagaaaagtgaacagaaatctttacctcatatgcacactggagctttttaaatgattcgctagccagtggcattcccatatttttatccggatgcacaagcatggcctacaaataaaagagtgtcattgagaaaaattaatgggtatattaggaggcattcatagaagacgtagataacattcttaaacaacgagaaagtaattattctgagtttatatagtagctcgatggttcttgtacaacttcaatggtagtgaaactgagcctgctagcaagtgctcttactacttctctcaataaattaaaaataaaaagagaataaaaagaaataagggaaagacaaagggaaagtgaaaggggatgaaacaggtaccttcttccggtattcttttttaagcactaatgcatcaattcttttgtgtcgtggaaatcccagtgcttcatagtggtccatactacttaaaattcttttcatctcatcaactgaacatgtttgctccttcactatattgataacaggagtttctttcagtttatcaataacagatgaagccgctggtttactggttgatttacaggaatgcagcttctcagattcttcttctgttggggcagagtattcactctccccaaggaaatcatcttcaagaatggtttctgaatgtttctgctcttcggactgtgtagtttctctcaaattatcacaccattggagcatcaaattcaatgcatcatttgataaaattgaaagatttattgagaggaaaacaccaagccatcccacacgaactttgacacaatatagagcatacatagttgccattaagaccaccaaccgggcatgatttagggagaataaataacctacatgatatgacaaagaatattaatgttaacatctaagcaaagacattgatttcagaaagaagatatagttggctcctgtaaattccacatgacagaaggttatcttgattttgtttagatacatgacaaagctccaccatcacagttcattttaaaaaggcttttcagctctttcttctattctcactaaaacataacttgttgacagttaaaagttcaactattccgcaatgtctgagttccaagtccctcctggatacccacatatcaatttttgtagttttctggtcccgatcctattttttattaacagtattcaactattcggaacaagtaactatggtgttctactcagttgtcttaagattttagtgtttcagtatacaacttataatttatgcagcaagaacggatccagggaaatagatgacaatgtcaatgataaaagaatcattagtgttgagttaagtttacagaaaataataatagtacttaaactataaatagtgtccctgttatccaaaagtttacagaaaaatttagccatacctccaactataaatagtgtccctgttatccaaaagttagcatacatccacaaaattagaatagcgaatagtcctacaataaaaagtcctggagtgtagcccaaatattgcacagcagctccagcagctccctgaaatgttgttcatactgtaagccacagttctattgtttcatattataaatatccaatttctatcaacgatgaagattagttcttaaaccatcttggaataaagttttgataaaatagacatgcatcagatgttcattggagccaactaaattgtttcttctgatctatgatgtttttcatgaatcagaaccatgaactacgctcttcttcttgatcagcaaaaaaaaaaacatccctatgtagacatctccctctctctcattttttctacattttcttctaaagatcgtaaatttaattttgttcttcatcttaataatcaataaagacgactaaattaacttcccccaaaatggatggaagaattttcaataagagatataaatattaaaaatcctaaaaaaggcaaagcaaataaataaataaataaaaatacatgcacgcccctgagaatgtggatcttcatgctaaccaagatatacatcctgttagtaattggtatctgttgggacataagtctattttagaggaccacatccatagatggatttgtaccaactttcttcacaaccacctatggagcaataaagggtcataatttctaatcttatgtctcactataccttaatgactcagatcaaccaagtacaaactaaacacaagttgcctttgggaaactgtatcaagaatatttctagataaattaagaaaaatgcaatatataagcatatctaacctcaaccagaaaatcaatcttttatagtagatcaggcaacaacaaaaaatcaccaattagattatattatacaaattaaggttgaaaccaaaaatggaaaaagaaaaaaaaa

SEQ ID NO: 184879 - DNA, 2116 bp, Cannabis indica
ccaatgccatgtggagcaacaatcagcttcatcatctcctctcacacctggtctgtcttccttattattggttaattttccatttacaagtttatcgctagtactacaaaatgtttgactgccgacatccctccaaattaaaatccttccacatttatcaccagcagcaacaattctctctgttggatggaatgccataactgtcacactctttgtatgatgcaagctaatctttttagctacagcacggtcagaatctgacctggggactttccatatatgaatcgtgcgcttgttatgcatcccaaaataacttcctgagggactaactgtaagaaactctggctggggagtctgtccaatcataacaacaaatcttcaatcattctaaacaaagtaaatagagattaaatgaaaattactgaagttcaagactgaataatttgacgtaaccctttcaaatgggttaccagatccactttacacaattaaacaaaaaagcgttaggtgaatagtcaccttaaagtcctccattgttttttattatgacaaatggtctgaatcatgtgatctatgtagtacaagtacaggacccgcaactaatcttgttgcttaacactctacttatctttttgaaagaacaagctcataaatctaactaaaccaaaattttgactacagggcatcatatcgaaacccgccatttgttcctttaagaagttcattccaatgtcaaatctacatataaatagagcagaaaagagttaaaaagccatacctctctcaaaacaactccacccaccatacgagatttggtcaagttaaacttcttaatctgtccacacaaagtattgaccttcttttcttgcacattactattctcaacagatatatatgcaaaaagaggagactcattttccttgtctttatctgattgaactaataaagatggaataacctgaaaaatcacattcaaaaaaccttaccaatcaattttcctcacttctcatttccacaaaaccaactcaaaccagcttaccattgagtaaataggcattttaacttcaacagtcttcatcaactccggtgccaaaaaatcccaataacgaatagtacaatcaagtgaagcagtccaacaaaaacacaaaactttgctggccgggctcgaagccggtaccactaaaacagaagtcaccgccgccgtgtgtccctccaacgaagaaatctaaatataaaaaactccatcatcaaattcatgaaaaccaatgaataaaactctgaagattaaaaaacaaacctgcaagccagtagaggtgctgaagatggagacggtaggtccagtacagattaagatacgcttagcgtcattggagaaggccggtggtgccgaaacgaagctcttaccgcctctgatcatggcggaggagagattagcttagctttgggtttgagtttgagtttggtgtttttggcgaagccctaaaccctgccattgttattattattatttattaaaaaataaaataataataataaaccctcgaaaaacccttgatgggccaaatatgggccgcgctttcagcccaccaaaataaaaggcctaaaatatgaaaaaggtttccgacctgccggattcgaaccagcgacctaaggatatctattaggtttccctactacagtcctccgctctgccaactgagctaaggtcggttcttgttagtcgtctgatgtttaaattaataaataaaactaaattagataaattatcttatgatgttatttccatttaatcataaattaacatctataatacaatgctatcaaaaaaataaatatatatatctacaatacaatgccaaatctctcattttattttaaaattataaattagtaatttgttgtgactttttagcattatatatgctaatttcgatatttggtatgattagttttgatttgaaaatgaaagattatatgtgaagtgaagaacactaaatttgagtctaaaaacatcattggtaatagtagattattattgatggaatattttatatgtagaagaaccaaaagttaccttgcttgcaattgcatgtcctttatttttttaaaaaaatat

SEQ ID NO: 184880 - DNA, 3386 bp, Cannabis indica
ctattaatgttaataaagaaagaaacatggagatcgaaagtcattaataaatacaaatacactgttaataaagttaggcatgtccctataaattgacaaaacaaaatgatttactttaacccaccaagccaattagttttgtctttctttttcataaaaataaatataaaaattagcattgccttagttcaaccatgtgttcccacctagtagaaatatacgcacgtaatgatggaggaatctcaggagtatttccttaatttcacaccttaggatttgacacaatcacaccctccattaattaaattattcgcctaaactagaaaaccccatttataaaatagccacgttctcatgtagtgccacaatcctcataacgaatccaatctaaaacacataaaaaggtaaagtgagggagagagagagagagaacaagcaaaataagaatgggaaacagtattggaggaggaagaaagaaagtaaaggtgatgaaaatcaatggagaaacatacaaactgaaactgccagtaacagttatggacgtggtaaaggatcacccaggtcatgttatcttagattcagaagctgtaaaacattttggggttagagctaagccattggaggcccaacaagagctgaaaccaaagaagctctattttctagtggagcttccgaaggtttcctctgatcatcagcaggatcattacaaatcggtgagaagggtacagtccgggatcaacatgagcgccaaggaccgactcgagtgcctgatgctgtctcgtagggctgtttccgacatttccatggcaagggcctcctccagccatgtcccttccggtgggccagctgttcccaattctggcccaatgagagtcaagatgaggctcccaagagcccaagttgctaaattggtggaagagagcagagatgaggccgaagtggctgagaaaattattggcctctatatggaaaataacggtggccgcgccactgttcatgcggcggccgagataaaaagtgggccgttgcttcaccgtgacgagcgccggaagcccggtctcggtagcatttctgagaattacaaggcccgtgaggtacgtctttttttttatttaattaaataataataataatactatattttttttttattattattattatttcaaaccatttcccagttttcatgtgatgtgttggttcgtaaatcactttaagaataagttagtttgaattaattggtgttatgcatgaacaacttaaaaataatattttatgattagtatttttgaagtatcattagaatgttatatctaaactaaattatacatatttaaacttcaattcacatggttgacagagtttttgatttgtagtaaacacgtttgaatatttataactatatcttgagaaatagagattttgttttaatactctttttttttattgatttaattacactaatatttatccaactactaaaattctatcttcaccatattgttttaatactcaaatagtttatatgtttctttctcgaaaataaaataagttatatgtcaaaattgacaaacactagagtgagattttattggctaacatttttgtttgataactaaatattaatatatcattaacaatataaatatatgtatacatattatatatggtttttagtcttttagaggttgagattttgaaatgaaacctaataatagggtaggagatcagaaaaagtataggtttgacaaaagagacctgtggtaagtgatacgttatatgcaatgaccccaatgatcacaaatattagtctttttcaccactctaatttagttaccaacctatgaaaaaacattgtgttgactaatgatgtatattagttaccggaaattaatatgattttctattttgtatacgagatgggttagttaaagagtcaaagctagctagtagcaatggtttgttgtgtgatgcaactttatatgatttattattgttagaattacatactcatgcatcaatatattcatataaacctataacctatattaatatagtgccactcactcggagaacaaaaaaagttcaaatgtgacaatcaaaccattaacaatgccaactgccttttctcgtagccaaagaaatagcaaaagaataagtgatgacatagaccattatatacatatatattatatatataatataataccgaagaaaaggagagagagagagaaaagagtgtgaccattttcctaacattattaataaggcgttgtaggcctgctgggagcgttttcatatacattttagagaagtgtttggtcaccaataattgttatagatcaccaatagttggataagtggactaattgctctgctttaatgggtccgaaaggtaaccattaccatgtctctaggcctgcaatttgttttttttttatttatttattttgctactaaaagaattggaatatatatatatatatttatgttaattaattcataatttgttacttgataacgaactgagaaattaagcgtataaatatatattcttttgaggaaaaagaagataaagtagacgataacaaatgttgttatgtacttctacaaaaaaaaatgttgttatgtagaaatgttagttgaatggatttacctactggatttggtcaattgggtcaatttatagaggctattgactctcaattataatatttagaggctattatcaaaatttggtcatggattcccggaaaaatcgcctgtatttttgtattgttaagtacaagtaagtgacttggcctaaaaaggaaaaattaaaaaaaattaagtgctagcatgtttgacaaagccaaagtcaatgtcttcagcccctaacggttcgacctctgtttttttccttctaatccttattatttctgtttttggcataataataatgataataataatatacaattgaaaataaaagttggttttgtgctagtaattgcataatttttattattattcttattggtattattattttttgtgatggtaaagttattgcttaagatgatgatgtggcagaattattcaaatgttggtacgtatttaataaggtgtgcagataacattgatgtatgggtatatttgctttggtcaaatagtctccatttttttatatgaagctggttcaatatgttgaagtgttgaattatgaggacatttcttcagtaattagcaaaactcaactatctataattaattggtaaattaaaagaaacatcacctatgcatgccacgtcatatagttgacactgcatgtttatctactaaatgaccactaggagacaacttattatattaaaaacataaaatgatgtatatgtagggaatatcat

SEQ ID NO: 184881 - DNA, 3482 bp, Cannabis indica
aattgtgcagacagattgagagaaaaaaaaaaatggaggtcatatcagaagaacccatagctgcagtctcatcaatactcgtatatccaataaaatcttgtcgtggaatatcagctcctcagtgttttcttactcctactggtatgcctttcatcttcacactagtttcattcatatttccttgaccggtttttgcttaaaaattataactatttctttaggacccagaagggaagaagataagtacttttcttaagttgtttatctctgttctcttagatgttttctatgatcaaggggctgtattatggtgctgctagtttttactctttttttttaaataaataaatagtagctagaacatattctaggtcattatttatgtggttttggtctttattcatttcgcagtgtatgtaagaaaattcaaattatcatcaagtaattttttttttcattgattccttcatttttggtaataatatattggtacgttccaggttataggattatagtgacaatttggatagacagtgtgtaatttatgtgtgtgcacatattaataaaatattccacttctctttgatttgtattttgtaggatttcgatgggataggcaatggttaattgtgaacagcaaagggagggcatatacccagagagttgaaccaacacttgctctcgttgagactgagttaccaaatgaagcatttttggagggttgggaacccaataaaaattcctgtctaggtaatattttcaaaattatgctgttgaaattattttttattgtaagacaatttactttggaggccatttttttttggctagtatgtcgtcttcattgattatccatagatgtttatctgtttttgcaatgaactacattatagcttaatctggctttactttttattttgtagttgttttgcttgtgcaaagggtatctagaatctgggtttttaataatagactttagcatctatttttcgtcagaaagtattattcattttccactgcttaaggaatgcatccccatccacgagtcacccacgatctaaaactattgctatgttactcatttttccttccacactgttgtcgtattgattagcttgtggagggatgactggcctgaaaaactgattttctagttttttttctcactagtcactacccacgcttagcattgatggttaagcggagttagtgttttaaagctataaagttacccttcatcctccattctcagtgataaaagcacctggcatggatgagctgaagatttccctgaccccaccacaagaagtagctgatggtgtctctgtctgggaatggtttggggctgcattggatgagggagctgaggcatcaaaatggttttcgaattatctcggaaaacccagtcgacttgttcgttttaataccggtaagtatgctatacaaaattaatcatatgtggcatgtattgtcagactagtgtggacttttaagtggaagaatttcagttgaagatgaaaataatctacatggttgcaacactgtatcgcaacagctacttatgtatactaggtgttgcctgtttcaagctatataaagttacacatttgttttgttgcattattttcattcagcttcagaaacaaggcctgtggatccagaatatgcagctgggcacaaagtcatgttttctgaccagtttccatttatgatactgtctcaggttaggtaaattagagaatgatatctaacatgttttcagctcataagctttgaactgcatttgtgaacaaatgtttcgcaggggtcaatggatgcactgaatgcgcttctcaaagaacccataccagttaaccgctttagaccgaagtactgattctttatattaatatatatatatatatgtatattattcattttatgacattattttttatgtcttgtgttgtttctatttttctcatagatggacaaccaatattagattggatattaatagaaaataaggatgagaaattgtccaaacctgtagaaaggcaagaccagagaattgcatctaaatctaaataataaagcaaaactagatcattttagcctactctagtgagtgtagtctagtttctccttatttatatcccacacacgcatagcttaatttgatttaaaacatttgcagcattgttgtggatggatgtgaaccattttctgaggatttatggatggaattcagaattgacaattttacttttgaaggtgtcaagctatgctctcgctgcaaggttaagaaatgtacttgttgtctttattagataaggattggtaacttgtgtcataaccgcacttttataaaagaatattctagcacttcacattgtaaatgaagcttttatacagtatcttcatgtcagagaattcaggattttacttctagactgcatcaataccacatcattgacatgacaatagatatttttccccctatttgtgtagaggttactttgcaatatgcatcagcaccttaaggtctaaaattgagatgttttaaattttctgataccaactactaaatttttgggtttcctattgcaaatgatactgaattactaatatgagcatgcaccttaatctatgtatttaattaaacatttagagaaaagagaggctaaacagcaaaaagttcattatgaaatttgagttctcagcatgattttgactatatcagttgcaatgttttacaggttccttccatcaaccaggaaactggcattgcaggaccagagccaaatgaaacccttatgaaaatgcggtctgataaagttttgcgccctgataaaaaacagcaaggaaaagtaagatgaaaattccgtagaagaagcatttttaacaatattcattcagataattagttgcatgtaatttgtggctggattacagatttactttgggcagaacatggtttggaaaggcaatgttgccgaggggaaggcaaaggtaatgaaaattggcgatcctgtttacgccatcaagaagttctctaccgtggctgaagctgcagcttgagttttgtagaagtagaatatcatgattctgttggggtttatgtgctgtttaacgaataataaaaagcctagaatcaagctacttgtttagtaaaaggacatggaggagtttactttaaataaagagagaaatagaaataaaatccattctctgatgtaaccaagaattatcactatcttatgcaatcctattttacgtttcagtgtttcctttataacagaatctgtttaaaattaactaaaccaaagatgaaaaatctatacagtagctatctcaataaccccccagtctgatggtgagaactaagtccaactgccactagaataggtgggtaggaaatttgaaatggatcatctaaatcaattcaatctaaactttaaaacctataaaaaataccactctcaatttattattgtaaatat

SEQ ID NO: 184882 - DNA, 6040 bp, Cannabis indica
gtcccaactgatcttcgtactattttgttagcagatttgtcattttaattaataatacaacaaactttcagtaaaaaaaaaccaactttctgatcaaactgtcataaacctcaccaatgaatgtctccactccagccgtaaattatcacaccctcctttaatattatctctacttgggtccatcactaggtgtatacaactcatacaaattcctctaactacataaataaataaaaaatattaaaattcccatacaattacttttaaaactgtcccccatacaaaataaatataaatacagaaactatacttgcctattgaatgaagagtgataatgtgatatcatagtaatagatttcagcaaaatatgaaatatctattacattttaagatttttgggtatatggcatcaaagtcaactcaaatggccctctgaattctgacaacccatttcaatgtttcaaagggaccaatagaatgtagagtacaaacgggttgagcatctaaaataggtagggtaaggaagaagaagaagaagaagagagagaaagagagtagcgcaaaatgagtaaagaagagattatgggatgagtttatacgacaaacagcaatgaagggagtcaaaagaagagcgaagtcaaagtttacacagaagttgtgggatctggttaatcaaagtggataattaattggctctttaaagagctaactacaatccattgctctaaacaggcatgtttaattacttggcagttggcacagatttcagaagtacaagaaaaaggcaacacagaatttaatctgaaatgctcaacagtaaaatgaattcaataatacacatttttccttattaagcctttgagaataataatggaaaccaagttacaagtacctcttcagtcaccacaccaaagactatcttctgtataaatattttgacaaggggaacttaacgctccttgctacctgtgcaagcccaaacaaaaatcacgtctaaacaagatgtacaaaaaagaatgcttcaactataagagaaatgtaaacgatcaatatgagaaggtaaataatgttttaccttcaagaccatatcttcagagactgtagatcgatatcgagttgagccctctaatggacaacttccccctttgacaataaagtttgcattgcatagactggatagttgcaaaaggacatcagacatgaggctatcatctccagtttgaactcctatgccatcattttctggttcttcctcttcaaatgaaccttctgctacagatgtaatacattgaaatattgctaatagtctctctaatggaaacgttccaggtcctttcatcattaactcctgttctgcactttccttcagatccaatgatttttctgatggtctaagtacacatagtaaattattatatattagtgactacaaatgatccatagtgacccatttatagcatcaagtaatataagttgttcctgattattatctatcacattttaaatcattgcaaaaaataaaaaagttcattgagtgaagtattacagatagatttctcaaatatctttgaaaacagagcgcacactatattataagaaacaaaagtaatgtattagtcccattacattattaatattatgttgagaagaaagaaaaaaaaataccaatgcaactgtaggttcctttagacagtgtaaggcacaggtttaaagaacttctcagtgaggttattcgaagcaaaaaagtatgtatatgcgcatataattacattatagacatacatacataaatatatatatatgcataacttgttttggcagtgcataaaaagtatgtatatccacacacatataattatattatttattatagacatacataaatatatacataacttgtatggccctgcatacgacagaaaagtactaaagtattttaatgttgtcacgaaaagttttgcatactaccacctgcatttatgaagtgaagagcatcatataaaatgtgaagaggaaaagaacacaggcagaaacaaccgttgcaaataatgacaagactgatggaaatccatattctacttccgtggaaagtttatgctaaggaactacagtacgaacgtataatgttgataaatcaaaattcagattataaaatgcactcacttccgctttcgtttccgattatctgagcccccagtagaatcaaacagagaggcatcaagagtagctgggtttcttgaagcaaggaatgctgaaataagaagatacttggcagatgtggacatatgcaaatctaactgatcactaacttcaagacttgatttcttactgctacttttgtgcttggtagctccaccttcagtaaaagctcgagaagaaaccttgaatatctcattcatagctggcaatatgtggttgaagagtactaaacagccttcttttcatttcttcattgggaacaacacctaaatcattcaaaggctcgcagtattttcgaaataattgagaaaaggatgtagacaattcatctacacgtctggtaattcgaaagaaagacttcagtacaacactgcaaaaaaaagaacgtacacatcaataattggaaaaagtataagatcagcagaaaagggaagaaataaaaatatatatgattttcttactctagaaaagaggaataaagcttcttgttttcttgttttagcaataagatttggcgaaggtcatcttctgtataatcaggaaaatatacagtggcaggttccaagtatcccatactagtgtaatatgtatccggtgaagtattgctaatgaagatcaaaccaacttcaggcattttcagaatatcatggagattgaacaaaaagggtaggatagtagaactcttatcccactctctaacaagctctagattgtcaaatatcaagtaaatcatatttccacaagctcgtctacacaattttttggagcttgatttgtccgagtttccctggagactactagtaacactaatcaaagcttcacgaagaagattaacgaaatcagatggcttctcacagcgctttgcgctggagtaaccatttgctgcattctttctatgaaacaagagttgattcagaacagattcaaacaagattcttggactataacaggtaaggcaacttgaataaacaaaagggcgattaagatgtcgaaatatctggttggttatacttgttttaccggtagaactatctccataaacaaaaagaggaaccatggggcaattcacaggacccaaaatgcgcataacctctataatctgaacacgtctaccagggaaactagacaccacattatcgaggctaatgggtttttctttttcaccaaggaaaaggtcattgagagtgggagggagcggtagatcacttgctttagtttcagtctcattttttgaaacattagctgaagaatgcctggtcgcccttcttgtaatctgcggggtttcctcttttcccattacttcaaaatagaatcataaattaaaacagatactacaatgaaaatgaaatggaaacgatacccagaggaaaattaatgactaattcaacaacaacaacaaaaaaaaaaacaaaaaaaaaatccaaaaagacgcataacagcacaaaaacgatcacaaagataaaaataacaaacccacacaatacacagtagcagaaaagccacgatgttgaaggagaaaactgttgaaattaccttctgaatggctagactaggagagactcagcaggcggtgttcctggcgaggttttggtagttgaagcttggatcgtcaagagtagcagcggcgtcgaagttgagattgagagggaaatgccgaatggttaacggccgcattggcgcctaaatggttgtgaataatgtttcagaatgctgggctgggcccaaatatacaaacctggaataactgggccgctttttactgatgctattgggccgctaaggacaatagtagaaagattgcgtgatacgtggccgcatttcattggttctagcattctgtgaccttgaaaatccagtttattctggtggtggtggcgggtaacgaaaacaaaattatctcttctttttttaaaaaaggaataacaaattagagagaaagagaagttgaatgggggatctttatgctttggattttgatggagttctttgtgatagctgtggagagactgctgtttctgctgtcaaggttctgcatttacttctttactccctctcttctccatttgattgtttcccttgagttgacagagtcaaatggttaagtcaaatagtttgtttttaatatctaaattagtggaaaagaattcaatcagacacctgcttaatcaatttttttctttacttttttgttgggtttgataaagtcgagtatttttatcgataggctgctaaagtaaggtggccgggtctctttgataatgtggattctacattggagaattggattgttgatcagatggttacagtaagctgttttcacaatactgagcagtttttcagaacctagtgcctcagacttgatttgggacgtgaatctttatcaccatttaacagtaggattttcatttttatttttatttgattataatcttgatttggtaggtgcgacctgtggtggaaacgggatatgaaactcttttacttgtgaggttattgctggaaacgagaataccttctattagaaaatcttcggtaaatatatatttatactcatgcagttttctgggtgctgttaaaatcatggcattagtcattagatttctgtatatttggaaaatggtaatcaagaaattttcagtcaacctcaaataaaaataaaataaaataattagtagtgtgggcttggtaattatggtttaatgtgcaaggtttcagaagggctcacagttgaggggatattggacaattggttgaagttgaagcctgtcatcatggaagaatgggatgagaatagggagattctgatagacctttttgggaaggtgagggacgaatggttggagaacgacttccatacttggattggcgcaaataggtatcccatttacattttttgaatttccaccatctaatttccttctaaataaacacgttgacagcctcaagcaaaagagaatggtattatactaatagtgttagaactgagctccttgctctgtgtaaaatagacttttatattgcatacctactcaaactattgagaaccagaagagtttcattttagattgttctgctaacaaccatccctgcgtaaaagtgattcacagtagacagtttctttatctgctggtcaccgctcattattttaatctcttgatatgggtcatattgctaagtgttcttaaattttcttgatatgggtggattcatattgctttaaatttgctaaattttcaaaagggttgaatgtgctactgattgcatgatgtgtcaattacaggttctatccaggtgttcctgatgccctaaaatttgctagctcaagaatttttattgtcacaacaaaacaggtgtggcccctgtattttttactcatccattaattcagtttttcttacatagtgtagaacacagaaaatttgatgaaggtaactaaagcagtcttaagagctcaacttagcaattcaaaaggtttaagaataaaaatgcatctttttctaacattttgagcctgttactttctaagcacttgactcctcctattgttttgcctgttcaagggccgctttgctgatgctttattgcgtgaactagctggagtgacactacccccagaaaggatatttggcctgggtaccgggtcagttttaatccaatgctagaacctcattagttatcttttcatgcatgctttcttggacttgttcctatggctatcatggcaccataagagatttctttctgactttggatgcggttttcagtcctaaggtagaagtgttgaagcaacttcaaaagaaaccagaacaccaggggatgaaactacagtaagaatcctttt

SEQ ID NO: 184883 - DNA, 3738 bp, Cannabis indica
acggttaactccttgttcgattcttgaagatcattctggatactgttaagagtatcatccttcttaagcatctatccacaaacaaaatgcagcaagggaggcacttcgtttagcaaaatatattaaatagtaatgaaatatttcttctcatggttttatgttttccagtctatggtctaagaaattacctgaagttcaagatctttcaacttgtgggcgacaaaggcagcgttgtccattgcattttggacttcgcattgaagtatatcggtacctcttacagctgttgcaagctcagcttgtaactgttcaacctcctgttctttagaatataatttttctctcaataaacttgtcaacaaagtttctgctttgagttcatactttatatggtcctgtgtaagttatagaaacaccagttacaaaccacaatatagaagttgcataattcaaaagcatgttttgtagcagcctacctctggagtttgccaatttgaatgcaccaaaccgtttgcatccatgttctttggctgaaatatagaagctgttagtttggacttgtcatccaacaaactggaaattgtcagcaaactcctcgataagctttcaatctcgcgtctcattccttgaactttcatttcagattccatgacaaagtgcccatctaaaccatgcttgatagcttcatttccatgctttgtatctgaacattggacaattctgcctttgacaaattcaagtaattttgagcataactgtgaattttcggttaacattgacagtccttgattttgtaaacagcaaatgcgagtccacatttccttatcgagctgaatagttaaagtaacaccttctcttccattgctttttaacctggttaataaattcatattctcacgtcgaagagaatcaacttcaagccttaaagtttccaactcccttctcaaggccacctccactcctgtcaatctcatttgctccatttgcaaccttgccacatgcttatcgaaattccctaactgttggctcttctccagttcctcatcaaaggcttctcgcaaaccaacaattgtcttctcttgttcactgcaggttcttaataatcttgtgatagacttgtgtagttctctgcattctttctctttgttttcaaaattcttttgtacacaaacccgattttcttctgcagctttatagttctcttgaaactcggtaagattcttctgaagatcttgattctcctctttcatgttgtccaccctttcggtcaggtccttgtattgttgctcaaaataggtgatcttgcttctgctctctgcatctttatcactaaaacttgagacttccctttgaagtgatacattttgctctgcaagctctctaactcgctcacgaagcttttgttcctctgactgatatttctcaagcctacttgaccactcattggacctcctgtctatctccctctccagtgctgattgtaactcatatttttccttctctagtcttcgggtttggcatttcaggtcttctttcgcatgtctaagttcttccttgaacgaagctcgttcagcaatttgtgaatgcagaaggcttgaaacatcatgtgccaagcttactctttcctcagcaagttccccaattttctgaatcaaagactgcacatcaaatccacttccatgtagaaagctttgttgctcgagttcttcagataaaaccatgaccttctcctcagcttccttagatcttctctttaagtgcacatccatttcctccaaaacctcacaatgatctccaaccactttattttggaagtatggataatcattatcatcctccccatggtattttttaacagtttcacaaggttcatccagtgaataatttcttggaggaactatgtcagaattagcatcaaagcctctattcatggatccaccataaatgtcttcgagtgtaactggcatgtcgtagctaatctccttttgactagtttcctgaacacgaggctgtgaaagcctctcaacaacattcttagcaagtctgcggggtgattcgtgaccaaatccatattcagccaagtctgtagaggagaaacgaagatgagagcttttggattctctaaatgaatgacctcttcgtttatctttgacactttctgctggagaagaaggtgaggcatactgcacgcgtggagggcgccaattgcctcctttgccactacttccacccaaatttccctgagcattgtgttcaggtttgttctgtccttggtgttgctccccatcaatgtagcgatccacaactttactcgagacattactggaggaagtggaagagcttccagaggaatcatggtgcttcttaggagaacaagcagaaccatgtctccctactccatgtgtattctgcaaagctggcatttcaaaacgcttggttgttcgcctctcgggtgtaagagaactttaacatacatgccaaatccagttacagaattagtgtccagaaattaaaggttgtgaaatgttaatgcaatagaattttagttgcagttttgtaaaatgaaaatcagacaatgtacaggatcctcaccgaagggaacgatcactatgctgatgagggacaccaccactccttacactaggagtgggagatctactatgatttcttgaggaagagaaatcacattgtgctggctcaacaccaacaaaggctgctgatgacatagaacgactcctcctaagaactggggtattattactcgaattctgaacatcagatacttgttttcgagacttggaaaacaagcctttgggacttggaaaactactctcagccatgtgactggcttgacttgatgacagattctcagggtaactttcttctttattattcgagtttccagtgccagtggcagaggatctgaaaaagaatagcttcttcatctgcaaatcttaagctaagattgctaacaaggggtcatgaaactctgtcaacttcaattctaatctctactcttttttcttttctttttttgttaatatataagcctgtaaaaaaggagaagaaattagaaaaaatgaaagaccagtacaacagacacacacacacacataatcaccatcattggaaatggtggttgccatatggaaattaaattgcagatgagtgttatcattactacatcaattcagtaccataaacctcgtataaagctcaacttggacagacaattccacataaagttgatacataaagctaagttttaaataattaaaaaaagaatgaaataatatccaatcacagttatataaatacaactaatttgatcataacatagaatttcttgaaaaagacaccttcataaaaccagtaatttgatcaagaaaaataacaaaaaaagcacaaagtaattgattttgatctgatcccaacaaaataatctaaaaaaaaaaaaaaaactacaaatacttgcacagtaactaaaaagaaacaaacattaacttcaaaacttaacaagaaatagatttttactagaaaacccaagaaatgaaatgcttccattcaattaaatagaaattaaaaacctaagttcagacatgaacgagttcaaaaagaatcatttagtgaaaaatacagccaaaattaaaaaggaagaagattactaccaagtcattggatggttactcactctccgattatggtgttgtgatccttcttctgaacaatgagactcag

SEQ ID NO: 184884 - DNA, 5244 bp, Cannabis indica
caaataagaagaaataattaatactttaaattcttaaagttaattatgttttgtatttgaatatttaaatacttttttgttaaaactaaaatataatacaataaatttgttaataatatataattaaaattccgatatgatatcttattatttagatttacattaatttaaatatgaaaaaaataaattgtcttaatatttttgtattcaaattcaaatatgatattttattattaagatgtgcattgagagaagtcaaacatatgaatattctattgttgagacaaataatatattgctatttgtagaaggtgatgaccttcacaaaagaaaaggcaagagccaaaactagaaaaataaaaaatgaacaagagaaaagaatgaagagcattattcaaccaaagtagcttgagctttatttatacacacagagtaattacaagtccaaagcataacaaaaaatgaaaatagaaaataaaccactaactgctataactactaactgtcacagttaagtaacagaatcaagaatgtgtttaacatccctcctcaaactaaaaggtgtttcagacatcttgagtttggacctaagatacatagactcctctgtggatagagacttggtaaggacatctacaatttggtctactgctggtacatatcaaactgataattttttggacataatgcattccctaacaaagtgtaggtctatctcgatgtgtttggatcgagcatgaaacataagatttgctacaatggtagcaacactttattgtctacccaaagtataagacaagaagaggttgaaatttaaagttctgaaagtagagacattaaccacttgattttgtaacaacattaacaagtgatctgaacttactttcagtactggacatagccaccacattctgtttctttgcagaccaagataccaagttcccaccaaagaacatggcatagcctacattgctctttatgtcatctatacaagattcccaatcagcatcagagtagccttatagagatagagacttagctggtgagatatgcagaccatgtgatattgtgcctttggtttgtctcgtcaattttttgcaagcctcccagtgagaagtatggatgatttgactgagcttattgattatgaatgctacatcatgcctggtcaaagttaagtattagagagatcccaaagtacttatgtatagtgttacatttgaaatggttcaccttacttgagtgacaatttgatgctagcactggaggggttaggagttggtttagttccttccatgttaagtttgaaaagtaagtctgtgatgtactttgtttgagataattacatcccagaggaatttttaaatatttccacacctagaaagtaatgtactgaaccaaggtctttaacatagaaagtttgatttaaatcttgaatgagtttgctgatgagtgttgtattagggcatataataagaaaatcatcaaaatacaccagcaataggatcagattttgtcttgtgccataaataaacaaagaattgtcaaacttggaggcaatgaatcccttctgtaacaaagtgccttttaatttttgattccaagttcttggagttttcttgaggccataaagagctttgtgtaactgccagacatgattaggccttgattcatccacaaatccttgaggttgtgccataaaaatagtctcttttaatgtcccattgaggaaagcattggttacatctaattgctttaccatctagttggaagagacaccaatagtgagtatgattcttactgttgctggtttaacaattggtgataaagtctccttatggtcaataccaggtgtctgtagataccccttagccccaagtctagatttcaatatttctaatgtcccatcaacattaagcttgactttgtgaatccatttctttcctataacaaccatgcctggtaagtatggcactaatgtccaagtacctgccttttcaaggacagtaaactcatgctgcatggatttaagccattgaggatgtttgagagcagttgcaatggatttaagttcaggggaaatgagagctgttgacaatggatactttgtggtcaaatatgattttggcttcacagtgccattaagagacctagttctcatggcatgagtcctgttgattatgtttgtgcttgtaatgattgggtcatgagtaagtgtaggagtggttgggatgtggtagtaggtggctgttcaatctgagtttgtgttgagggtgacacatttgggacatgttgaggtgtgagatcatgaggtgtgatggtttggtttgggagagtgaatgagggtatgttggggttggaactgtagagattggttaaggtaaatatgtttgttgctgttcatggagagggggaggtggagttatgataggggcaaaaatgggatcaggtctagggtgttgggaaatagggggttcaggtgtatggttgtggatttgtggtttgggttggggttgggtagatgtattcctgttggaaacatcagtagcctcaggttgtaggaccatgtttaggacattaacaggtacaattggtgtgttagtagaagtattgttgctaaaagtttgaaaagaagaagttggaaaaagggaagaaacatgtacctgaggagttggtgttgtagcatgatgtgtaggaaagtgcatctcattgaagacaacatgtttagagatgaatatttttctatttggatgttcacatatatatatatatcccttgtgttgtgttgaataccccaagaacaagcattgtttaggccttagttccagtttatgagcattgtaagctctaagatgagggaaacagttgcagccaaatggtttcagtaaagtaagatgaggctgtttgtaaaacaaaaattcgtaagggctgatattgttgagcacatgtgttaggagcctatttatggtgaacacatcagatgccatagcatgccaccaatattccattccaagaccagcttgagctaataaggttaaacctaactctgtgaagtgtctatgcttgcgttcaacccttccattttgctcacttgttctaggacaaggatgctaaaatggatgccttggtcatataaaaaatgagcaaatagtctatactcacctccccaatctgcttgcacactcttaatgggtaaaccaaattgtttctcaactagactcttaaattttataaagacatcaaaggcttgtcctttcaaagtcaaggaaaatatccagcaatatctactataatcatcaaggaaattgacatagtatttaaagccttcttttgaggtaatgtgagatggaccccataagtctgtgtgaattagagccaaaggttgagtgacactactgttggaagagggaaagggaagcttgtggcttttgccttggtgacaggctttgcaaaattgcaaatttttcagtgagccagtgtgtggaatttatggaaaatttttagccgaggtattgtttgctggatgaccgaatttacaatgccagttatttatgtcatttaattttgaaacattaaaagcttgactaaattgagataaatgagaaacaatgttgattttattgatttcttgattagtacaagaagtaacaagattgttcaaatgataattacacatacaattataaatgctttatagagtcattggaaaatgttgtaagatgacactgaatggaggagttggggtgatcatgaccaagctggtatagacctcccttagctttgcctttaagtagcactgtccctgtgagtttttccatgaaaaaacaacaggatttgtgaaattcaagaaagacatcagtatcattagttagttgagaaacacttataagattctttttcatggaaggaacatgaagaacaaaatttatgcgtaaagaatgagtgtttagtagggaaaggaaggtggattgaccaatgcttgaaatggccaatttcttaccattgaccacgcccatagtttcagtgcccttgtatggtgcaacagtatcaagatgagcagtgtcattgtccacatggtctgtggcaccagtgtcgacataccaagattcatcattaccaatcttaagaattgtagtggtgagaggtgcctgtggatcataaggaatgtcagattcagtcaaatgagcttgagtgaagttaccatatttaggggtaaccctattttcatcaaattgatagtgataaacagcatcagtgtgccctgttcgaagacaaacttgacagagcaactgatttcctgttgcacgtccacatgaacaagtgcaatttttgtcagttgtgtttccatgatccacaacacgaccataggaacacgaattcccatttcttgattgctggaatgtaagatttgcttgcagcatcaaagacagatcaacaactgaattatgatgctcaagccgtgtttcatgtgagagaagaagagcttgcacttcttcaaatagtagcagatcactacgatatgtgatgcttgagacaacagagttaaactcaagtcccaaaccgttgagaagctgcaacaccagatcttgattgttaattggtgaaccagtaatggataacgcatcagctatcgcctgagctttatttacataatcagaaatcgagatatttgctttttgaagatgcaagaattggctagagaacctttgttcaagagcacacttatgaggaattcagagtagccattgaagcaggaattaattctgacatcgatgatcgcaaccaagataagagtaattgatctttctttttccattgcacatatttggggttaggggcaccagtaaccagattggccggaggagtgacatcagagaacaatatttgatcaagatcgtgatcaattaccgtgggaacaacctgagatttccaagataggtaattgttacgatcgagcttgagtgtaagggaagaagaaagagaattggataatgaattccatgtaggattcaaagcagcacgtgtagtgggaagcgtagtttgaggatcaaaggaggaagattccctagacgcaagtcaaatggacgatgataccatgtaaaaggtaaagaccttcagagaagaaaaggcaagagccaaaaccagttgaacagaaaatgaacaagagaaagaatgaagagcattactcaaccaaagtagctcgagctttatttaatgacacaaagtaattacaagtccaaagca

SEQ ID NO: 184885 - DNA, 3618 bp, Cannabis indica
attcacattttgatacccttcggagcctaacacctggtgcaaagaaggttcgtgtttttcctatggtttctagtttgaatttctattatgaatctgtgatgagccaatgcagcttatttgtgacattgtttttgtatttttttttcctttttaaaaattcaatgcatcaaaactggctccctttttccaacgaaactagatgctaaaattttcgaatttttctgtgtatgtcattagttcaaactttcaagcaagtacacagtttatagttaattaaagttaaaagcagattaagcattgattagtaaacattggattggatgataaaaatataaatatatagttatggctagcagaatttttggtgaactcttttttcagaattttgtactagagaatttatattttgagttttaaatatgaaagtgtggaattgggtagctgaatagttagctctaactcttagatggacaaggcatcattgcttgccgaagtgataagccacttgaaagatcttaagaggaaaacagcagaaacgagtgaagattgtggtatacctaaagattttgatgaagtaaaagtggagcctgaggatgaaatggaaggaaggccttattcaattagagtatctctaagttgtgactataaacctgggcttctatctgatttaagacaagcacttgatgctttacaactgataataatgagggctgagattgctaccttaggatgtagaatgaagaatgtctttgttataaccgcctgcaacgaagacaaggttgaagacgacgacgaattccgtcggtttcatgcaaagtctatctaccaggctcttaggtctgtactcgacaagtttgctgtttcagaacagttcattggaactaaactttctaacaagaagagaagagcttctgtattcattccttaaagagtttatcttcatgaggagatatttggtgtatgtatgtatccaattgcatagattttagtcaaccaaatgcatatacttcagacatgaatgatattgatactggtatagttagaaatatctgtgttttccttttccttctttagtatattcttgtagatgtatattccaatgtcttattctctaaaaaataatttgttgtaatatgaattgaatagtagaaagaaagaaagtttgttgtattggacataatttgcatatggaatcttgcccttgatgtctattctgaatttgttaacacaatggtaaactaacaaaatctctaattgcattttgaatttaaaaaggaaaatcatatagacaagacaagtgtttatttattattacaaaatatagtcacaatcagggtttaaatgtatgaccatgatcaatgtattaggatggatggataagtacaatcatcaagattactgatgatgtatcaatattatttattctctgacctgttttatacacgtcgaagtccataattttataatggtgtcctactttaatacctaactagccacaaatactctgttttgcataacagagaatgaaataattttcactaatttagtatacgaatgtgaataaagtctcaactaccatcatttatagcagtaataataataataataaaactattgagttgtgattaatttgataagaagattccgagtttcaaaaacattacatacaatacgactgcctcctagaacctttgatgaaacagctgtatggctgccgtgattcagatcagagagacttcatcaccattgccacacttacccatatcgtgtcaggtacttgtcattgttgcttttattactattaattatgagactattttcattcataagtctaattttaattattcatacttactaccatggatattaatttttctaatattggcaagtcttttggagaccttcatttcattattgaactgcaactttatgttgttgaaataaagcattaattcttcaaataggtagaggataatgataatgttgtaaaataagtaagcataaacagtgctagctgcaaaaacagtgtacactcttaacactttttaggtcccgttctaccactttgttgggtgattattttaggttgactttcacattaatatgatattatttattagaatctagactctcacggttttgtttttgggaccttcctcatactaatagagtaggtggaacatttataaccaagacaatttttgcttatttttccaatatggaacttaggttgatacctcaacaatccttccctcaaacttaagatcacatacttgtagcctcctctccagcgaaactaccttatattactgctatcaccaacgaaactcactgcttgaccatcacatttgttaggaagactttcgacacaagtcttaacaccaatctctatcttgtaccactgtaattatccacaagacacgccgcctgaccaccacagtatcagatagactttcaatacaaggcactatatatattttcaatcacaagatcatcacattgagggcttctcccacacatcactaatacaacccactattttagtgctcttgaacctttggcttgataccacttgttaagtccttcaccttgactctcacattagtatgatattgtccattttgggactaaactctcacgattttatttttggatatcttcccaaaatacctcataccaatagggtaagtgaaacacttatatctagtacaactcttacctattcttcttctaacctgccacttgaattaatacctcaacacacacttttttactctttacttgttctataaaacaacaaatggaaagacaataaaatagaaggttgaaaacttagttctaatattccaagtcaattgatcatgtaatttcacttagaagattagagcaattgtccaatctggattgtgtgacatcggtattgataatcacagtggctgctacaaaggctaaataggctagaaatataaaaaactttcacacaaagctatcttcattattagtatagttatcatcataaactggtgattattttacacacaaactgaacaggatacgttctaacatctaaatcctggttctgtgagttctgaaccacagaataagaaaacaaagtactctgtacccaataatgaatcccatcatcacacttaagttactccatttttggtactctttcagtcctttctgctccaaaaatgtatctccatacaagacacattggtctcccagatttgccaagcatctctgccttcccttctctcctccatactcatttattataaaacactcaaaagggtacttaaataaactcaagtaatgcatgaaaatccaatatctgggtaaatcttctttcgttatgaaatagcctgaaaacaaaaaaaaagaccccataatccctgcgactaaggtcattccagtgatgaagtttgggaccagtgcactaaagcaagccacaaaagagttggacatcaaaatgaccatccaaaccaccagtgaaaaatagagaaaaccatccatttcttttcttaatccgactaaccagtagactggggtagtgtaaagaacagcaacaactaacagaaatggaagaaaaaccaacgtgtttgatatcacata

SEQ ID NO: 184886 - DNA, 5160 bp, Cannabis indica
gttataatttctaaacgttcggttacggtgttcgtaaaataaaaattttaatcgaccggtcggttataaaattgtaaaaccgaccataaccgaccgattttcacccctagcgaaacaaattggtgagcatgagttttttatacagagggtgatacttgaactttttctctttggctgcgagatggaatctccgagacaagtattccataataagaacaattaaaagaagagatattggatcctcttgtctcaactcctgctctcttttaaaagaatactgatatctcacattcataagcaaggtctatgaagtatttctcacacaaattattacccaacttatgaactttatagagaagcaataagacttcaaattatttattagtttaagttattaaattttttatcgtcaaaaattaaatttaaatatttatttaaaaattaaacttaactatttatgtaaaataatgctttgtaataaaaatacagcgggtgaaaaggaaaagcgagtaatgttttaatacggtcgattcattcagttcacgcgatatataaataataataataataataataataataataataataataataggcgctagcctttgattcataatccgtcagaaaaagaaatctatttgcttcgcaattctctctcctccaatgtcttcaaaccctaaccctagctccatttcttgatctcattcaacttctacaatcctctaacagggcttgagattcgtcgaaggattctattctcttcgagctttctctgccaaatttctcgacttcttcgattgaacttgaggtgcgtcgagttcgaaggtgttatttgcgattttcgaagaggaatcgaagtactccgcgcgaagttcagatatctgctacctgcgttgttttctacttggatcgattttcggaaccgtggctttctgatcgtggtcgattgtgtttcctgaagttttgggagtttgagcttctccgttactcttaaagagggcttttttgttctccataaaatcggtggttttctgctcggattggtgatgatcggcggtggatgatcacattgacgaactgattctcttgtattgaatgttcgttactttatccagattcatgtgtaattgcatcggagaaaagcctttgtaggattcgtcttcgaagaccttgtgaagagctctgcgcgttggcggttcgatatgtttgatcctttattgagtaattgaaaaaaaaattagaagaggaaaaaagagtttgaatttttgtacctttaatttttttttttttcaatacaaggcctttatattttttttttcagaggccttttgattgatatatgcttcagggcttttgattgttcctgttttggtataatatttttctcttagaaaattaaaagaatttatttttatcatggcggtctattataaatttaagagtgcaaaagattatgattcaattgctatggacggtcccttcatctcagttggtactttgaaagaaaaatatttgaaaacaagcatttgggaaggggtactgatttcgatcttgtggtcaccaacgcccagaccaatgaaggttggtttagattttgatatcactttattatcatataaaatatgttaactttagacaaaaatactagtcgtaggtggttaggttatgtcctaagcataatgtcaatgaaatggggtttttttagttgctttattattattattatatgagctgctgtagttgtataggagttatagaagagatgactgccgatacctcctcaattttattccaattgccatattcttccatgactaacttccacaatgaatgatgtatacatatatatataatatactataatataatggggcaaaataatattaatttatgataagaaatcttgctcaaccaaaatttgttgaattgccgcaatttaagagggggttacatggtgatcacgattttgaaatgctgttggatgatggtttgtctgtgttctacttccaaggaagacaagggcatagttctgtattggttttggagggaatggggaggggttactaactttttgttctcttcttttcttttaaactatgtatttgtgttattatcgactgtgttctctgtttggaatttcagagtatattgatgaagggatgttgataccaaaaaatacttcagttttaattcgtcgagttccaggccggcctcgtatgcccattgttactgatccaaagtataatctcaaaacctctaagctgttggttacttattgatttcttagagcgtgtttgtcactgtacagtcaatcaattagcatagtatcagcagcattgatgccatgtatctcaatatatcaattatgttagttttttagaatgtagttgtaggttgtggtttgttggcataaaagccagccattactgtttcgtgatttttgttgcggtacgcatattatccttgtgatgtggaaatgttttttgctgcagtccaatggtggaagataagatggaagaacttgaacctgaaaagaccagcttctcagtagctgattcatctgccatgaaatatgtaatctttagtctcattcgtattaaatatgtgaattgatattagatccttgcactatgattttcaattggtaattttccatctattaatgttctaaattgattttatagcatgatgattcggaatgggatgatctggggggcgatttatatgagataccagaagttgtgccagttcaatccagtcatgtacttccagaagctacccctaccaacaaagctgacgaggagagcaagctacaggctttgattgataccccagccttggattggcaaaggtgaatttctgtttattagttttcttgattgcactactaattttacaaaatcttgatcttatgtattatcacccttttttattcagaattatttcctcggtttttgttaatttgtaactctattctgagatgcagacaaggtcctgaaggatttggtggtgctggtagaggttttggcaggggtatggggggaagaatgatgggtggacgtggttttggtgatactctgctcctaatgtttatcatatttttattaacagtctagtgctcagttattgttcttctgtcccttgcattatgaggctgatatttttttgccattggtttgtggttgtgcaggaatggagaggaaaacacctccacagggctatatatgtcacaggtgcaaggtgccagggcattttattcaacactgccctactaacggtgatccaaactttgacatcaaaagggtgaagccgcccactggcattcctaagtccatgctgatggcaaccccagatggctcatatgcattaccaagtggtgcagtagctgtgttgagaccaaacgagtatgttacttagtaaatcattagaatctttattgattttcagtctttagtccttgagattaactgctaagagttgttaaagctgtatatatttatttattaattttcttagagctgcttttgagaaagagattgaagggtttccatctacacgatctgttggagatctaccccccgaactacattgtccattgtgcaaggaagtaatgaaagatgcagttttgacaagcaagtgctgctttaagagcttctgtgataaatgtaagttactatcttaattccattaattttaatattatactattcacttctttttttcaatccatatttcttttttgagctgtgctttattgcatacgtccttggattatcactaacatcccgaatcatctaatatattatctcacattaaactcacattaaaattttcttcaggtgtcagggactatattatctcaaagtcaatgtgtgtctgtggggcaacaaatatacttgcagatgatctattgcccaataagacgctcagggatacaatcaaccgtatattggaatctggtaatagtagtgctgataatgctgggagtacatttcaagtacaaggtttgtgtctaagtgatctggtatttattttgactagaatgcaatgtggtttctacaactaatttggattggtttcttaactttttaagacatggagtctgcacgctgcccactgccaaaaaatccatctccttccatgtcagctgcatctaagggagaacatagaccatcacctgtcaaggaagaaaccttaaaggtagagtacatagcagatgaggccaagcctataatagctacacagcaaacagtagagaaggtgaagactgcgagaatagctgatgtatctgaacccactcatgaatcagtgagtgttaaggaaccagcatcgcagtgcagtgctccacttgtggaggaggaagtgcaacagaagctaatttctgttgaggcaggtaatgtgcaattcataaagttcttattgactggaaattataattcaatgaatttttattattgttaattgaaatctatccaagacagccaattataaagggaattatgggaagtgattatgcaacagaagatattaaatatgtgtcattttaaccagctgacatttttaatatctttttattacaggaaagaaaaagaaaaagaagaaagtccgtatgcctgctaatggtgcgtgtttcgtgtttctctgattttgtagtcccacacttatgtttgttagtaatttgtacatcctatattgctataatcatattcatttcatactttagttattttgacacagtaattatacttgcagatttgcagtggaaagcttctcaagatttcccagttgataattatatgatgcctatggggccttctgcttataatccttcttataatctctcttataatccttctgcttataatccatactggggtgggatgcaacctagtatggatggatatatgaccccatttggtggacaaatgcctggacaaatgcctggacagatgcatggacagatgcatggacagatacctggacagatgcctgggcagatgccttatatgggttataacataggacccttagacatgccatttggtccaggttttgttcaacaagatccatttggtggtcagggttgtatgtaccctgttgctcctcctcagaggtatttaggagttgaagacactggaattttgttatgttattttt

SEQ ID NO: 184887 - DNA, 4642 bp, Cannabis indica
aatttttaattatcataatgtgcttgtcaaagcttgttgttgagaagtattggtgctctcattttagttgtgttttcttataataaagcaaatcccacaaatttaagcttaacatggttgtcaagaaattacatagatgaaggtattagtttataattaatttttatatagcaaaccatgaacaacaaaccatatatacatatctttacaagtatggttttcatcgcaatggttaaaataaatagcatagaggaactaaacaaattcataaaaatggatccccaatttaccgtaaaaggaattgattatttttttttctttttatatctcaatgatttggtcagcatagtatatattttccctactattttaaagctaccgtacataacatcattgttttctacttaggcttaaattatgcatactttcatttatccagtttgtgaatttttaaatttccattaggatgttaaagggcctcaaactgttgctttcaatctaccaaatgacgagcgcatagtaaaagaccgtggaacatcaatggtgatgcttaagaatatttcagaggccaagtatgaaatttctttacacaatattgttcagattgcctaagcatgatgaatttattattcccagcccttttcctttgcttactaatattaagttctctatttttaaatgagaaatatttacaatagcaagctgcctaatccaggttcaagcatattcttgtgcctatagctgatgcatgtcttgtagaggagcagcaagagcttgttgattttgattctttcttcactcacaccatttgccatgagtgctgccatgggattggacctcataccattatccttccaaatgggaaacagtctacggttagattggttagtgacgtgattaaacttgttaggtgtttacttttcctaattatcaatcatgtttcaaattttttttgggggtggtatatttgaacttagaacactaatgtggagatgtggttccatgaggctatctgcaaccattatgttagctatataatctaatataatgtcatcataagaaaaattgatatattatatgcatttaaatttataattggtgtctttaaaaattgacaatgccaagtgtgctgtataatttactttacaccgatcatgtatttgccaagtcaagaagattttgactggggacagagttccttaagttattctaatggttaatagtgacattatttggttggtttacataataagctgcagggtaggaatatttgtagaatcatttaactaatttcgatttaccatgacttttcttgccaaaatgcaggagcttcaagaagtccactctgctttggaagaagccaaagctgatatagtaggcctttgggcactaaggtttctaattgatcaggtaaacaactcttaacttggtcatcatattacgttcttttgattttattagcggtattgaagctaataacctttacacatttgacctgtttccatgctattgaattgctctgtaaaagcttgagtggcgattgatgttgttttagtatggtattgtgtcaacttcaattttaatttctcaaatatagcctcattagaaagtaatttcaatttgatggctaccttgagtaaacaaccattttcagtaaatcatggaagagcatcatacttaagtaacacaatcgtatcttttaaggtagttaatgctcttattattttcagtaagcaataaatatagagaccttggacattgttttccatccatctggcgtaccaatccaaatttgttttaatccagctcatgctacaagataaaattttacattcaatatcataaacatgctccttttgcttcataagcataacaagatttttagatttgatgtgctgcataggagaatgcttttcatttgcaaaaattgttgaactattagtgtggacattgcataactcctttcgggtttacaggatttgcttcccaagagtttattggaatccatgtatgtttccttccttgcgggatgcttccgctcagtacgatttggtttagaggaagctcatgggtaaacctaactattcatcatccttggtcctacgtcacaaaacttcttttacttacgtctgataacaataatttatactttgaattatcagaaagggacaagcactgcaatttaactggatgtatgaaaagggtgcctttgttctgcatcccgatgaaagattttccgtcgatttctccaaggtatttttccattgtttttatggtttttattttcaatttttttttcgctttactaattagaacaaatatataaaaaggctgaaggtgcagttgaaagcttaagtagggagatactcacaatacaagccaaaggtgacaaagaggctgcaaaattgttgcttcagaagtactctgaactcaccgaaccgttacaaatcgctttgcagaagctagagaacgttcaggtacgagagagaccaaacttaagtttcttgttccattttgttttctcattcgtgctgactaaaatcgtaaattttaagctaattttctgatgctgaattcttgatactttgtatatggaggaggcattctcgatgtgctaattcttgttttttccattataggttcctgtggatatagttcctacctttccaattgcaaacaagatattgaagaagcaaggacactaaatttgaccatgccattggctctttcagggaggatgtagttataatttataaataaaattatgctacaaaaaatcgtacactgaataatgtgcatgcttacttatcaaaaagaataataatttgcatgctttttagtgttatggatgaagcacacttgatgatgagaggcaaatctttcttctaataaactggcttttctctactaatgctaataaagtggtacaccatttttttctcctctttattttgcccaaattttctccaatttttttaatacaaagatttgataccattcgtatttttttatatttgaatagttgaaattttaagtttttatatgattatatatatacaagacattttataaaattttaaaaaattaaaataattgataacatagaaagtacataattaaacagtatgctttatagttgtataaaataaaagaggtacgagtgcaacaaattatgaatcttgtttttattgtattattttttaaaaaaattatttataattattttttcacattatttttttacactttctctctttttattttctctcattattttcacacatcattttctctttcatcactttctctccttatttttagtccgaatcggggttcgaggccggactgagatttggggtttggggtttggggccaagctggggtcgggtacgggttcaaggccaggtttgagttcgggactggggtcgggtccaagccaggtctgaggtttggattaggggtccaagtctaggtcttgttcaagtcttatttatatcggagtctcaaaatattgaagtgtttttttaaaaaataaaataaaaacaaaaataaaaataaaaaaaatattttttaaaactattagccaaacaagatttttattttgaaaacttaaaaattgttttttattctcatttctaagaacatctttttgaaaacaatatcaaaaatgttcataatttttgaacttcaattccgatttctgcatcataaattatcaaaagtttcccaaaaatttgtataaggtatgaacaaaaaaaaagagaaagaaaataactctcccatgactatacattatttatagtaagaggagctatggtacatgtatgactatatatataggatgaaaaatattaaaacgcactcatggtgcctaatacttctacgaggtttaatatcgttattagtgcaacttaatattgaatctaatttattttacttaaataaatattataaaaaatcactaattatttatagaacaacacatatcttatagcagtactcatataggatttataaacattatctttcagatttgtacgataataataagtacgaagaatcaacagtaggataaaataaatatataatcaacagcataatccaagttacagattagagaactaaagatcacataacctctaagagaaagaaaaacatcaggctgagggtggcgccgaagctcctcagaccgcgatgatttgcagttgcacagagaagaacatgagaaaccgtaatcacacaatgacttattaatccttttcaaatcaaattttaagctgacacattagaaaagaaaaataaaggtagaaagggaaaacagaattggttgaacagcaacttatggtttgctaatttttttttttttttcttactttcaaaatatgaattcccacaattttttaaaagataaatctgtattctccgtaagtaaactactcataaagtatgggatacaaaaaattcaatgtctaaataacttttaattcttttagccaagctgtatgtagaggacatggatcgggttttccttcagcaatagccttttcagaaagagaatagaccaaccgttcctccatttgaactgagaccataaaataaaactcaccactcagaaaattatgatgtgtataaactcatataa

SEQ ID NO: 184888 - DNA, 1763 bp, Cannabis indica
aaacaacaaacacccccatatatgtattatttcaaaccttcctacccctcaacacacaccaaataatcgagtagagtagtggagaggagtcgaaaactactctcaaaagaaaaagaaaaaagaaagagagaaaattatttgtattattttgatgtgggtcgaatggtattggtgtgtcttgtcttaaatggataccttattcagattagtgagtcttcaatctgatcaacaatcctataactcaagccgaacttcaagtagctcagcaagatcttcttcaacaaataataataatattagtaataataataataaaccatattaccaagaagaagaatgcttcaactttttcatggatgaagaagatttctcctcttcttcttctagacactattacccttataaccatcctcatccttctacaagtactactccaactccaaccccagtagccctaactccaactccaactaccacaacggcaaccaacgccagcacatccacaactactgatttctctttctcaccactcggtgatcttatcactaaccttgatatattctcatcaggaaacaagtgggcccctgagattctcctcgagacggctcgagccgtggctgacaagaacagctctagagtacaacagctattatggatgctcaacgagctcagctcaccttacggcgatgctgatcagaagctcgcggcttactttctccaagccctttttagccgagtcaacgactctggaaaccgttgctaccggactttactctcagcctcagataagacgtgttccttcgagtcaacaaggaagatggttttgaaattccaggaagttagcccttggaccaccttcggacacgtggcgtctaacggtgcaatcatggaagccttcgaaggtgaacctaagcttcacatcattgatataagcaacactttttgcactcagtggccgactcttctagaagccttggctactcgtacggacgacactccacaccttcgtttaaccaccgttgtttccgccaggaattgcggaaccgacggtggttccgtacagaaggttatgaaagagattggaacgagaatggagaagttcgctaggctgatgggagttccgtttaaatttaacgtcgttcaccattttggtgacctttccgagcttaatttggctgagcttgacgttagagacgacgaagccttggccgtcaactgcgtcaacactctgcattccgtcgccgccgtcgagaaccgacgtgactacctggcggctgctttccgaagcctcaggcctagggtggttacggtggttgaggaagaagccgagctcgacgtcggacacgatgggatcgagttcgttagaggttttcaggaatgtgtgagatggtttagggtttactttgaggctttggatgagagctttcctagaactagtaacgagaggctgatgcttgaacgcgccgccggacgcgccgtcgttgacttgatcgcttgttctccttccgactcagtcgagcgtagggaaactgctgttaggtggtcccgacgcttgcatggcgccgggtttagcccggccgcgtttagcgacgaggttttggatgatgttagggccttgttgaggaggtataaggagggttgggcaatgacgcaatgttccgatgccggtgccggaatattcctgacgtggaaggatcagccggtggtttggacaagtgcttggaagccgtgatgatgatgatggtgatattattaattaattg

SEQ ID NO: 184889 - DNA, 2942 bp, Cannabis indica
ctctctctctctctctttgtggtcgagaaattcctccttatcccataattacaatgtcccatgagttaagtacacactatgatagaaaattcttcttctatttgtatccataagcccactcttatcctgagtgttggggctgatttggtagactgtggtgtgaattcttcatcattgctcataataaggattggatgattgacattttatacaagaagaattgaggatcccttgataggctacacgaggtattgtgtttttttttttcatatagtttagattaatctatatatgtttagatcgttggggattatggttcatattggaataaattcattttttttttaataaaatctacttccactttcatctctaatatgtaccataaaaaccaacattgaatgcacgtggtatagtgattagtcaggttactagtcctaccaacactagtacttttgagatattgagtgaatgtggtatagcgattagttgtgctatgaatcttacaaacactagtaattttggtgtactaagtgtacaggtaacactgccctatcctgggatgcagccctcgatgttgttttctttgtgccacgtgtcaaaaatagtgtccatgtcatcaagccaatcactaagttaaacatatgtacatatataaatgttaaggttacaagtatatttgcaactatctccattgaggtctgtaaaacacaagtggttagtttaagattattatcccaaatcttgtccacaagacctaacatgtctacatagtcaaaagaagaagacacgtggagatcactaacctgccaggatagtccgtgcaacccttcaaccttctaggttagtgcgtgcagccctcaacctactaggttaatgcatgccgcctttaaccaactaggatagtgcatgtagccttttaacctgccaagttctacctacatccttccaacctaccaaattagtttcgtgcaccttccaacctgtaagattccatagctgcacggtggacacaagcaaagactagtccacatacttgccagcaaagccctggccgaacctatagttggttggctaggagtgttaacttccatacactttgtagccgttagcacgacaggctggccaagctgaacagcaaagctgtacagacagccctaaagacagggcgatatagacatgtcagacatcctctaaagacagggctggccaaccagaacatgtatacagctcctaataggctggtcaagtcgcggggtgcatagcaagccttctagaagattctcaagctagcttactattgcgggacatgtccaacaacccttgaagataggaatattccctaaaagatgttatcctagattctagggatttaataatcgttttttgtaattaaaatataagaaaaaagatgtcattttccctattttaaagtgatatctttacctatttatattatgatattttgtaagccctacactatataaagggtattagatcacatgaaaaaggatcctcaatcctaagttccatgcgactatagttctctctcttcctaagttccacacgcctatagttctctctcttcgtaagttccacacaccattgaggcttcataaactataagtttatcttcttcataagttccttataagatcctaccagttgtttatctgtaacaccttattcgcacaattgtaatactaaagacagccatagctagaaatcacaaggttttagcctatgatctgcatgatattatctcaagagtgaatacaactaaaagggaaataggtcatcacccattcatcaagggggtcgaatctctataaattcctgtattatttttactatttattattattatttacacaaggtgataatcatcaattaataagactcccttgttagttggctaaatttcaagtcaacattttggtgctttcattgagagtcttttttttttaagtttcttcatctcattatgatcaatcaccatggttttaaccagaagaactacttccttggatcgtccttaggatcccaagatggtagattccaatgttcatgttcctcccaccacagaaggccttgaacatagaataagctccacagaacacaactgagactgttccataatcgtatgtgggagaaacagggccaggggttggtgaaccatccattgcaaatactcacttggaccttggagatgatactaagttggttagtctcagtgaagttgtaggccaggctactcaaacaggatatgaagaaacatgcgctgctgtatgtgatgcctttgctcattaaagacaaaaattccttaagtggatggatgaccaagaggccatcctttgatcccactaagcagagatgcacctctataattgtaaagccaacaacctaataaggcagtttattacgagagttttcgagagatgtgaggatctgataagagatcctttggaaggaagacttacaaatgggatgactagggtccaccaataggtagacaatgggcaaacaactcatttaggtccctcgagtagggggccaagctctgtcttacgtaaggatggataagtcttgcctggcagaccatactccaggaatgaccaatttttaacaccaaggaatgacgataggagggaggaaaatcctgaacatgggactatgatgataggccagggcctggctgggtagtaaaataattccctcccccaaaatgtccgagaataggtgcaaccgaggcctagggattctatttttaataggataaatccttggctgaatgaaaacacataaggcaacaatacaagaagggagaaccgtaattactatattctgcccctgaataatgacctcagaccagtggatctgcccaatctgagtgattggcatgatctttccccccccccccccgccccgaccgatactactac

SEQ ID NO: 184890 - DNA, 4102 bp, Cannabis indica
ataaaatcagaaacattaggtataaaatattgcaaaatttatgcaattttaccattaggtataaaacattaccattagaaacattttatgtaatatcagaaacattaccatcagcatagtattcgttttgtaaacattaagtatttaagtgtataaaatcagaaacattaagtatttatgccgcaatttaccttataattaaatttacttttgcacataatattaacctaatatatataaattcttgatattagatatcagtattacctaacactttttataagtgacatctcataattagttagcaacattccttaaaaattattttcttaagttgaaccaataatatcttttagccattcttataaatttatatatataattattcctgaagaagtcgtatttagactggcctattctggtccaatgataactttaaattaaatttaatcaaacatcgtaggccaaccaactactggattggtcaaaacgagttcacccaaaacaactacctcccactttccgccctaaagctaaaaacccaagcttttattacctgccaaccaataacggctttgtccattaaaattgaaacaaaaaaatcaatagatagaagaactctagacatatcttcacgtttgccaaatgatacatatattattccaaaaattaacactataattaattaaggcaatcctttatttgtgaagtcacggatagagggaccaaatcgtcaaaccatgatacaagtttcttaagaaaactacatgaaagtggcctcataatgagtcagtccctcaaagacgctactcatttcaatcaacagtcaaaaccgtcgaagttccttgtagttcatactcatcaacgcgtgaaccttgtgaatttaatatgtggcatagcattggatataatatgaccaaatcctatttcaactttgtccccctcttcagggatagaacccaaacacgctagtcatagtagctttttgacgctaactctaagcacaacagagcatctaacacttgtcattaaaccaaacgagaaggtacataaggttattttcatctttcatcgtcaaagatgaagctgacccctataataacctccagcctctttaattaaatctagtccattcactaactaaaattttgaatttggtaaattgttttagaatcttttggtaatgcttatttgttttatttatttattgtgagggttttatttgtacatattgcaattgaaaaagaaaagaaagatgcaccaccaaacaaaatcactaccatgtttacttttgaaaaggagggaaaataaacgcctaccaagcaataatatcctaggaaacgtacatggttttctaataaatttttattcttcctacaagattaatgtctactaatattaaagcagataaagcagaaattgaagataattgttggatgatacaaggataattttataccaaacgtttatggttgtaaaccataaaatagaatagtcaagtcagttcaatcttaagaccctgctaagataacaaagcaatgatctaatcctgctgcttctataattcacagcgtttacagaccagttagacttagtattcctaaacttatgctatggcgcacatcaaataattgaaattaagtgcatataatgaaattatgcatttaaattatgtgtgtattttgtgtgctccagtattattcagtgcactctactcattgcataccgagcttcctctccatgccttaacataagatttcaacattttattataccacagggggtaaaaaaaattaccgagctgtacagtctcaaatagcccgccgggtttattgtacccccatgcacttccaccacaagtttttgctggtgtttgttaggcaaccagctggtatcttcaagttattctctgataaatatggaaggccaactgatgtggcagcagagatgagtttctaaattcagcatttggaaaattcaatgttcacctttgcgggaagtcaacagaagtgtttggaacgttggtgattcctgatggtggggtttcgggtcttggggtacttacatcaggcattacaaagtctggatggaggatatctggcccatcccagttgacaacagctgtagttgtagttaaggaatcaagtgctcatacagtgaaacaggaaaaggaaagagataacattgaaaggaaaaaaaaatgcagcagcattgtaaaagagggatacagtctgttttccacatatctgtaatgctaacttcagcatcagataaaagccagtagtccgcatcattctgaatttagcaacaatagtcagtctttcagtcaaaatctaaaaataagttacaactatttaagcataaaaattgtatatgcaaatatatatttatatatttgtatatccagatatggtgttaattaaatttatcttcatacaactcgctccaaacttcaaatagtaagtctcacacgtcagattttaaaggtgttttcattgatggtctaactataaaaattgcttgtgctgagatccgtgaagatgttttagatacctggatatagtgttgtaagcgttcaaaatgttttgttttcttcttcgcttaccacaaataaagataaatcagcatggttagacttacatccacatcagaaggaacaatcttcatcattcccccaggaaactcctgtaaaggattagtatcagggcacacttgatgatcgtgttgtgcctgaggttcaatttcctttacagtgctgctccctacagttatcacttctgttactgtaggttcgctagatcctgaactagaagcaataggaaagcttgcaggtggctcagcactattcatgtcctcaaacttctcttcaaattgactacaatttaagaaagtaaatgttcaaaggatggcatatgaaaaaaaaactaccttaaaaataaatgaaaatctgcaacaatttatcatggcgtttaacagataatacaacaatttatcatggcatttaacatataatacaatgaatatgggaagagaatgcatgatatgctgtaaagaaattatttgaacatttgaacaaaacagacgaggcaatattacctaacaaggtagacatcaatgggacccatagtgcttctgagaattattctgtatctcctctgtgcatagtcaacagcctggtataaagagaaagtaatcatcacgttgaggatcacaaatgagaaaacatagcacacaatgtgtaatagttacagaaattttactcttgtcaacttacttcatcaggatctggaacttccagggttgttccatgtggagctttaattgctataagggtttcattctgccaaaacaaataacatacaggaagtttagcagcatatccagaaaatcatgcaagtggaataaataataagtgcaatgcaaataataagcttacatgaaaacatggtaatcccttgatgtcttcttcagtcacaaaaagccacctaagtaaaaggaaggagtcaatgccatgaaagcaaatgtaaaagtattacgtattaaccaacaatcaaacaaacaaaaaaaaagccttacttttggttgttctcatcttcgctcaggtccctcagtctctcctgcatctctctgcaccagtgttgaagtttatttgttacccaacagtttcaaattaaaaacattacctgtttaaaacagtcaatcaaccgcataaaccttattcgatcatctaatccgcgctcttccatgttaaggttttcaacttctgcctgcataataaagctatagtataagctgtgatacattgagtttaattgactaaaggaaatcaagtctaattacctgtaataaggaaatatcgccatcaacatcccctggtcttgatgcgtcaagtcccctaatgaatcaattaactccattactttcccaagtccagtatttacacgaaaaaagcaacatcataaactatgttatgaattctaaaatattacttccaacgaattctgttctttagcttcttttcaataagacctatgccttccaggacattggttatgtcatatatccgtctcttttggacctggtaatttccaaaaaaaaaaaa

SEQ ID NO: 184891 - DNA, 2425 bp, Cannabis indica
cactgatgaggacaatacgactcttacaatgctctttacatgcagtctctgcgataaaaaatgtaataatgtttgctttatatgctctaaacatttatctttagtgcatctgcttttttttcccccttatcctttcttacatcctgatttgtatgtagatcacaaatcctgtgcttcagatattgacgtcagctcacttgattccaatagtatggactcatctttttgtgggcaaaaatgtaaagaggtattccagcatttttttttcatttaatctcatatctctctttaaaagcaaatgttgtatttgaaattttgaatcacatcgacatgtaccttcccattatgtgtctctctgtgcatatatgtgcttgtacttatgctgtatgatctccatgcttgcgtatctttgagagtagatgcaaataaatatgaataccctgttttacatatgtattacctgcatatgccactttaaactcttcttttcttctccgataatacatttgttaggccctaggattagtattgtgtgctagaatatagtaaataaaaagggtatatgagtctttgtatgggagggtagtctttgagtgaggaattggtactatacataggtgtgtaagaaaaataagagtatgaaatgaattgagtattctgtctttgcatcacaggggcctaaggacccatattatatatttgtgcttaccactactgcgtaagcctcctaaactctttattttttatctcttttctttggaccatacaatacacattcacttgaaccccatataacacaaacaccggctcgcccacccatccacctgacctagcctcaagagctacgggttaaactatatgaggtgcagtttaatatctggaattagatatatgggtttatagggaatcaagtgtttttgctggtgttgagtttgaattttcacaataatagtttggcagtttcatagaagaatcttccaccaatttttttttgccatttaagttcttttagcgaacaaagtatatgtgcatgtacgtgtgcataatttactttcagtgtatcattgttttacttatttatcttttgctgttaaaagaacttctgcaaaatttgttttgatttgtatttttcaagagatgtctgactttttatacatttctccatctctgttttagctctttgagcatttgcagaagtatattggggtcaaacatgatttagaaggagggttttcatggtctttcattcgtagattagatgaagactctgacttcgcacatcgaggagttcctcagagagttgaaggcaattcaaagctcgctgttgctatgactgttatggatgaatgttttttgcccattgttgataggagaagtgggattaatataattcgtaatgttctttacaactgtgggtaagtgccggtttttcgtatccggttgaaacgccctttcctgatatttctgtttttgcagtttgatttggaggatttaactttgatagtttggtatgtaaatttgcctgattatttatttacctagagcttcaacttagatgactaaaatcaagtgtcgtacttaccaaattggaaagcaaccatttggaattgcagacatgggagaacatactgacatgaactttctttacctaaacccatacatgattgatatttatcatgtttttatgttcttggaaaaatatcactgtttctttaaccactagactgtagtttctattaatctctgccaaatatcaaatcagttactgtttttcagtattttaattcttccactattttggccttgcagttcaaactttaacagaataaactatggtggcttctacactgctattttggagaggggtgatgaattaatttgtgctgcatctctcaggtagctagatgatattgcccatgtattttgaatgtatataatttagtgatgcctaaatggggttcctgaggtcctaggattattctcaatggtcataggcatgcatgtgcagtttgactgtgtaaagttattatcgtttgatcatttgatttagtagaaacgctcacctgtatcatttgatccatgtaaatttttaatgaattgtggtttcttctgctggataggttccatgggactaagttagcagagatgccattcattggaactcgccatatatatagacgtcaggggatgtgccgtaggcttttctatgccattgaatcagtaagtttttgaaatttttatttatttacgaaatgcagaagtttgtttgttcagtcaacctgagtttgtaactgcttttgtatttttgtgtgcctctgatttttttccccctcattttgaaggctctctgttctctcaaggttgagaaattgattatccctgcaatttctgaactcacacatacgtggacagtggcttttggttt

SEQ ID NO: 184892 - DNA, 1618 bp, Cannabis indica
atgttgagaaaatgcaaaatttggtgatgaaaatgacaaattttttcatggctatttggtgatgtcagagagattagtcttctactactctcttcgttgctgatttctaactatcaagtttttatctgggtttgcttcttctgttccttcttagtccctgtcctattgtgttggtgaagagaaaccattgtcttggggctttttcttcagagtttaccttgttaacaaaatccataactctttggtttcgggatgttattttgacttgtattctggggtaaaaaggtggtttcaatttatatctgaaaaattggtttcctttgttatacctgtggccgcctggtgcaaccagaggtaaaaaggggatgctcgctattttctccggtcatggtggagtctgtggatggatctcattttcctgtgtgtggtccttggttgtccacggaatcaaggtttcatgatgttctttcgagtgggctatggtccatcatctccacctctgttgggtctcaaaaggcggtgctttctcgtgacgagccgtcgtctggctctgagaacggagggccggtggtccgtccgttactcatcgtccctcgtaattcgaaacgctggaagaagttgcctgttagagtggtgacaggtcactatcaggacgtgaaccaagtttgcttgcccaaggctgcttctgaagagcctatttcgtgctttgctgaaatgggtaataaggatggattaaatttgaattttgggggaaagccacctttgtctttaccttgtttgatgcttttgactcagagagcgatgacaattgaaccgttggttcctgcggccaattgtactgggattgactttttggatattgggccgagcaaaagtaagtgtgtagtggaccatatttcaaatgggccggggaggaaaggaaatggtatttatgggcctggagagttaatggaaggagttaatgttggagagtattgcttgtgtagtgggcccgaccggactgtggatttttatagagattgggccgttgggtcaaaggctgcagtggggccggacttgtttttaatcctaaggataaggtgaagcttatggatggtagtgggcctgcggttggtacggactcccttgagagccttgaaggtggaaagaaggcagaggaaaagtttaaggaggagagggctttctctcatttctatgaagcccaagaaaagcttctttatgatcttatactttttggaaagttggacctttgtgagattaaaaatttgggtggtgttattggagggaagcccactttggaaactaatgagcaaactacaccttttgagaaaagaaaatttaagggctctgcttctctatgcactagacctcaaaaaatagttagaagacacccagatgttgttagcaactttccttgggattctaaggagagggacctggtatcgagggcggagtttgatgaccttgaagaatatccttctgaagaggcttctgatgatatttctagttcaccgaattgtaattatgatggtagaaagagtcccctgattggctcgttcataattgaagaatctggctccagcttgtctgttcattcgattaaccctgtggaggagaa

SEQ ID NO: 184893 - DNA, 2701 bp, Cannabis indica
accaaaccgaccgacgtacacctctacttgtagatatattttgtgtgttatagttgttttcatgttgtttgttaagtttgtttggagttatttttagttattttttttattttactgaaacatgatatttttataattttaaatacagtatttttgtaaaattagtattaaaaaatataaaaaaaattccctattacaatctttttgtactttttaagtttccctcaaatattttcggaattagtttgaaaaaaatcacaaaaaaacatttgaaaagcccacgaataagaagaagagggcgaatgtcgaataaagcccaaaaaggtttcggatctgattttactcatgcgattagggttagcaaacaaaagataaaacgacgacgctttgttcaggggagtttctcatagaaaaaccctagttctaaaagcctcccacctctcatcttcattcccttcagtttggtagttggagccttttgccgctagcttcgtccgactattttcagtatcggtttcatctctttcgttttgattcgaaacaatggtacgcacctcgggcttgttcgatttacccaccgcaccttctcatcttttcttctatctaatggctaacttttttatgtcttttctgctctcaggctccgaagaaggacaaggctcctcccccatcctccaagcccgccaagtccggtggtggcaagcagaagaaaaaggtcatcttcttaattctacgagttttcctttttcttagataaatatacaattctaactagttcaacgatgtatttcttttccaaataattcagaagtggagcaagggaaagcaaaaggagaaggttaacaacatggtgctgttcgaccaggctacctacgacaagctcctttctgaggctccaaaatacaagctcatcaccccatctatcctttccgatcgtttgagggtacttgtttatctatcaattttaaaatctgtttcattccaatggttttgtttgtttctttatcatcaatttcacagttttcaaatcttctgcgctctaaatcgttttgcaaaagattactttctaaaggatgaatccgaagcagtccctgattcccaaactagatgctatatattactaaactattaagtttacagttcgttgtttagcttataaatgcttcaaaatcactatatgttacatgtaacagttctggttaaagtattccctaaacctgctggtctctagttcttgtttttctttgggtctgttaataattctactttacttagttttttcccattaggtctagtgttaaggaattacacctacattattgaaattctgttaaaaaagatgtttttcaatgttgtgataatttttcttttacctcaagtttcatatgggttttgtttggtgttatagattaatggatcactagcaaggaaggctataaaggatttgatggcgagaggtttgatcaggatggtgtctgctcatgcaagccagcagatttacacaagagcaacaaacacctaagatttcttatttgtcccaacctatttagtttaaatcatcatgtgtttgcccagtttgaatgttactatactttttgttatgtggagttgtttcactttagaatgagtagagctctatttcagaaaacccgttgtctttattgatttgaaaattaatattggactaatttgaagtgttgttttttgagctgttaatgacttttgttagtagagaaagttttgttgcttctcaaggagaatgacaactttatcgtttgtcaacttttacgagttgaattttttttttggctgcgtcaatatatgaatgaaattttttactcttattctataatatgaagatttgtgaatcttgggtatgttttttcagaagtggtaaaagaaaccatttggcatatgttttgggtgaaacatgccattactcctttagaaaatactcatcctagcttttcactcttaacattaattcgtttgtattaggcctatcaatgcttctcattcgatctgaacttatattcttgcagctcgtttgtttttaggtgtatctaaactattattatcttttgctggtcgtttattggttccctgattgttttgctggtcgtaaatgtgggctggcctatacttttcaacattcagaaaaaatgtatgactaatatatgacatttacgttacataacccaatcaattcattaaaatcatatataaaagagatgtaagatcacttttgggaaggagctttgtcccacaattggcaagcgtgtgagaaatctttaatggtttctctttcaaatgttgcttccggggactatctaactctaagttatcaccaacacttgtaagcgaataaaagtttctttttgtaacaaataacagagcaatgatacagtacttaactgacataaattcgcacatatatgaccacaaataaatgtataaacacatgtgactcagcaaagtgagtgtcccatataatctccagttcctaaaaaggaaaatattcctgagatcctattttcctcaaaaacatagaaaaaggaattatcagtttcgaagcatatgaaattttaaatgcgcctctccggctcctaaaactctaaaatcactttgtttgagtaagcagtaaattttagcttttagttctaaaaaattcttataatagaaactagctttaataacttgc

SEQ ID NO: 184894 - DNA, 6300 bp, Cannabis indica
ctctcatcatcttcatctgtattctggttttatatatatatatatataattttttgtttatgtgattagagagccatgtcggatcggttgacgcgtatagctatagtaagctcggacagatgcaaacccaaaaagtgtcgtcaggaatgcaagaaaagttgtcccgtcgtcaagactggtaatttaatttatttcaattgaattgtgtctttgtgtgttcgatgatgattttgataatatggcccaaaatcagtaatcaataatcaataaatatatgtatgcaggcaaattgtgtattgaggttacaaccgcatccaaaattgctttcatatctgaagagctttgcattggttgtggtatatgtgttaaggtctgtgtgtatactattttacttactgttctttctatcttatcgttttttttattctctaaagatttgagatgtgatattatgctatttgtttcaattcagaaatgcccatttgaagcaattcagattattaacttgcccaaggatttggacaaagatacaacccatcgttatggccctaatacatttaaactccacaggttttttcttttagcaaatcaattttattttttcttcattaatttatgtgcattaagattctaaatgatactcgttgtgtttaatttacaggttaccagttccaaggccaggtcaagttctaggtttggttggaactaatggcattggcaagtctactgctcttaaagttttggctggaaaactcaaaccgaatttggggcgtttcactgtaatattttctatcactatatgaactcttagttttgcatatgctttttcctttctaactgtatgttggattttgttcttcgttccagaatcctccggattggcaggaaatcttgacctactttcgaggttctgagctgcaaaattattttactcgtatactggaagataatttgaaggtattttgaactttatgtgtagtttgtttatgctcgggtagtgaattatcatctcggttttcttttctccataatctgaaggtgtcatgttagctaacttcaaattcttggttctaaaagcatgatttctgtgcatgtttgctttcaacctttgtaggctattataaagcctcagtatgttgatcacattcccaaagctgttcaaggaaacgtaggtcaagtgcttgatcaaaaagatgagagagacaggaaggccgaactctgcaaagatcttgatctaaaccaggttatagaccgtaatgttggagatctatctggtggagagcttcagagatttgctattgctgttgttgccatacaaagggccgagatatatatgttcgacgaaccttccagttatcttgatgtgaaacaaagactcaaagcagctcaagttatccgatccttgctcagggccgacaggttttatttctttcttgctgtaaaatatttctcgaagtccaagtatttttcaatgctttaaactcttttttttctttttccagctatgtaattgttgtggagcacgacctgagcgtcttagattacttgtcagacttcatttgctgtttatacgggaaaccgggtgcatatggagttgttactcttcccttctcagtcagagaaggaatcaacattttcttggctggatttgtgcctacagaaaatcttcgtttccgagatgagtctctgacattcaaggtatagatttataagccgtgtcttgtgtggatgtgtacttttctgaatcagtttaaattgaaaacttcgtttccttttctaggttgctgagactccacaggagagtgctgaagaaattgaaacatatgcacgatacaaatacccaaccatgactaaaactcagggcaatttcagacttcatgtaatggagggtgaatttactgattctcagattgttgtgatgttgggagagaatggtacaggaaagacaacatttattcgtatgctggtattctttctttttcttattgcttgcttgtgttcattggagatgtttttaagctttcaaataaatattttctgtttcattatttcaaattgtgatacactgtttcaatctgcaggctggtttgttgaagcctgatgttattggagatactgatgtggagatacctgagtttaatgtttcttacaagccccagaaaatcagtccgaagtttcagtctactgtcaggcacctgctacatcaaaagatacgtgattcgtacactcatccccaatttatgtcagatgtgatgaaacctcttcttatagaacaattgatggatcaagaagttgtaaatctttctggaggagagcttcagagagttgcactttgtctatgccttggaaaggtaattgttgaaattccattatattaccatgatgctaggtgtattataatttataatttttgcacactctatttcatctcacaagtacagtgaagtagcttagggtcaattttaggactgcagccctaaccaaatccatcaattctttgaagaaaatgtatcttgtagttaattatggtgtggctagcctgaggaattagtttgtgttctgtttgataaactaatgccttagaattttcagagtttgaattttaaacccattaagagcatgttgtcacatttggaatcatctataaagtatacatctaaaacctgcgagagtagaaacataacctcggcatgttaatgatcttggaagccttcatttgttgcttcaatatgtgtcattcttcatttatgctttttcatcttgaagtatagtaagtttatttttgtgctcattagcacactaatgggaaaatagtcatgaatcgtttcgaagggtttataatgcttttgacattatctaatgcaagtttttcttggattgatgcagccagctgacatttatctaatcgatgaacccagtgcttatcttgattctgagcagcgtattgttgcttcaaaggtcataaagaggtttatcctccatgcgaagaaaactgcttttgtggttgagcatgatttcattatggcaacttatctggcagatagagtcattgtgtacgaggggaatccttcgattgactgtactgctaatgctccccaatcattgttgactgggatgaatctattcttatctgtaagatttcttttccaactttatttctttgattcctctctttttgggaaggatcgaacttattgctaaagttgtatgtttgattcttgtagcatctggatatcacatttagacgcgacccaaccaatttccgcccaagaatcaacaagctggactcaactaaggatagagagcagaagcatgccgggtcctactattacttggatgactagaagatactcttgggacgggtgtgtataattaattattcacttatcatttttcctctaagaatatttaagggccatctccttgtttggtgacttgttttggggtgggagtggttctgcagttgctttgcttattcaacaagatagtgatattatgagcctgatcgtgtgggatcttatccatcgtgttccgatcaaatacgtttgacaattgaggagaaagaccctgatgaagttgtttctgttttgctctcgaaatgagcatgtgtggacgcctcgcaatttagttataagtttcggctgcaagtacttgcttgcttgcttgcacttctccagttttgatatgacaataggcgaatcaattgttttatacttcaatttgctttaccatcgagcctccttgaatagaggaacaacatgaactcagagcttccattttcatttcaattttactgtaattttagggttaatttttattgggtagttgacttgttttgcagatattactcttaaatttttatataaattattggttaattttgtcaataattgtgaaagaaacccctagtgatgttttgaatgatttacattgtagcccacaagataagaaaggctagatataataaatcaaacatgtaagtaaatctttccatatgaatattaagtttcaacaaatgtatctttgtatgtgtttttcaatcttcacccccaaatgagtaaaacccactcttcgtaatgaacaagtttagctaaacactagaaaatggtcctatttgacatctctatacaatgctaacaatcatcagaaaactgacccattaagcatattggccttgtatattttattggagtaaaaacaaaatagcgttacaacaaaaagagtggcctcatcaaataagtttagttagtttgtgaaataaagggtaggaataatgggggaactctgctgttttacatgtacaaacacaccctctgatttggactttgagagcaactaaagtctattataaccaaccaaccaaaaaccttgtgctcatattttctgtgctattattaattataaatatcaaaaactaaagaatgggaatgggaatgagtctaagtgaggttaggtaggtggatgatcatcctgaggtgtttgaggtggaattggcttccatccaggctttccatcccaataaatgtcataatatatgtgacctggtgtatgatccatcacacaacaccatatcccaacatatctcttcacacgtcttctgaatttctcttccctcgtctgatctgtaaaaccagcgaacgcatcttgcattgtcgaaaattgaataactttcacatccttgaatagcgataatgccgtctgcagctgtatttataccatataatgagtagtgagaacatgaaaattcaagttttaggtgtattgaattaagaatgtagtaccgtttcttcgttggttcgttttggaagtttgagtacacccggtcggcttgtttgattcaatgcacaaccttgacttccttcttcacaaagttgaacatcaagccatgaatcttttacctataaaaatgtttaagttcaaatcaaaatggtcatactaggagaaagaaacaacatgaaggtattcaattcacaatgaccaatgaccaacctgtttaggcaatgatgggttctcaaagaaagagtactctctaatgtctatcccgggaccgaattcctctggtagttctttgagcattacatttatcttcaaaaaaacacaagcaagcaaaggaaatacatgaaagcttcgaaaacacaagcaagaagttgagtgtttgtttattatcaccatacctcaaagacatggtctagaggacaaataaaaggttgcctagtcatggagccctccaaaactccagggtgtgaaaaccaaagcctatccagcctgcaccataatggaggcatcacctgaaaaaacatcaacagaaacatcataatcttactcttcacagttttgaaatataagaaccgcacaaatatgaaaatctcggttttatcataatgcagaaacatgaagatcatatgctatagctacattatgatgcatgtaaactaatcaatattgtgcttcactttgagatggataggaactacagttatttggaaattggcttaagttgaatcagaaactcaatggaagcaaagaaagaaactagactcaaactctacatgggtgaatatgaactaaccaatattgtgcttaacaataaaatagatgaaaaaacaagacctttcaaaagtagacgagctaagtgagaaacttgattcaaacgagaatgaatttggactagaacatatcagtaaagtgtactcaccagtgtgcgattcaaaagagaagcaattgcaagagctgtccttatttgtttcatctgaattgtttattccatgcatattgaaaaatgttattcatgtatacaacaaattgcagaggttagtgggagcaatttaggagatgcatacttggtaattaacaagagtgaagtgtgattcaatagtatgctccccatcaagcaataagctcttaggaatagatggcttaaatgacaagaaacctcctgcataaatcgaaaaccagtcaatcagcagaatgtttctttgtatctttaatttcaaaacttaaatatctaatcatatgtattaacatatatgaccccaacaagtatatagcttattacttctaaaagggttgcatatgatgataaaatgaactagaaagcttgaattatacatcctaaactatacagaagacagatatttgatgcaagtgtaggagagttgcacctggtgtatcaaaatattcaggcggatcatagaagaccatgccttcacgtagtctatgacgctttccatctgtgcccgcatactgaaatgttgtatgcacagcatagggctccaatctgagttgctgatacatagcctg

SEQ ID NO: 184895 - DNA, 2525 bp, Cannabis indica
aataatataaaaaatcgcaaaccaattataagatgtcatattaatgtaaatgttgggcaccttaattctatgccacttatagtatccacacataacattcttctttcacatacaagatccctcataaattacaactactacatttcttttgttctactcactccgtctaagactaaccaaattagaattatttggaggaatactttgttgattagagaaaacattgtaaggatctatcaaagttttggctcgaaccaacctatcaaagttatttagaaaatatttttctccccaagccctagcaatctccacagggtcaaacaactgatcatcatcatcatcatcatgatcctttgtaaccatcacaccaagatcaaaatctatatagtttatataagctgctctaggaccccatgaaacatatggagccattgcactataaaatgctcttaaccattttatgtaatcttctcttttctcattattctcttgttggctccattctaccatgtattgaattgtatacaagttaccttttctatgtgggaaagcaatagattcagtgcttatacgatccatgtttccaccataaggatctaaaatcacataccctttaggctccttctcaagatggttaagggctacccatatgccatcatgagaaattggggtatgaacatagtccgatttagctttaaaacatgccttattttgcaagtaacgatcttgcaagttgtgtaccgagcttcctggagacaaatcggagaagaacacgatggattgaatccaactcatttcagagcagtcttgttctacaatacctagttctgggaacacctgatgaatgaagaattgtgcttgattcttaggaccgagataaaagcctttaaatgtaactgaaattccaacatgagttgtggtttcgggtaaccctgcaccaacaaaacatgacaagtaaaaatcatctcttaagttgggagcaacaagttgccactttgctattaggtttgctatttgggtttttgtgccttgtctagacacaataaaggttgtgacaatgggtggaactttcaataaattgattttccaagcataaacaaccccccaaacaccaccacctccacctctaatggcccaaaacacatcttctcccatgctttccctatctaacaactttccattagcgtcaacaagcagagcatccaacacattatcagccgcaactccatattttcgggaaagtaacccaaagccaccgcccgaaatatgtccacctattccaacagttggacatgatccagctgagaaaccataataattagtggcattagcaatagcatagtaagtctcacccagtgttgcacctccttccacccaggctgacttgtcctctaagtcaaccgtcactcggttaagattcattagatccatgatcacaaacggggcaggagtgtttgcagtgctgacagtgtctatagttgaggaagtaccctcatagctgtgtccccccgacctaattatgattttgcaagaggcattcctagcacataagacaacactttttatttggtctacattttgaggcaatattatagcaataggcttaggaaaattgggatcagcaaaacgaagattttgcatagagaaattgagcaacttgtaatagtatttggattcgttgctatgtaatgtggtaaagttgttgatgttatgttgtgtgagacatgaagtgatttggtattggaattggccttcttcttctaaagatggcacaattaataaaacaataataataaggaagtacactagggaactcatcatagctttgtaattagtgtacattaatgccattagtactacttatataattattattattattaaggaaactagctagatatagaagagatgacctatgaggatattgttgaagaaggataattaaattacattatttcaagtttaaagataattagataaatgaaaagaaaatggagaataatgtgatgatttattaaggacaagaagaaggtgatggtaatatatgtggccggcaattgtttaattaattaagaaagttttaacaaggtggaactaatacataattacatatttaattatgagatgatggtatatataacccacttcatatatatatttataagctaaagcaaacaaaactataacttgcatacaaactaagacaaagacatgaataatttttcataaaatatagggtgtttttacaatgcaacctcttgaaaggaatttattaatgtacttcctatttcttttggcatttgagagaattttttagttaattttttttacattgtatttatttaagatatcttacaaaattttaagaaatttgaaaaaatctattatgtcaaaaatagggttcaaacagtctgttgcacgcgaaactcttttattttatatgcgtgtgaaatagatagtttgaatcctattttcgacgtgttaaatatttttgaatttctcaaaattttgtaggatgtcctaaa

SEQ ID NO: 184896 - DNA, 1979 bp, Cannabis indica
acttgctgcatacttttctttatttttctttcttcgtccaaataaaatgaactttgtttttcaataataataattaaaatgaactttgttgactgattaaggttgttattgtaagcaaggtttgtagattaaaactttaattacaaaaattgtcaaatcatattaagcaattttaatacttttctttatcacctatcgccattactttaatattattttttttatggtacatacaactaaattttttttttttggaaattaataatacaacaagtttgaagtctcaataaaataattcataacaaaatttttagttagaggcatgcctctataacttcatttcttttaggagtattttggttttatatgccggtgtatattatatttataataaatttaagatgctaaaaataaaatttaagtagtgaatagaatgttatttcttttaatataattcattattaagattaaataataaaatgtgagaaattactaatttcgttaaaattgtaacatgctttatagattacaaaatttgtgcataattatcacaaaataagagttacacatccatcaatttgatgacacatgaatatgtaactctcatctcttttatcactattaactttgtaaaagatgttactaattgagtttggatgtgaatgaatgataactattgaaaatttaattattggagacttgatgttatcaattatatggtgtataaatggttcgaaataaatgggagttgtttggagcattttggagaagaattgacaaaaacttaaaaaattggcaactaataaccaattactagtttttcaacatatcattgtgtgcatttttggacgttggaagcatttctaacaactcaaaaaattccaaatcacccaaataatatcatgaacgcccacttaatgattagtaacaaccaagaaatttatagtgatcattcatgttcatatgggaacgaaaactctataaataatattatttctcacaaatcgaggatcttagtgaggaaagaattatagttaccttacggggatgcataaacaagagaatcctctatcatatcgagctcacttatgagacactttgttggaattacttgttgtggttagaactttgtgatgatatgataatccttagacactagactgagcgtatgaggcttgaaaaatctttagaagttgttatccatgttttcgggaacatgacacatacactttttagcattctaagttagtttgcaagcccattcaataagcccaaataaatcaatggttcgatccattaacaaagtcatactagtatctgtactcaaccacaactctgtcacggataaagccaaacagatagatttggaaggatgatagttaatcaaattacagagtgtccatggaaatatagacggatgcgctctagtagtcatcttggaagagtcgtccaaagggtgtcatggagcgtcgactgtgcaagatcaatctgacgtgacacacctctaacaccaaatcccaaagaattagaggcatgtcccctatgtcaggccttggagaggaacacaacaagaaaagggattgtcatttttgtcgagctcccactatgctgacacgcatgcctcacgaacgatggcacatgcctagatgccaacatcaaatggcacagttttgtacagacaacagttacactctaaatttggcttcacctacaaggtctaatagtcaatattcaactgtatttaccccataagtgggccatttgtccttttaccaaaccaactaggtccggattagactgagaacccaattccttgttgttgattgtgaatttagtcaactgacacggagtctgactatgattatatttttcttatgattgccatgtgcagaatgataattaatgtaaaagacacaagaatttatagtggttcgaccactttgattaggtaataatctactccccttttgttgtattta

SEQ ID NO: 184897 - DNA, 4950 bp, Cannabis indica
atatggagaatttgaatgatttatatttgggtagcgatgatttgtcatgtgatcttcaagttgactcaggggcattggcatgtgtagcttgtggtatccttggttttccatttatgtctgtggtacaaccatccgaaaaggcctcactagaacttcttcatgataatcatcttctgtttcaagaatgccctggaggatatttgaactgtttttcctctctggacctcgatgtctctaataatgcttctattacaggtactggttacttcactggtcttgtatattgtccttgattttttttttttctatcagcattcttttgtatggaaaagattagtagtatatatgtttattttttcggctcattgataacaaccacaacagacatattacggaataatgagatttacatgagtagtgttgatgtagttgcaagtggatagctacaattttgaatgtctaagtgtccacatagttatcaatataataagacattggctgcccatttggctttgttaaggaattctatgtgattccgttctctgatctatatagggaacagcaatattttatgtaaaaaaaattagccctgtttgaatttgttttctgcgggttttttctaacccactttttttttatccatcaatctaatacaagcttgggttttgtttcaccaggaaaaagaaaaagttagtggagtgaaaataaatccattttcatttcatcctttgtttggttgttacataaaacatgagtcagtcatttttatatttctcattgtatacttggttatttttttattaccttttttttctcattcaatttaatttcattttactcctattcatattcccattttcatttttctgttttcattatttccaaccaaacctacccttaattgtgaatgttttaccgtcgatatagtagtttaagtgaatcactgtttttttttttttttattcttttttaatgtttttgtttaaacacaagacaagtttgcttgcattggaaacatttcattggatcttttaaacaccaaactatatgcaattcctcttttgttctgtagagaatgtttctacggtttccaatcctccttcaatggatcttccagtaccttcagttaacaagtttgacggtggtcaaaatgcttacaataaatttctgagaccacgtagcttctgcctggaacatgctgttgaaattatagacattttgcagggtaaaggtggagcagaggtgctcgtaatttgtcattctggtaagattgtcctgctacttcattgtcatttgtacttgcatattccattttcttgagttggttagtttctcttataaaaggtgcctgatggctcataaaatttaatgtcatctttgaaaattgcaccggtaattggtaaatgatatgtttcataattttttttaactcgtagttgattatttttttatttttattttgggatgagtttgtgcagactatcagaagataaaggcacatgctgctgccattgcagaggaaattggtagcccttttaattataaagaggttcctttagatattgcatcgaaagatgatctgaacttgatagatattgctattgatgacgaacacgatgaatgtggtaaagactggacatcaaaattggggatcaacttgcagcactgtatcaaggtcagaagaaactcctcctctaagcaagttcgacatgctcttacattgggtgggttgttctctgataaaccgtcctctcaagatttctcgcctctcaagtggcagttgagaagatctcgttcaaaaaaaatttatgttaaaccatttgatagtgctcaagtgaagaaagtagtgggtgaaacatcttccaccattgagaaggaaaaaaaactgattcagtattcaagaaggaagttcaatagaaaaccaggtggtttaacaggagcaggtaaattttgtggacaagatgctaaagggggagatcttgatgaacttgccaaaagagcatctgaaactggtaatgatgttgggaattccacaagctgtaaattctcagctttaattaagatatcggaaacacacaatgaaaaccagacatctgaagcaacttggaacaatagcatgaaagctagctgtggaagtgttgagaatcaagttttgaaggaaatgaatttggatagtcaagcttgtcttgtagcaagttctgatgcttctaagatgcaagatgagagcagtgttccaacccaaaaagtcagcataaccgataagcttgttgaaaaactagaggcttgtccattttcccatgatactaaggaaagctccggacttctaggagatcagcttaaagtaggacaatctaacaaaactgatggggctaatgttgattctgaagggcactccaatgtcaaggctggcaaggagggtgttttgactgatttgaattctgatctttctaacatgacaaactcacatgctattgaatcccaggatgacaacttgatgggacaaataaaaaatgctgtagtggagaatgtttccatgactgttgaagtttgtgattctgtttctgtggataaagaagtgacgctagtagtgcatgctaccagaattgatgacggggaaccagtttcttgcaactctacagtcataatagataatattggtacttcaaaggaagaatgctttaattgttcaggagagatctgttctgtagaagaccccagcagcaatggtaaagctcttaaagttgaatcagaagaagaaattaaaactagaataaacaaataccctcttgcctcagttgaagaaacttctaaagctcggagcgagactcattctacaaaggattttagtgagaccattcctgtcttaatcgaagaaacttctgaatttttaagtgatccttcttctgcagctaaattatgctgtgctgtggcttcggaacagattctaaagcaaaaagttgggacttcagatgggagtagtgaggaacttgcttctagttctgtgacacaaatggaagtccaccaccgtcattgtgtttcaatagaggaacattctgatgttctcagggaaagctcagtggaagacgacttgggaacggatgtgacttcagataatggatttcataaggaagcctcgatgaaaaatggagagcagagatcagtttctcctgttacacaaacagttgatcagcctacacccataagtgttggagaatctgaaactccatggaatccttccaaagaacatcccggtgatggcttgactttagatgataaaaagaggaaaagtgagaccactgctttgccaaatagcatttccttccaaaaatgttcaagggttagaagagagactcatactaatgaagacttgtgcaacggtagtgaagtttgttcgtcgcaggatgatagagcattggatagcgagtctaaagatatagacacttgttcaaacccagtaaaaggaagaaagaggaagaaagagatagaactactaacagaaaaccagttcagttgcaatggctttacgaggagtccatgtgaagggttaagaccaaggactttgaaggatgcaacaagttgtgaaactgatacccttagagaagtcgagagaaagcctgcagtgaaggtaaagaaaacttcaaatgttagaggtcctcctaaggataagaaagaaaattcaaggaagcctcacaaatgtgacttagaaagctgtcgcatgagttttgacactaaggcagagctaatgttgcacaaacgtaaccgctgcccacatgaagggtgtggaaagaggtttagctctcataagtatgcgatgattcaccaccgtgttcatgatgaccagaggcccctcaagtgcccctgggaaggttgttcaatgtctttcaagtgggcatgggcaaggactgagcatatacgcgtgcacaccggagagcgaccataccagtgcaagattgatggatgtggcctctctttcaggtttgtatcagatttcagccggcatagacggaaaacaggacattatgtgaactagccagcctttctgggggtgactgggaggccctagattcgcacatcatttggtctacttttccaattcttgttgatgagaattaggttagggacatttcttttagcagttctcattcactgatacttgaatggcccttttttggtgggttccccttgttagcttttcatttgagcattctgaaatcgtataatcttctggcatagccacaacggtttgtataagtcgaggcttgaaaggaagtctgagagttgtggctcctgaattcttggctggatgtctagatgtagataatgatgctcctagtttctgtaaatcatttcttttttcaagtaaaatttctacaaaattctattgtgagattggattaatatttatttttctcattattttgaaacaaaattcgtacaaacaacaaaacaaccaaaagtgtaaccaaagcttacacaaatctttgtcttaaacaagtagcggagttgatgcatagattcaagtggtggcagagctgtgcagtgggcatggatggcggagaagcacgatcgaagagaaatggtgtagccaggttagggccatcagagggaatgcggcttgccaccagaactggtggagttcctcgatagagctgggttgatgaataatagcaaggagtaagaaaaagagagaaaggggttttgagttcttttattttatttccatttttcagttataaactttttattactttttccatatgaaagtataattgatgtggcaatgacattttttgaagctttgagaccagataaagttctttttattttttaaaactaataaaatgaactaacttggaaacccaaccggttttaaaagtactttttagagcgttagaaacactataatttttaagagactgtttggctatgtttttagttttttattttttt

SEQ ID NO: 184898 - DNA, 2254 bp, Cannabis indica
atttgtaactaaaagtataaaaaaattgtgactataaattaccataattcctattttgtgattaaaaagtccacggctaaaggtgtaaattagtaatgttacaatttgttgtgattaaatgtatttttaatcataatatttattgtgacttaaactaaattagtgacaacttgtatctaaaaactatatttttgtcaagtatctttttattgtgagtataagtcatatttaatcacaaaaaatttatattgtgactaaaaagttgtcagtaaaagtaacatttttttgtactatcattttcaattgctttaacacttttcaacttggaacaactcagaatatatttttccctctaacaacaccttgccaagcatctttaaccatattttcataatcattatagtcttgccacatcttaaaataactaaaaggcttatttcctacatcatttctacaatgtataaaaattaacttttgtaaactcctcttctcatcttctatggtcgaaattagtgaggagtaatataagtattctcaagcacaattttatcctgtggttggcaagacaatacaaattgaaaatttgtgataggctacttgcataggattgggattgcaacatgcccaaaatgcttgatttgaggtcttgacatagaggaagtgaaacatcttttttctcttgcatttatagtcaaacatgtatatatgttcctaaaaggagctacttattatatataaattaataattaattttgaaaatacatttatattgcataatttaattaattaaattaatttatttcttctaattttttatataattaatcataatatttgactaagattttttataactagtatcttttgatatcttttaaaaaattgtctctctcagtctgttagaatctagcctacaatcttatatcctgtgttgatcctcttcgggcttacatgtggttctggtcggatttcttatttggtatgttgggggtgagtagatggttcacaacaatctcgattctctctttattctcctagtctatctctatttttccagtagtcgttgtgtgtttttcaacctcatgggctatggggtggtggtgatcgatccagatctagtaaaggaggaggtttggccattttgggttgggctggctcttgattcttgcaagtaaggagtttgtgttttgttttcgaggcatgggaggagtgtgaggctgtgcatgggcttgggttcataccaagtgtctttttgtcgcttgttagatttggtgtgtgggggcttcagtgtatggtgggatccttaggagtttgaacttgggtagtagattgttatcattggtttgctcttttggttttctttttttagatttcatattgttatttcttgtttgttttatttttataataatggtatgttttcactgccctacaagagtagtagggatgatattggtctggagtaagatgcaagtgttgtctcctattagtttatgggtgtctcatcatcattgatgattccaaatcattttagcaaggacataccttggtctctctcatgggttgtcagatctgggggatctccatatctatattgaccatctgttatgtactccaatctttaattattaagcatcacaacatagttggtcttattatttaagatttaaaaaatttggttgttatgtctcaatttttattagaagataattggctgatagtcattgataagtagattctgtcacatacttcacacatctttgatgttcgaatgttggtggcttattaattggtttcctagttgaggttgttactagggttttcttccatgatattggaaacaatttggtatgcttattttttgtattttttctctatgagctatattttcatgtaattgaatttgttcgatttaccttttaatggatatttccatttttctcaaacaaaaattgataactaaattaaaatgttattataaagattaaagagaataaattagaaaaaaaaaacaatttaatgttgtaggggctatacaatatattttgtcacaaatcattgtgttagggtattatgagctatagcaatggagtccaaggattttgaaataaatttttctcaatgaaaaatgtttggatccctttacaatgaagaaatgactctatttataggaagagctgtaacgggttggagtagcaaatttcaacaaatatatgtatcattttctcactaataggttgttagattttttttt

SEQ ID NO: 184899 - DNA, 2530 bp, Cannabis indica
gtcttctcccttggtgaacaaccttattatatcacttctctaatgccttattaagtgctataagagacccttctatataaatttatcaatactttttatattatggataataacatgttgtccattctatatcacttaaaaacagcataatagattaatagtttctctgctcatataactcataatgaagtctacactaaaggcaattcatgttattagtgaaatatagttgatgaatttactattcttttcatgtttgtgtattcattgctaatatcataatactaatattctaggtgtgttgtatccaatttttaaaatattgaaacaaataaatatcatcaaaaaacacaataaagactggttaagtatattatatgaaagatctaaaagacctaatacaaattctagctgaaaatcaaagttaatacaagttatttcacaacaacaacaaatgaagatatggaaagaaattcaatcattacgaaagcacgccaaaagtaaacagttgagtccatgattatactccgcgatcttcgctagttcttcttgtgttacttcaaccttttgattactcgttgatttggggctaaataaaacatcaagggaaaataaaagtacaaaaatgcatataaataaagaaaaaatttagaacatatgaaatattgaagaaattattacctcattataactttatcagctggccatgcaattgtattgccaatagcttcttcgatacaagttatggctggagtaggcctccacaaaaatgcaccaggttgtcttaccacatctattcctattttcatagcattaggtccgagaggaatctgatggacgagatcctttggatcacttgagatgaagtgcccatctgcaatagtttcaccagatccacaccaatccaaaatcttgcatctatcgccatgcgtgttaaccttttcgctcttcaataacatttcaacacaagattaattgatttagaaataagatatagtttcacatataaatgacatgttaccttatcagcaggaacatgattatttgattgctccacagtctgttaagaatgattctattaatatcatcaattaatcgttagaaacaatgaaagcaatccagtctttaagaatgtcacttacctgatttttcattaaagaatgaattagttgatccatatgtgacattcgttcttttaactctttgtatcgatcttctaactgaattatatactccatatgtatcattttttcattagtcacacgaccatctttcatcgatccaattgttaactttgtttgagcaactcttcttccataagctctcacacaactgctcttttcgggaccaagcacctttgaaagaatatcctcattgacatttgtagtcgaagaagacacagttgtatattttttatgttcttccacaaactcctaaaaaaaataaaggtgcaacttaatttatacctatggaaatttaaaatccaaataaaaaggacaattacaaaagttttagcagcatctgaatttacagattctccagttttcttcttatgtgccttcgtccaaacatcaaccctggaaggaacttctttgcttgcactatcgtttgtctatcaagggtgaaaagaatataaacaagaatggaactaacatatttaatgaaaaataattgcagaataaaattgattgtaccaattcatcaatcaatcgtgcatatcatttacggctacaagtgtgaagaacttgattcttcagtctctctctgattttttcagttttagcctataacaataaatgattaatcatgtgatgatataaaccaaaaaaaaattagaaagtaaagttagcattaattacccaaaatccagaactggttttctccctagcaaaagtcttccattcatcttcagacttgatgttcttaggtcgcaaatttaatctcacttcttcatttggtgcctcttgaagtttagtaaccaatcttgattttgaagctctccaaagatctgccatacttctcattatataacgtttttgccaatgtttgctgatcttatatcttgcctggttaaaatgaaattatgcaaagctaatactgcataagtaaatttaatcaacttcgtggtcaaaaaataaattacaaacaatatcaaattacataccgtaacatagttccataaaatatctttcaattctttagcaacctttctccaatcacgtatggttactggtacaaattctcttaccaatggtcctaagaatgaacaaagatactgatgctacaccaattggttgaccccgtgaattaaacttcacttcgaaacgattgtcaatgtctattgctaaagtcttcaatttagttggtcctcttgtattcctttctgtagattctttaataggggtcacaacttctttaggttcttctttgcccaccaccaagttaccatcacctattgttatgttttcaagattctctacttccaatgactgtgatcgatgtgattttctttttgatattgcagggttag

SEQ ID NO: 184900 - DNA, 3905 bp, Cannabis indica
aagttggagaggaagggagataagggcaaaattggtatagtggctaaaaaaaaaggtagaaaatgaaagatatagaaagagagggtaaaatttaaatactacaagttaaaagagtatacagcctaattttctcggtgaataggagcattatgggccttagaagtagatggacggacatataaggtctgaattgggctcaccctagcccagcccatatagattcgagccataaatcaaaccgaccttaaccaacgaccacaccatcgtggacagcttctaaccaccctctgcttcactttctagttggtccattcccatactaccttccatggccatggccatgctcacgctctagattctgtttcagcttttgggtcatggggttttcaaggtttatcaaaaactttcaatgcccaacaatggggaaattccagaatcaaagcttacccacttgggtacatttacagaaggacattgtcgtcgagcacgaaaattttcaacaatggcgaagacacggttcttccagttttaatcgttggagcagggccagtgggtctcgttctttctatacttttaaccaaattgggtacaaacactctatactcttagctcgatcatgttaaactcttttgcttgcttttgtgttggaagatttctatgatcagatttctcctttatgttgggatttgaatgttgaaattgggtttgatcatatgttaatgtttgtttatcttttaggtgttaaatgtgcggttttggagaaaaggtaagactttttctcaacatccacaggcacacttcatcaacaaccgaaccatggaggttggtttttttaggtggaagatataattcaaatgggttatttggaatttcagggttcatttgaaatttcttgttgttaggtgtttcgtaaattggatggccttgcagagaagattcaaagatcccaaccaccagtggaattatggagaaagttcatatattgtacttcactttctggttcaattcttggctcagttgaccatatgaaacctcaaggtgctgagttgattctataacttttaaatattgacacattaagtgttagttattagatttcagatattggccaacatgacatttattctaaggtcttgatagttgtagcttttaaatatcattgcattcttacagaaaatgtgaacattttaatgatactgaacatgtctgttgtgttttaaacattatcaccagattttgagcgagttattagcccggtatctgttgcacacttctcccagtataaattgtcaaggttactacttaagcagcttgagaatcttcaattccgggttggtggattggaagggttggaaggccttaaccatgggatcattagggaaaggcaaatattgatggggcatgagtgtttagccattgatgctaataatgactatgttactgtaactgcttcttgtgtcaaggatggaaagttagtggaggaagaaatcaagtgtaatatccttgttggtgcagatggtgctggaagtactgtacgtaggcttgtgggaatagatatgaaaggtgaaagagagttgcaaaagcttattagtgtccattttatgagcaaagaccttggacaatacttgcttagtgagagacctggtatgctgtttttcattttcaatactgaagccattggggtccttgttgctcatgatctcaatgaaggtgaatttgttttccaggtaccccatattctaaatggatatattttagaaaagcattcttactataaatttacaaatgttataattatctcatgttcttgcagataccattctatccacctcagcagaactttcaagatttcagtcctaaggtactccttaacattagagatggtttgtctaataaaatattagttgtatgatactctatgaaagttttgcttgaatcaagggtgtttattggattgaagtatgagaaaagggaatggtcatgtcatattatgggcttgaaatgaaacatactttattttgatagttatttttttttaaatcaaattcttctagatgtgtgaggagttaattcttaaattagttggtcgaaagctcagagacctagatgtggttgatataaagccatgggttatgcatgctgaagtggctgagaagtttctaagtcatgacaagaggatattgcttgctggtgatgctgctcatcgtttccctcctgctgggggatttggtaagttgtttggttaaaagttgagtatgaaatcctacttacatagcatggatcaagtattgattttgacattgtagcttagttgctaatgttgtacttaatggaagatcagttaatttattttcgaagccctatcgactatttcattaataacactcagagcccatgatttttttgcaggaatgaacactggaattcaggattctcataatcttgcctggaaaatagcttctgtattaaagggtattgcaccaatttcaatgcttaatacttatgaaacagaacgtaggccggtattggtttatctttttcacttgtattgttcataccttttgatttcctaaatccaatattaaagtttcctacatacattgttatctgttaatgttagattgccattctcaacacgaagcttagcgttcaaaacttcaaagcagccatggcagttcctgctgcacttggtcttgatcctactgttgcaaactcaggtaaaccaaagaaccaatagccttttatatgcagcattgttaataatcattatagctttctctttagaaaactgtatctatctgttttactcttgattgcagtccaccatgttatcaatggagttggtgctgttttgccatctggaatacagagggcaattttggatggaatatttgcaataggccgtgcacagctctcagaatatcttttgaatgaaaagaacccacttggtcattcaaggcttgctaagctaagacaaatatttgatgaaggaaagagccttcaactccagttccctgcagaggatcttggtttcaggtatcatacttaatgactttctatgaaactaaacaactttaacaatatcatccacctatctaccacttataatcatcaactgaacaaacatcttttcaatagtttctcattctagatactgatgtttaggtacgttgaaggagcacttgttcccgacagtgatggcttgccgggtactcccgaagcacctactggacgccggagagattatattccaactgcagatccagggtgcaagctgccccatatgaatgtaagggtgttgtcaaattcctctagtaaggtaagctgcttatttgtttgcttgttatcaattctgtttccataaccacttggcaaagtggctattccaaagcttgattctttaagatatgtcataaaattatataggaaataatttcaacactagatcttatttccggagacaaagttgagtttcttctcattatagcacctactgagtcatcgtaccatcttgctcgtgctacattagaggtggctgaggaattcaaggtgccagtaagagtatgtgtgctctggtctgctgatagtaccgaaggagttgaagtaggaagtaaggcgtttatggcaccttgggagaattacatagatgttctcgagacaaggatatcacctacttcgccttcatggtgggatttatgcaagatgactgactatggagccatccttgttaggcctgatgatcacatctcttggcgtgtgaaatcaggacttgttggggatcctgtaaaggaaatgaaaagggttttttctgctgttcttagtgtcaactgaatttcccaacactcataggcaatatttttgtattgttgactttcgaaaatcaaataaaaatttaatatatattt

SEQ ID NO: 184901 - DNA, 589 bp, Cannabis indica
gtaaaaatatgggtcgggtcgggtcagatctagggtgcgagtctaaagttcgaggttcgggtacaagtctcgggtcctggagccaagtccgattttgagttcaggtctgaggtccgagtttgagttcgagtctaggtctaggggccatggtttaggttaggaccaaggtccgtgatctgggtttgggtctgtggtcaaggtttgggtctaaggtctagagtcctaggtccatggttcgggtttaggtttgggattcgagtctaggtcttaagtctgcggtccaaggtttgggtccaaggacgaggtcagggctagggttgggaccgagtctgggtctagtttcgaagttcgtgctgagatagggtgggggtcgcattcgtgtcgtgatttggtgtggtgtggactattgaatattttttttaataaaaacatctaaaaataaattttaaaaaataatagtcaaacaccattatattttcaaattgagaaaaaattatttctcgttctcaattttaaaaactgaaattacgacataacaacctctaagctttttcatttatggcgtatttggaaaatcgtgatgtaatta

SEQ ID NO: 184902 - DNA, 5852 bp, Cannabis indica
ctttaaactttatttaagtttatcatcctcatcatattaagaaaacattactttaaatagactccatagaatcttattttattcttttcttttacaatagtttaattttccttatctgaatatgtcacgaaagaagaaaagaaaaaaaaaaaaaaacaacgacaatcagttttattccataaaaaataagattgatttttggtgcttccattagaagcaaaccaaagaaaattcattattaagcgaataataatgttctgaagaaaaaaaaaaaaggaaatgggaaagaaaataaaaaacaaaacgatatttttgaaaaaaaagaacgttacaacaaaaagaaaaaaagacttttttaactaatcggatattaaaatcaatttgttataaaaacctttaattaatggaagttgtaattttatacctaaactaaactgaaactcacatatttaactgaatttgacctcatctaatctaaatctaatataagacagcgacttcgtttcgtttcttcaagcgtgttatttacagttaaaataaccttaattactattttttaaaaaattaaaatatttacgtgtgtgcacgcgcgtagggatacaaatcccgaaaatgacaacgtggcctctataaagagtagcgtgcaattcacgtgcgcaggagtcaattaaatttcaacttaatttaatttaccttgaaagaaatcgaaaaacaaaaacaaaattaaaataaaggagagaagagaaagagaggagaatgatgagctggtaaagaatgctcaggcaactaaaacccaccctcgaaagaaaaaaaccaaccttggatccaaaaagttcattttcagttttttttttattattttattttttatattttataattttagtttaattttctaaaattttctcttactttctggcttcccaaccaaaaagctaagcaatgcctctgtatagcttattatatttaacttcctcgtagcagcttcattttcctaccctatctatctcaaacccttactttcccggaaagtgactggagagaacaactgagaaaaggaaagggggaaagagaaagagaaagagaaagagaggcttacctgcattttggtttatctgtcttcttgaggttttaagacaatgggagctcgttgctctaagctctctgtatgctttttcccttgtcaaattaaattcaaatcacatctcaacgacacgtttgatacgggtgagtgtttaaatatttatatatgtattattaaggttgtttttctgtcactttctcgggaaatttctactttttctaattattctgggtgcatttaatgaagattctgctttttgtgtgtgtggatattatagagagtggaagcaagaacgatgacttgttgcctgggttctgcgagtttagcttcgaccagctcagaactgcaacttcgggattttcgtcggaaaacatcgtctccgagcacggagagaaggctcccaatgttgtttacaaaggcaaggttgaggatgacttttttattgctgtgaagcgtttcaataggtcggcttggcccgatgctcgccaatttatggttcgtgttctattaactttgattcttatggagaaagaatgtccgttttttgatgattgtttggctagttttgttgatccatcgtgtttgttttcggtgttttcaggaggaagctagggcggtggggcagctgcgcagtgagcgcttggcaaatttgatcgggtgttgctgtgaaggcgatgagagactccttgttgccgagttcatgcctaatgagactctttctaagcatcttttccattgtaaggtgtctcctccttttgtcttttgtctttttcttcttctttctctccgccttcgagttgatcttgcattcaaatttgatggtgcaaggtatttgttgatgggagaacatatcaaatttaaaaatatagtcgattggtatataatttaagatatttttgctctaatcaaattatgcctgctcccttaggaattttgtataggatctacaaaaagggaaatgaatggctgtttttctctttatttgaaggttttatttatgcatcagaggcatatcattgattttaaagtttatctattttgaattataggggatgctcagcctatgaaatgggcaatgagagtacgggtggctttgtatcttgcacaggccttagaatattgcagcagcaaaggacgagcactatatcatgatcttaatgcttatagagtcttgtttgatcaggtactcttcccattttgattatatcatggtttctctgctcggaattgtgttgtggctatgcttgtctttggtaagctattcctatttctaaaaccctgaacttgacaggattgtaatccaagactctcctgctttggtcttatgaagaatagcagagatggcaagagctatagtaccaaccttgctttcacccctcctgaatacttgaggacaggtagcaatcatactcacggaaaggaatctataaccttataatttaacttaagtttacttatgcggatttctgtggttcgtaattgatattgtacagtttggacaaccagaacaatgactttccaaccacatttataaatttttcacagaatctttcaatatcttgcacagaattgctcaaatgggagtaataattagttattgtttttcccctggcaggaagagtgacttcagaaagtgtggtttacagctttggaactctgctacttgatttgctaagtggaaaacacattccgcccagccatgtaagctttttttactttacaaagctatatttaagaaggatggtgacacattaacatccagataaattttttgacctaccatagcaagttatatcttttaagtgctgctgctattatgtctactacaaagaatttagtgagataaatttctgggaaaaaaaatgtttcctacttggattttggttatgatgcaaattatggtcatatgatcaaaataattttaagctaatgagatatatctaatttcttaatttccttccttacaggcacttgacttaatacgtggtaaaaatatttctatgctgatggattcatgcttagaaggtcacttttcaaatgatgatggaactgaagtagtgcggttagctacacggtgtttgcaatatgagcctcgtgacaggccaaatgccaagtctcttgtggttgctctcactcctcttcaaaaagaaacggaggtatgctcaatttcttttcctgaaagtgatttgcttgctttgtttacaagagaaactctactggtgcaccaagttatgctgtctaattccttttatacatagcaggttctatcacatattttgatgggtattcctcatcgagatgcacctccaaaggagctcccattgtcaccacttggtgaagcttgttcaagattagatcttacagccatacatgaaatattggagaaggttggatacaaagacgatgaaggaattgccaatgaggttagctttgttcagattttactacctgtagaacaatgtatactccaagtgaccagggaaatcttaattataagatccaataaacctgagctgacataatccttaatggcattaaaattagaattgaacatataagtttaaaagtaatcattccattttttaatcagttatatgtgatttcctttgtttttgcagctttcattccaaatgtggacaaatcaaatacaagagacactaaatgctaagaaacgtggagattcagcatttcgatctaaggactatgcgactgcaatagattcttacacaaaggtaagttattgttttggtgtaacaagcattgcgtcccttctcaaatgtggcattggaagattttaagttttatatcattcaagtttcaacagaaaagaaagtataattatactttattttatggaatatttgacaaaactcaccacaacatatacatgcatagaagcattgataccttatgatataaaatgtgggtcccttaaattatggatcactaagggtgaactgttgtgtttttatgcagttcattgatggtgggacaatgatttctccgacggcctttgctaggcgttgcttgtgttacttgatgaatgacatgtcacaagaagctctgggagatgctatgcaagcacaagtaataaatccagaatggccgactgccttctatcttcaggctgcggccttgaagagcctgggaatggaaaatgatgcagaagaaactctaaaggatggtacaggcttggaagccagaagaaatagagactaaaagtgtatagtttttttctttttttcctttcttaaacttgtatgtagcttttgttcattctctccttgaatttggagattcaaatgtaactacggttatgttggccttggtgtagttttcatttgatttaagaagcttctctactttgtcgatgcaatcgtgttatatcttttaatttccacgcgctttgcattctcaaatattgacgttcattagattttcccagaattatcatatgatctaaaacgtagaactttaaaaccgatcaagccttacatctctcgtataatttattttttaaggtcggtgagtattataattcatcatcgaatcaggctaagatccattcacgattttcaacactaaatttaatcattcaagatgagaactgcaataatacaatatcagatcttatacacgagtaatttatagaattgataaatataagaatttgacctaggtttaaggaagttcgaagcactaaatttagcgtagcttcaattccgttttggacccaacataagaatgaattaagggaccctgataatgtagcttaacaaaacttttcaatcaattctaatcaaaataattcaattatattattaaagtaacaaactagaatagaaactgccaccaattcttctcaaatcatctgagcaatgtttatggctaaagtggtgatttatggaaggaaaattcttcataataaatgatatgctgtaaaatggcagcaaaagttaaaaactgccaccagttcttatacattaaaataaataaaccactacagtgagcaatcacaattttcactgtcatcaggcaccaactcaaggcttgtatctacgaataaaaatcagagtagacaagtttttcacattcccggtcgacctgaaccaagcagctggccaactaaattagtcacctgaggaagaaaaaaggattgttctgatcaaaattcattataatttgcccttcattatcctaaaaaaggtcaatcaaagcactaacatgatctaaatagatgaacccagcaaactttaaaagggggcttctcgagaatggtacaaaaaaaacgaaagcagggaacatcaaacatacttggagaaaaaaaaaagttatcacttctaagctttagaaggggaagtccaggaattaggtcaaaagatcttgcagaactcgagagataattataacaacaaaataaaatgaaagaaaataaccaaacaaaacaatgaggtgtatagcaaaggagatgtttcgcaatgactgtttttctaattctgactttcaaatattacagtactaagagcatacacaatacttacatgccaatattttgagacacagcgatcaatgcaactgttttcacccatatttagctctgattccttgtacctaaaaccatgaagaaatgtatcacgaacacctttcagttcaaaatcacagtgtagtgaagaattctttttatgggcttatataaaagaagtattgaaaacaacaacaacaacaataataagtaaaacaaatacgatagaaagtttcacctactttt

SEQ ID NO: 184903 - DNA, 5681 bp, Cannabis indica
aagtttagaatattgttttgtatgtcatggggtttgaaatgcttctcagaagtttttgttttgttttgcagatattgggattgacatggggggtttgggatgcatctatattcagcttgtctccaacaattattcttggtgctgatgtattatatgacactggtggtaggataatttaattttaaatctttccctcaatctttctttcagtgtgaactaaaatgtgttaatctgtggtggtagccttcgatgatctctttgcaaccgtcactttcttgctcgaaagctctcctggagcagtattcataacaacatatcataatagaaggtattttcctatggcacatttttcctatggcacacatttttcatatatatatatatatatatatattttctttgtttaagtagttctcaaattacatgcagtgggcatcatcttattgagttcttgatgataaaatggggattgaagtgcgtcaagcttctagacagcttttcattcatgccatctcaaaaggcatctgggcttagtggcaaccttcaactggcagagattgttctaaacactaaagtgagtgagcttaaagtttagtttttaggatctttatttcatatttatattttgcattgatggttctcctaatagtagatagaaatgtaattagtccatcacacacataaataatattggcatcttctgctcatttaatgaaagagggctctaagtcagtattttcttcttggtgcaagtgagatttttcctttttctcttcattatttagttatttggaaaagcaagtttgacaaaaaaataagaaaaaggaaatggaaatagatatggaaagaagattaagatcattcactgataacatataggaacaggggaaaaaaaaattaacttcaattttcttcatccgtgtaactttttacagtactgattttataaaccttttaattcccgacattggaatatcgatcatcagtacttttatcactaacaaaatagcttccattctctttacccaacagggtgttattcctgttcacataacctattattattatagaaagatccattttatgattacccctgatctcagtaatttaccacaaccatgcaaaagacccttaatttactaccctgcaatctttcctaatttcccgtccaccaccactgatgttactcatcttagtaacagacttcacaaaagccttccagaaggcatgctttgatctggcaaatctgtaaaccagctctttagtcttaggaagttcgagcaaagagtggtctgaagcgaagagggttttcctctgcaagatcagctgatagtaggtgttgtcaaaagtttttgaagaaggatccatggggacaccagcattcttcgccttgttatgaagtggacacttacccttcaactttgatgcaaaagttggatgtaaattagggtcgacatcgtgtgtggcactgaagttgtggattctattttggaacgaggcacagtgggaaaatcctagagtgtgcgctcctgcagatgagttgaaaaagaatcagataagctgattaaagaaagctaatggaaacttaacttctaggctgtggatttggcttacctgaaagagccgctagatcttccaatgaaagacctctttgaccgaagctctgctgcagttgagctaagttgaaggctggagatggcaatgtgctggtatcactagccctcgatactctcccatctttccttccttttggcacataccaatttggacccccagactgcaaagattagatgatgatgatgtgagtaagatcttaaacttaccattcttctttgccgttactgtaaagtatagttgcatgatatcatactaataatactgagtttgttagcttaccaacacaatagcatcccttgctgccatagccaatatatcagcacaagagaccacaccagggcaggccttttccactgctttctttgcattgtcaatgacaaaaaatccatgcagagaaagatttggcgttgcatctttctcagctttgttgttccccttcgagtctaacaacacagaaccatcacaaccctataagaaaaagaacaagtcagaattaggggagagagaactcagtttagatcaatcaaaatgaagggtaaaaactacatttgacagttaatttcctctgcagtattacccttatgaaacaatcatggaaatgcatccggaggagtgtggcagggatagtgttgtctctggaaactgcagccttgacggcgttagtgacaattgaatcaacatttgggcaagttttcgcataataattccagtcgagtgcattgacccctgagaaaaccactgaaaagatgagaagtgaagagaagagtgcaacaccaaaagccatacttggaactctgttactactgtaattgctctctctctctctctctgtttctttttactttgcttatggaaagtcattaggatcaaaagggtatttatactgagaaaaagtgatcatcactggtgattgaaaacaatgaaggtggcccagacgctgaacaattagttaagagagtagtaagaatgaagcaaaaaaaatcctgataattaaaactacatgacaatctgcatcacatcacatcactacatgcaacctctaatattctctaattatttatggtaccatattttttgatcatataaaattagagtaacttagtaaatctgtattttgttggttgtaaattaagaaatatagtgaactaatttagttacatctacaattgttttgttgctagactagtttcttgatgatgaaggtactaataattgagttgctcatgcgttggagacatcatgataaaagtactgaaaaaaaaatgagaaaatattcttggtggtgcatagtattatgatcatatggaatggcttatacttttcactctcttaatcactacacaacaaaagatggatgaaataaataatgaattttctttcttttcatgcaccatcattatttctaatcttctaaaatttttcacttcaacagctattttttgctatgtaatcaatccatgatcagtaaaagctatcaatgattcaatttttctttactttttggccatgtggtcggatagacatagagtgatataattggattttcttatatattttgattatgaaattgaaagacatattagagatattaactcaattagcattttaattcatttagaatggaataatttagtgtaatgatagtttaatgctttctaatgttctatataaagtctttcaaagatgaattttgttgcaattgtccagtcaattaagtgaaatataataaatttaaaatctcacctcctataaactctttatgtattaatattttaatactctcggatagttattattttgtatacatatagcaaatttttggaaatttaaaataatttataatactagttttgttgtttttaatgaatttataatactagtttaaatcctaaaaaaacaaaacatattaaaattttatatgatatcttaaacaactacattattttttattatataaaaacaaatcaaaattagagttaatactattgggtctgcaatgcaccttcttaaaagaatgtactgatatactttttacttattttagtgctcagaaaaaaatttagtctattttttttatattcatgtatgttatagctatttaagatattttataaaattttgagaaattcgaaataatttataatatagaaaataatgttcaaacaatctattttacacgcatataaaataaaatagtcacacgtacaacacactgtttgaatgcaatttttggcgtattaaacttttctgtatttcttaaaattttgaaagatgtcttaaataactataatttacatagccacgagaataaatttgactaaaaaattatttcgaatactaaaacagatagagatgtatcggtgcatcccttttaaaggggtgcattatagaatttttcaatattattttggaccttatatttataaaagttactgattcgactttttattttattaaattataaataaattataaattaaaccttgtattttttaaaatgatacaaaataattctcagagctcaaatttttaataattttgttttaataaagtccaaaataataaaattatttacaaaaacacaataagggcaccgatacatcattcttgggtgcaccctaaaactttcaagataaacctcaattatgagaaatttcaaaagccatatatatgtggcaaatatgagtaattttcttattctctcttaggctttatcgtctagtacaatagtatatcctattaccccaccaaacgagacctaaaagtactgtaaattcaagatcaattgtcaataggcactcttttttttttttggtgtggtacccatataaatctaagctaatgaggagaaaaatgtttaatacacatggatgaacaacaaaacaaatccattatagagacccacagcttcgaaaagaatatgcctgaaaagtagtagttaggattgagccatcaaagtttgttattagtgttgtaaaaagcttattttccaagccttgaaaaaaaaaaagaaactttgttgggtagcaagagaaagtcttaaggccttggaataagccataattagtgaactttaatcccataaccaccatgttccccctactttttgctgtttaattgtgttcattgcatatgtataatcaaatttgttttattcaaatcaattaccaccaaagaaaaaagagcaagaaattacagtgaaattagatcatgattttgtgtcaagattattatgacccctatgatttaaaaggaaaaaatatatataaagcgacccacatttttgagataaagaaaaaagagtgaatattgcaccacttaaccacataattatgtttgatcttaattggactatttcataattatagaagcatttgatagttttttttttaaaaaaacaaaaaatgtgaccgttgaagtggaatctctccatgccattttaattttttaagatgtaaatgaaatggtaaaatatttttgttaattaagaaattaatatcacaaatatatatatcatggtgggagagatggttggagacttagagtggcagtcactcactcacatagagatgtaaccagaatattattagggcaaccaatttaagatgacacactacaattaggttatacctattttatatattaaggtacctttttctaaatatatatatctttatatattaaaagtgcctatctaacagtttttcttggtttaacagaatattctaagaatataaaaatattccgttaaatttaacagagactagagacggttaacattattattatctaaatatattaatattaatgttttaaaaattaaaattaattttaatcgtataaccgggaaagccaaatctaatttctaaatatgaattgctcatcccctaggatgccatatgcaataacatctctagaaatccctatagtatttttaattcgattgaaatcgatctttttccgtcgaagaaaatatgcataattttgttcagggactatcgtacgtttttttttttttttggtttccttctcgtctactctctctctctctctctctctctctc

SEQ ID NO: 184904 - DNA, 2555 bp, Cannabis indica
gtaccaagttattgatacaccagggattttggatcgtccatttgaagaccgcaacattattgagatgtgcagtatcacagctttggcacatttaagggcggcagtgctgttcttcttggatgtctcggggtcttgtggctatactattgctcagcaggctgctctttttcacagtatcaagtctttgtttatgaacaaaccattggtgattgtgtgcaataagactgatttacagccattggacggtatatctgaggaagataagaagttggtcatggagatgaaagctgaggcattgaagactgtgcttggtcaaggaggagaggctgcaaatgatgaaggggtgcttttgaccatgagtactttgactgaggaaggggtgattgctgtgaagaaggcagcttgtaagagattattggatcagagggtggaaataaagatgaaatctaaaaaactaaatgattgcttgaacaggtttcatgttgcattgccaaaacctcgtgaccagaaggaaaggccagcttgtatacctcaggctgttcttgaagccagggctaagcaggcttcagagactgaaaagagaaaaactgaaagggatttggaaaatgaaaatggtggtgcaggtgtgtactctgccagtttgaagaagcactacatcttggctaacgatgaatggaaggaagatatactgccagaaattcttgatgggcacaacgtatatgactacattgatcctgatattttacaaaggcttgaagagttgaaacgagatgaaggacttcgacaggctgaggatgccgatgatgattttgagatggatggacaggaattgaccccagatgaacagaaggcattggctgcaatcaggaaaaagaaaagcttactcatacaacagcatagaattaagaaaagtacagcagaaagcaggccaatcgtgcctaggaaatttgacaaggaaagagagttcacatcagagagaatgggaaggcagctatcgaaattggggattgatccatcactggccattgaacgagttcgaagcaggtctctctctaagagaggtaggaagagggagaggtcagttgatgccactggtggcgaggcaatggatatggatgcagacacacccagcaagaaactacgtgcaaggtctagatctctatcactgtcaagatcaaggtcaaggtcaagggcacccactgaagtcactcctggtgatggatttaaggattctactcaaaagggttctgctcttaagattgctaagaaatccacaaagaagaggaacaagaatgcacgtcgtggagaggcagatagagtgatccctactctgaagccaaagcatttgtactctggaaagcgctcatctggtaaaaccgataggcgttgaagtgtttttgaaggtatcctatatctattttcacttgcgttttatcatttttaggagaaatttgctttgctctttttttttttatttaaacttttttatcatattctagtgtctacatctttttttttatataattcttattgagatgccaaccttctttcctttcgaaggctgcttaccggaccgtggattttgctgcaactttggaagaaaattatctgatttcatgtttgacgccaaaactacagtttgttgtgatcattgcacccgatgtttcataatatccaattttgggcgtgtaatgaattttaagttttgcttttttaatttaatttttcatataaaaaatgctacagagcatgttactggttatgttttaattgtaatactcttaattagttgaattgagttggtaaaaaatggttgtgtttaacccaaattgaattgctgtttgtggtaccttataattatctgcactattacacgtgtttccttgtctttcaaagacaaggcaacataaaaaacaatcagagaaccattcgaatttgtgtagaagtgaatttctgtaaacatttgcaagtgcaactccttgaactatcaggtattcaaatgaatgaatccttgaccaaaatttcaacgcagcaacggaagaacaagctgcagcaaccctttaaccttttgttttaacttggaagcatagtgtcactgcctaatctcgaagtcttgcttgtttgtttccttggcgtttgttaagatttcttcttaacgacttgtttagtctttgatcaagattgcctcttattatttgatccacttgtctttgtttgtagtctgtgcttctggggtagagtttctgtgattatgttgacctttcttctggtactcattatttatcaaaatattacaaatatttataaatttaatcttatttttaccgtataacagagttgtggttaaatgttcacatgtctcagctaatgaatttagcaacaataaaactttatctataatttctatatcttaacttcgtaaatttgtcaaagttttgataaatttatctacatgttcaatcataaaggtactatttttaagtcggttagtctttttttaacagatatattagatactaaatgtaacatgtcaatttttaattgatctaaatcat

SEQ ID NO: 184905 - DNA, 1424 bp, Cannabis indica
aatacttaattacactaataaaacgaggagggtattaaacaccaatagtaccttcagatatagatcaatttacatgcatcggaactctacaaacttaatgaagtgggtaacaattaattgtacacaactaatggcttgggaaatgagatgatcacttgaattgaattcagtgctccaattaattaagctagctttgctcaatgtaaaaatgaacctcctcgacctccaaaattccaagcttaatgaaaacatttcaccaaaaaggcaactttggtattattggaccacaagccaagctaaaggcagagtacacacaagttggaatattggattaacaaaacaattcccttttcttctccctttccctaagtcacacggcaccccattgtgaacttggtacttgtcccacaaacactaccaacacctaaataaaatcaagcttcccatttggaatattgggcaaaaaaactttaaatgtgcctaagaagaagatgatgatgaagaagatgaggaatcctttttcccatacaagtacattgtattcttcaaattttgtcccaatgtaataaaaatggaactgttcgctatagtttttttatttctttttctttatgacatctgcacatttttatggcgataaaatactttgttttaatttaacacaataattccatttcatctgacaatataaaaatactttgatataaaaaggaaaattacactaaattagaaaatttaaatactcactcacccaaacacaattttttctttcttgctttctttctttctttttttttttttttcatttttgtaagacatcaatatatttttccttttgctaagaaaaaaagtgtaatttgttgggagattgaaacaataagctctaactctaactcaacaattgcttttttttttttttttgacataactcaacaattaaaacaacaataatttaaacgaataaatcgtaaaattttaaaaagacagtcaatggtaatttcttttttgggggtcatgggctgtaaactatattctcaaattttatgtataaaatcataattcataaccatatggatgtatgcacattatagggggaagaaagtgatgagtgaatccatcacttgtcacctataatccatattgaaaataaaaattttctttaatagatacattcaaattacatttattttagcgattagatcacaattaaataattataattaatttaaaagttaaataaaataaacaataaataacttacaatctaatagtataattaatctttatttcttataaattaataattatatttaaatcaaaactttaataacttaattttgtacaaatttagtcacttgaaaatcaaaagtttcgagtctcctattttcacaaaacagcaatatctccaagacatgtgtccaaac

SEQ ID NO: 184906 - DNA, 3285 bp, Cannabis indica
ggggggggggttcaaaaaattacatattcgaagctctcctaaaatactttctaagctttcatcttcttcaagagaaacctaaagaaccagagttatgttttcatcgtaaacaccacttgtaatacatttaaattcctataaaggccaatatattgacttgttgactaggaataattaatacctgaatcgtgtaaaaaatatcgtctcatttatcaaatagatatttaatccttaaagctttcatttaattagtttctgaaaatctcagtaaacagtatttgttgtagttacagtatcatccctgtaatttttgaaaaaatctgaatagtttacagtagcgaaagcagagttgttaatattccagtttaccacgcatgtttaataaacttcatatgtattttcgacactataaactatgtaaaaatttataaaaatttacagagatgatgttgtaagaatagcgaatactgccatggaaaaaaaaaataatatttcggcatgtacttgcaagcacagaaattgactacaatattataataggagattaacaataacacgatatatatatatattaaatatcttctactaactcttatacatatacatatttatattaaatatcatgtactaatttggctatcaaaaaaccaggagcatatagtttgtactgtacgagataagttcactgcaaacttatgattttcattcctttttatctacttttagtactggcccatggaaaattaagagcctgaaaatattggctcggagttatagtttttatgtacgatatggactctattaaattgaaattcctatcaaatattggacggttgttgtgtacttttattaactcgtcttttcaagccaaaaaaaaaacttctgatatatatcaagggacatgtatatatagtggtagctgtcataattcaataccgatattatatgtaacagctcatagtaatatgttgataatatttatcaaaaataaaaaatagtcatatgttgataaatatatgtaaatatataaaaatttgaacatttttacaatattgtatttccagaagtatgatttggtggcaagcctctctttaaatttactttcatcaaattttataactttgcaatttagtatcaactacactgataaaaccaaaaagcgaatacttatatggctatatgtataattatttagtcattttattatcaaatataaccaccaaattagcgagcttgttcaattttttgcataattatttaatcattttattatcatattcatcttaatatattgacaaatttacgtgcttcacgctcagttttacataatcatcctatttttcgctaatttaattgtaaattgacgagcgagtgctaattttttcggcataagtatttagtaagttttttaagatatttgaaatgcgtaactcaagactcattttcacatgataaaatagcgagtttatggcaagctcgtgatagtgctcattatttataatacactagtacatcgcatatacagccaatgtctcattaaggcgatttatgtaaagatgcctcggtccaaacgggtagtacataccccaaaaagttctgctatagaagcattttgaagaaaaaaaataatgaccaacagtcattatgaaaacctcaataaggtaaaatcaactatcaccctcgatgtgataactcaaatgtccctcaagtaaagttcaacaattagatagtggccggtcaacgcaagaactaggggcatgataagggaaaaattctcaaaatattttcttgcatgatcgaaacacgcctgaaggtgtgaccgagacagggcctagttgcacactatgcgtagcatagtaaagagaataaaagtaggagatatagagagaagttagcacagtcgggacatatatcgattatatgcgatgacccattatttttcctccgcggcctatgtaaagacaacatctttacaagcgtcaggtcaaaatgactaatgtgtgtgacaactcgaccaaaaccaacaaattctatgttgtcagtacacaaatgtccaatacgcgacccatatagtcgcaggcgttccgtggattaagaagaactcgcggaagttcataaatcaatgcaaaccccaagaggttcatgtgtttattcgaacacagctaagtccatacatcaatgcaaactccaagaaattcatgcagccaatttgaacctcgcaagattcatacactaataagaaccctgatagatttatgcatagataagaaccccgctaggttcgtgcatcaatgcaaaccccgacaggttcacacatcgataagaaccccaagaggttcacattattattgtacaatgatcttatcaaaacctatgagtttagataaccaatctaaaatacgacgctcaacataacaaggcatcacgataatcgataaatgtgggttcagactattttaagttctccaacacagaacaggctatactgaagaactagtggcatgtgttattgggataatttaccccctacgagaaggacttcactatagtgaactcatggctcacaatattctttaaaatgggactagtagtaccaaaaggacctctcaatattatctaaatagatctcgatgtatcaagaaagacacacctcgcatatttaatgaaaccgcagtaacaacagaaaaaagtgcaaatatattgatcattataaattggtcgagcattcaaagtgcaatcatgaaaaatattacatctattttataaatgttctaatcaatacaattaatatgtaaaatattgtaacagtctcattacgatcgaacaactgtaagtgctatctcctacctacaaactaggagctttcccctccatttaaatggggttgggttggctaatcttaacacagaaacagagtaagagatctctttcagtattggactacacaggtcgaaacctattgaacaactatatttttatatttttgttatatattatttacatactcgcatatattattcattatattctttgagtactcgctattctaagtgagtactcgcacatttatcttcgggtattcaaatgacctttgaatgctcgcatattttcgtgttgtctaaattccttccacaacaatgtcctattcttttatatgacattgtatattgtatctacaatagacattctatatccatttttgagaaattaaaaatattttataacgttaaaaataaattttaatttaatagtctattgtatacatgtaaaataaagaaattttta

SEQ ID NO: 184907 - DNA, 1645 bp, Cannabis indica
cttcttcttcttcttctccttcaacctcgtttcttttttccataaattaatgttattttcttttcttaattaaataattttgaatcaaacattacatatttatgtatgaaaaaaattgaaatgtatatttgaagctctctgtctatgaatctcatggagaatgaaaatgaaaaataaaataataattaattaattaattaaaaaataataaaagtgggatttgagagatttttgggactgttgcggagagaaggagagagaaaaagatcatctctagttgtttcgactgttcgaatcgaatcgttaacaaattctccaggctacaatctcctgcacctgcgtttttagatcaatgttcattgttaaccaattaaattatgacatgtaagactgcgttctcgtacaaactttttttgattgggtgtgtgttggaggtgtcttggggtcgagtgcagaggatgttggcttacgtttcgtgttaatttgtctaaaccacgatgaatctttgtgctatcacgtcaatgatggggcccacttttgtggccacgtggacccactgagggattcaattgccacgtcatgttatggggctttgaaaggaatgttttccgaaaagggaggagttttttggcttcttcaatggtactcaaacgcaccgtattgtttaaatttttcagataattatttgttttttgaatagggacaagtgtggcactaattaatgctctgagattgtgatgtaaatgaaacttaacaagtcccaagtcaaatttatagtgatgattattgcaataaaaaagactcacttatgctttaattgttttattattaactttaatataatgcttatcttctttcttgctatttgattatacattggttgaaatgaaaactagtatttttatgactgaatattttcttgtaggttttaactgagtgaggcatcatcaagttttttcttttctttaatggaagttccattcctttctaaaaaaaacaaatagtttgtggctaaatttcctgaaaaatcttggtacaatcaatccttagactgaaattttggagttgaacttctcaatctatactcttttcattcaactttagtttgtcaagtgctaaaattaattattacggtgtacaaaaatatacacgtggtaaaattttattagtctacataatattaataatttaaaaaaattaaaaattaaaaataattaagaaaaaaaaacaaataattttttaaataattactttttcccctttttcttcttctttctttattcttctttgatgaaaactctattatgaaaactcttaccctaaatcactacctcttctctattcctcaccactctctctccctcgcggttctcttgcacaacagtgctcccacagaccaccacgagctctagtcccataaacttagaaatccccctcccaagctctctcttcctcaatctttctctctgtcgtcatcccacttgtcgacgaagccttgtgatctacgatgggcattgagatttgagggtaagcttgtagacatcgaaacaagcttcgactgagttggaagagctagggttagcagaagccgtagatgaagagaaggggatcaaactctaaaatggtggtaatagattttgaaact

SEQ ID NO: 184908 - DNA, 1352 bp, Cannabis indica
gaagtaggtgagaataatgtggattggtttctctaaataccagggaagctgcagccatggcggccgctgtctctccggctatgtctgatccaggcttgttctcgtccaccttgaaggcttgacgagatgtagtcatgtcctctggtctctgccagcagtagtggtccgtgtggccgtcgcccacctgaccagtgaccccgcacaaaataaatctaatcagactaattttcaattaataattaatgagcgctgtatcctataattagtttaggattttttataatttttattaaagtaaataaatagtactcaatattgaattgtacaatatgtatattacaacaagggtgcatgcatttctcttagcatttctctcaattaatacgtagcctctcatcaaattaaggtcaataatatgactaatatttactcaacgttgccaccgccgcgagtacgacacgcgccaatcacgctatcaaaaacagaacctctcagtcatgcattgactacttggtaaccttgctccaattcacactcaacaataagagcgcgaggatttcgtattttgtattagtcaacaataggtatgacatagaagaaagtgttttacctcggcccacaagacattagggtgagtatgagctttaatgaagtaatccgtcccccacttgatggcttccagcgcgtgaacgtactctccggcctcagccatgtctttaccatactctaggacactccaagagagcattgtcacggtaaaagccataggtagaccaaatttcacattgtcgccagcgtcatagtatcctcctactaagtccacctgaaaaatcacaacaaaataatcatttactttccttctcaaatgcgtattacatgaatatgtatttatgtgtactgactccttgttcgaggccatcgttgagggcagagtgaagacgccaagtgacccgttggttatggggcaagtgacctgaacgttgggcctcaaagtagagaagactcttagagagagcttggccgtaatcatgggtgagagactggcttgagcagaacatgtcaatgagagagaacagagcaagccattgatgaaggattataccttgcttcatttcttttgctctctgtttttcttcttgtctctgtttcttctctctctttctttatatatatgtgcttagtcaaaaacatatgagtttgagtaggactctaataacttctaattagcttgttgtgtgggtcctggtggtctacgtctgacttcaaaagaatgctattatatctttattcttcactcccattggcttgaattggagttaagaaaaagagggggtggatttggttttgatctt

SEQ ID NO: 184909 - DNA, 5756 bp, Cannabis indica
atatatatatatattgataaataaaatagaaaaactagtgaaagggctcaaatatatatttttctaatttattaatttgcaactaaaattctctcaaaaaaattgcaactattattacaattttaaaataacatttacaaactaaataattaaaaaaaaatccatattttcttaattaattgcaaaaatcctaaatttcattatttttcatgaagaaaaaactgtgaaataaatctaaaatcttccattttagaaactttattatgaccattttgcccaacaaaacaaaattgtaaatggaaatgaaaacatagagaaaaccagtgtgcatatggcatctcttctcattattactcttcttcttcttcctcgattgattgtgtctgaactaaacctaatgcttttgtttcccaaattcactcaaaaaccttaaataaaaactatctctctctctctcttccgctgctccacagctgggtcctccggccaaccaccctacttcgcagtttctttaccctttcatcgctatcaggtatctttgctagttttaatttgtttatatgttttataaatgccctcattggacccttcgtagtttctcccctggtttctgggaagactgaagtcttatcatgaaaaagatagattcttgagttttcgaatcagtttcttgtttatgattatgggaaaactagcattgtttgacttctatgctgaagttttatcgtttgagcttgtttgattgttactcccatttcttcaatgttaggattgaagttggatttatgtatttattctatgaggcaaatcttttgggatgcgtttttggggttagttagttttatcatctaaggctatttcatagcatatttcatccatgtactgaatttgatatagatatatatatatatatatttaaatgatcatatacccaagtggtggaatacctgatagtataaatatgtagttattaaacttgatggccatgtcttttttcgttgtattttattttcatctttgtgttttttgcttctaagttatgattatctagcactgaacattgtattggatattgttcccttgcataccaataaatatttgcaagagagaagggcttctgtgaatctttcggaaagatattaaatatttgcaatattaaaattaaagggggcgactataggtggtggaataagatattatttcatgaccccaagcacaacattattaaatggctttcttggaagtggtatataattttccacaccctttctattgttctttctgggaatagatagagcaatgttcttatataaagatgaaatgtgtcctgagcttgcattttttcacctaatcagcttaagtaggaaatgttcaattccttggatttcaatatggttcattaagtgtaccttattctctagtggtatcacatcagttaaccaattcattggcttcacttagtctatgtatctgtatttttgtttaacaaattgctgattttatggttgtttgtttggcttttctccactagtttaagtgataaatgatatttgaatgttcattctttcagtaatagtcttaacgagtaacaatcttcgatgtatttttcactcttgttttcagtagaatgaggaattgaacgagttaaaggattgacctaacatctgcagttgaaaattacagtagtacgatgtctggagcagctgtttcatcgacatcaacaggtactagccaaaaagttcctatgtttgcttcaaaggctggttttgtcatccaaaaaacaagttgtctggttcattggttcccatattccgaggagttaaaaatcctgggggtactgatactttgaatggagaaagtaccaaactgactccaaggaaaacaaagtggggacctgatctgactcaggatgcttctgttaggagggtgagagcttttgcttttcaggtatgttcttacttaattgtactttgcaagttgtgcttcatagttcttcaaattgaatttgaagatttttataatagggttatatgtatcagtccttgctcttgggctttataacaataaatctagagaattgctacccactccccaaaagaaaaacaaattgaaatttccctttccgtattcttctgtgtgaatggttcacatagaagcttccccttccaggtgccactaagtgatattactacctgtgtggtggcacaaatttttccagactcgggttgatcaaattacacagcaactcaaatctggaatatcagagaccgggctcagtggcaactcagtgctagattctgaaagtccaaatcatgagttgtccagtcatcaaaatgccattgaggtaaagattatatttaacagttttctggcttaatttgtttgacattcttcaattgtcacggaaaaaatacgtgtgtgtatatataataaagtcttctgaatctgaccttaaattactgtttgtggacatagaagttagaagaattggagcttgaaaagcgggaggcaataggtatgtttacgcttttctttgattgatggaggatatattgtctctggcatggcttatgttttttgttgatgatttccaggtgaaatattaaaattaaatccaagttacaaggctccatctgattataaaccgttgatgaaagaggccagagtgtccatacctgtaagtatcgcttctccaactttctacgagtttttctaacttgagttcatggcttgtttttaaggattcatatttattagaaattccacataaaacaaaaatatgtaatttgatttgatcccacgaggtatgaggttcgagtcccacttggacacttataaaatatttctaagtccacaaatactgtaggttaggtgaggagcctagctcttttttaaaaaaataaaaaagtgaaaataatggtctgattaccttacaatcaatcttaagctgcataatagttgtaagcaaagacgttttcattgcagtgaaggaaaatattaagaactaggcatctgaaaggaaggctaaatacttatgggtgactgatagtgaagtagtaaaatgtgggaagggtaaaaggataatacaaggggataaagaactccaattagattgtatttattggttttatcatcctagaaactatcatagatttacaagtttacaaccttatgccataatatatctattattagtacgatgtcaatatgttgttaaagcacgtaaagagggatttttttttttccatataagtttctttctgaatgtctcttaaaataattaagtttctatcagaattttcccattcttatgttttccagctgtttaagattaatgaatattctggattggatacaataagatgcatatgtaaactgttggattatcaagtatcctgtttttttttccttaatggagaattggtattatcttctgatgcttccatgctatttacactgtttctcaggttaaagaatatcctggttataattttgtttggctaatatttgggcctggaggtgagaacttaaaacgattggaaaaggtaagaaaagtaagtttttgagtattaaaagaggagcttttattagaaatttcattatttcactagtatatatatactgataaattatctccattacatctttgggttgggaatcaggaaactggagctaagattcaagtctacagaaccaacgtagataatgaacagaaggtatcttttttacaaaagcagaaaatataaaattattagagattagtcatcatttcttactattttcactcaatcattttacaggagcatcttgtttttattgtgtgtttcattctggtgttagcacttgctttatccataatattttcgattactatatgcagattgagattaaacagtctgatgggaatgaagtccacaatacctacgaagacttatacgtccatatatcagctgacacgtttgagaaagtagatgctgctgttactgtcattgagctcctaatcacctcagtaaaagtgagttcacctcagttgttattttacaactgatctgctgtgttttagcttccagtcatcttaaccattctgttatatagtttcactatcattactcctgttatagttggattgattgggactatacttttcttttgtttagggtaacttggcttctgcatctgcagcctctaactcagcttctgcagctgatgcccatgtttctttaggccaggatgtggccacttctaacccagttcttaattctgcaatgcaatcgatgccaggacctacatcaatgcctccacaaggacagtttcagtaccctggtcaatggtttcctggaggcccaccacctaacatggtgttacatccaccttccggcttcaatccaccaaattcttcggctcttggtctgaacacccctgctcacatgcattcaaacatgccttcactgtttggccggccaccagttcaaggtggattcaactccattccccaaaacccaaatcttgtttcccatgaatcacggccaccagcacaagttttacaacatcaatacatggttcagacaggtcctggtccttttgagccgagaaatccttctttgatggctccacagttttcctcagttccagcaagtaatgctttggttccatatccatctacaggaagccaactttcaccaatgagcttcaccaggccgtcaatgccttcattaccacaggggtctcaacctgccaatattccaccacctgcaggttttggcaatatggctccaaggatggttccgacacatttgcatcctgtagtttcaccacatgcacctgcacctatgtatggttctcttgggaaccctactttaggatctgcatcaaatcctccaccaggcccatctatgcaatcaggaattataaattctgtaaatgcagcaaattttactcctgcaaaaccacaattgccaacaggtccaagttctggtagttttacttttcaacctcaccgtccacaaaatccaccctctcaggcaggactcagaccgaacactcatttctctcaaaatgctccacctgccaattcaatattaccaagtccagcatcccagcctttacgaatgccaatgcctaatttgtctcaacctggcaaccacgggttcgcaaggccacctggcaaccacactggccaacctcaatctcatatttctggcagtccctttgtcagagatccatctgggatttcagttccttccaggcttccaacatttccagatggaagtgcccttgcacctaggaatcaaatgatgccagggggacctgggccgtggaacttcaacccgtctccccaaattcctagttttcctggtcctttccctcccaggccaggaaatcatggccagcatcagaattatcctgttcgagcaagtcactcctttgcttctggtagatcagctcaagctcctggagaacatcaactttatgatccattctcaccgacatcgatgccaattacaccacaacaccagggaggattccctagaaggtgaaaaaaccaggacaatgagatttaatggtcttgtttgaatgagaaaattagattagtccaacagtaccttatgtgatgctttctaaacactgatatgatagttactagttgataaattgtaatgcaattcctggagtaaatgttttttctttctttttcaagagtcattttaccatttgacttgctgcctgaccaaatcatctttctgaattctgattac

SEQ ID NO: 184910 - DNA, 1761 bp, Cannabis indica
tattaaactttgcagactcattctgtttccatggccactgcttgtttttggttgaccttgactttgagcttggtatccacaggaagagtgaaagatggatcttcgttgaacgcacctggagccttgaccatgtgaaggctttgctcgagttccctcttgtcttccttacgtttcttttgtttcgaccctttaagcctgtcaaaaaagttacagttacattcaaagaagagataccccactagcatgtttttttaagaactaaccaaatcacaatgaaggaattacctgccgccaatatggtcagccgccctatcagctttaaccttgagaatcttgggaatagccttcaaaacattctccactgtcgtcctattgtatctctctggcctgttacgcttcctttcaaactcaaatgttgcatcctggaaaagaaacaagtgaaacaaagatcataaccataaatatctttacttgacgtaagaaaccagcaatcaaatcgatctcaaaataaatgaaagtagaagaaattatgattaaagcagaaaagaagcatataaacctgtgtcatatcctttccatgtaaccgcctgtatgctttagtccacttcactttacgaggatttctcttcattttgaaattcttgtgacatttggacctacaaaaccggaaaatctacagaaaagctcacttgtaagagaaagagacgacaaaaatatacagcaaataacatgatgataagcaacagatgaaaatgacctaaacataactatgtattatagcagacagacatccaaaaataaaacttggtggaaaaatattagagaaaatttcaatatcatagggtagatccccaaatccatgctgcgaaattccttctaaaagtgtcaagttcgctttcaaatgttgaatgacaaaacaaatattaataataacaaggaacatccaataaaaggctaaagtttacagcaatagcgattagaaacagtgaccaacatgccataatgataaaacatacacggctacggcatccacaatgcagagccagattctttgttttggaattgcagttaagggggtggttgatggcattttatctttttagttgagctacattgccattatcttttagaaaaaatcagcctaactaaaagaaaaaattgaggagggcaggggagcactgccaagtaatggttattgggcattatctttacgagagaaatgagaacaagaaaaaaaatacaagtacgaagcttttaaatgacaaaaaaagctagaagaagatccaaaaactacaacaatcttgcaatcaagttataaaaccaacaacaattcatgcatcttaatgttctttctaaacatcattcatcacaaacaaaaataaaaccaacaacaacaaaaaaaaatcccctaaccaaactagaaaaaacattgcagaaagacagaaatactttaacttgcatatcaagaaaaaaaaaaacagaaaagggtatctataattacacaagaaagaagaaatgattgaaggaaatatattgaagcacctttgcatcattgcgaacatactgaataccgtgccctggatatacagtggaagaacagaaccaacacttctccaacctcatctttttatcaagttaaaatatgagagccaactgaaaggaaatgaaagagttagggataagaatatgagaaaaccctaacaaccgaagcatatgagaacacctcttgaatacaccacaccggcctaaccacaccatatc

SEQ ID NO: 184911 - DNA, 10443 bp, Cannabis indica
ttttgttttgttttatatatatttttaaacaaattacaagcagcgggcattcccggttcccggtaataaaagaatgagaatgagaaagacagcattttgaacaagtgagaagccaatgactgggactgggttggcgttgagaagctttgtcatggtgggcttcttcttcttctccactacttctatgaaaaggtcagcttctgttgatgctcacaactctaaaaatgtgactttttttctgtgttatttttttctttctcactgggaaaaacataccctttaaatatttcttctctggttatgggttttgctagacttttatgctgaattttggttctttcagtttctagatttgtgttcatatctgggtatctgtttatttctttcatttttggggtgctcatacggtaactggtttacaggaaattgaacgcagttttggaattgttaagcttttgactttcagtttgaaaataatgttgtctttattctacatctaagttttaaagttttctttttcttttttggattttggtcaacagctagaaaagaagagctcaaaacccagaaccctgagttatattcaagttatctgaaatttggaaaagttgtgttgtgtgcacctggagatttatgatgaggctaaagtttttataatttgtctacatgttggacttgaaaagagtatatgtatttgatgatgtcagaaatgagtgaagttcatgaagaatacagttttcttagaggggaaactttttgttatgaatgataatgacttatccaatttaaagaagacactaggagagtctgatgatgatgcaatgagaggagtttggaattaaaaggttagatatctgttgggtaatcctaagagttcaattgggttattttgatatggaaatagccaagagtgacagcgttaggcagctttcaactaactgttacaaagtggcgaacctcggcgagacaattatggacacaacccgtgtatcaaatttgaaagataagtacattttaggtgaacaattgggatgggggcagtttggtgtcatcagggcatgttcagataggtttactggtgaggttttggcatgcaagtctattgccaaggatagactggtcactgccgatgatatgcgcagtgttaagcttgagattgaaataatgactaggttatcaacacatcctaatgttgtaaatctcaaggcagtttatgaagaagagaattatgtgcatttgttaatggaattatgcgccggaggggagctttttcaccggcttgagaagcagggaaggttctcagagtacaatgcaagggttatttttaaacatttgatggaagtggttaagttttgtcacgagaatggtgttgttcaccgagatttgaaaccagaaaacattcttttggccacaacatccttgtcctcgccaattaagttggcagactttggccttgctacttactgcaaacccggtatagactttggcctttctctctttgtcccctgttatgttacataattaactaatatccctccacaaaatcacattttataatcacctatgtttatatgtctacagggcagaaattgcagggaactgtgggaagtcccttttacatagccccagaggtacttttgggaggttataaccaggctgctgatgtgtggagtgctggagttattttgtatatacttcttagtgggatgcccccgttttgggggaagactaagtcacgaatttttgatgcagtgagagctgcagatcttcgattccctcctgattcttgggatcgcatatcctcatctgcaaaagacctcatcactggaatgctttgtgtggatccttccaaaaggctcactgctgaccaagttttaggtaattggttttatttatttatttattttgggtggagtattgcattatgcgaatgcgtgattctgctataagatttcacaaacaataaaagcttaataggtgaactgtagaaggttagcagttataagatctcataacttttccactgatactatcctacatgtaagaatctgtaaactaaacacctcctaatattaagtcacaaaaatcattcccgaaatgcttttttggatgtgtaatatgttcgtgtcatattcaagattttcattgagggaagtttctaggcatatacaactctcatgctagtcatcagtttgctaggctgggaaaattctattatagtataattcctgcgctgcttggaggttcgatcgaacagtttagtaactgtctcattaatcaaatatgtacttaagtctctatgcactttggcttttctggttaaaattgtaaaaccaagcttttattagtgtgttctttaacagaccaacacgtgttctatcctattccaagctttgcacttaataagtttgcaatcatttgcagctcattcatggatggagcactgcactgaagctgcccaagaaatatacgatcaggagtacgaagtttgcaatgaattggaagtgaatggtggttctttttcgactccatttatttccaggacagaggaatgtgcagtcaacggtagaccatgcacagttggtgatggaaacctgaaacaatcacctgcattcatttgcagatcatcttttgtttctttcatagaggatagtgacactctttgctctgcatctggaggtttttctttcaacagctgccaggaatccagtgtagctgagttttcttccccaatttcatcaatgccaagctttacctttttcagtccaatgtctactctagttcaaggaaatatttcattaagatttgaagccgacatgccatcattggatttaccatttacaggtacatgcttcttatttattctgactattgatttcttgtcaaaaactctataaagttattaccttgatgaataaagctggtattgttatataaatgcagaatcaaacttggagaagtgccagctaatagcgcagcctgatttttcgcctgtcaagcggggaattggcgatgaagaaatggagcgtaaagaaattcgacgaggaggaggaggacctggtgggacaaaggttggaggtattcacagcaaaaggaataacacgattgggctcggcgagtttactcagattaatctcatcgtgacagaatcagtcatccgttgggcatcatgcacggatattccaacagcaccatcccttcgattatctcttgtttgctagaagattaattttaagtacgttaccaggtcagccaaccagccagaacaaaaacaaaagaaaatatttacactcttttggaatctatctaatggacttgatgagaagaattagttcaacctcaggagctggacttaggtgtttaagcgtgtttgtttactttgattagtactagagtaatgaatgcttttctgttatggaaaataatttatacttactggtgtggtgttctaatatgtaaggcaatttctgacaaaaaacaaattgtaaggcaattaattgtacactatctaatttatgatggcttcaaactaatatctgaaagaaaacatttcaaaaaaaaaatatctgaaagaaaaaataaacactaatatgtctcattttcttttcaatacaaacaaaaataaaaagtaaaaatgatttctaaaagataaaacatcaaaaatgcgtctgccgggagtcgaacccgggtctattgcttggaaggcaattatcctaaccgttggactacagacgcttgttggtagtaaatttataaatatttatttaattgttgatttatctttccttgttaaaacatctaaaagttttgcctttcacacggagttcatatagtttggtgaaattattacgaacgacaatttggagtaatagttcatacaaaagggtagatgttataatcgacgagatgaaagatggtttaactatagtgactgaataagaataagtagaaaaaagaggtatacatgcctcaaaacgacacaagttaattgaaaggtaaacactaaaccggccttgagtacaaaattataagcttgcaaagtatcactaacatggttctcttatggtacaaaattagcagagcttctctcttgagcaatacaatattttttttatcaagaagacaccctttgctttctgagggtcactagaaagagcagccaacaagaagcctctctgaaaaaatttaataaacatactaacagtgcaaaatccatgctacctattggtacattgttgaagctgaaggtggtgcaacaaacaaaatatgatgttgcttattagctactcttacgatgagggggcataatcttggattgctgtcgcgagtttattacgatcatcctcagttttcaatctaatcaaaaaggtacgcgccacaacctcactgctatcatttgcattatcgtctccctgcaaaacccgacaaggttgtttttcgaagttagcacgactcgttttacagaacatgatattaacagttagtatttagttatccaaacccagtcaaataaaatggctttcttgtcggggcttcatacttaagcaacagaaatagataaaaaagagttttgtagcatcatcaactagtcacttagcgacctcaagattgaaaatgaaacaattgggaaccagggcataagttcatgtctgttcagtgttcttgcataagttcagcaagttttttatgttttaaagtcttaaggtgtataagttagacagtggccatatggtatgtaggtcagcagaaaggaaaaacattaaagttaaaaagcatgtgcaaagatcacttactgcagtatgaaatattgcgacaatggaattcttttgtgaatttgtcttgatgcccgggtatatcaaggcattcagcagcaatcttcctatctgagtaaatacacaaataagtaaaaggaaaaaatgtgtcagtactgctctctataattaaaattaaagattttagtaactcttcccaagggaaaaaaaaacccaaacaaagtggggagaacaaagaaaaagaccatgaacccagaagagatcttatctagccagatcagacacattttcctttgatcaaatgataattcaaaagatgctagtacaagttgtttttaccactttaatcccccacaaatttcaatgtcggaacttagaaaggaagattttgaaatgacaaatgaaacttattaatgaagccacatggtgtaaaatagatggaagtagcgtttgcaagaaacatacatcgttgcgaactataatggttggtttggattcttttgtgcccttgctaacaccctctttgcacttgatagacagctgccctgggcctttttctttccaatgatctttgtcagcaggatcatttgactggatacatgaaaaggaaatccagaaacaaaacatatttaagggaaaattagaatgcttatggatagaagttaaactttcccaattatagaaaaatgcagctcattgttgatcttttagtacagaaaataattgtagggtgatacatatttgtgcagaaggaatacacaaataatgttgcataatcatttcatagtacatactgaacaaaaatataaatatgcagctaagactaaaatcaacagatgcctttttactttccagatcatatatttgtctttctgtcactaccttcacataaagtttgcacttgacttcatggactacaacaacaccctgttcttcagatttcttaacagatggactgctaggtgcctcttcattttctgtcataaaaataaaataaaaaaaaaaagcatgtaaatttattctgaaagaaaaagtggacagaattttcaagaggacacatattgtcaaatggtatgcctgagaaaactataaatattatatatacaaatatttaatgtcccagaaaccccaaaaccacttatcaagcttgatttgaaactggaggcccttttggaaacacgaaactcatggttattcaatgtgcaagttccctaaatatattaaatcccaaagtataagagagcaaactttaggcttgaatcctaacacacaatgcataagcatgctcattttagtaatttcatacatagggcagtccggtgcgtgctttaaaattgtcaaagtgaggattcaaaactaatgcatgcattgacaagacaagctaacaacatctacttagtaaccaaaacaatttaactgaaaacatatccaatgtttaacctacaaacaaaacttaaattaaatataaaaagactaaaagtctactacttcacgaacttactaacccatctaatttatcagcaattggataattaatgaaaaacaagaaacagatcactgaaagaaaaggaaaacaagagtgtcctaccaccgtcatcatcatttgaagcaccatgagttgtgggaactgaactttgatttcctgcaaatgaattataaaatcctaggatgtcaaattcacgttatacgaactactataggataattgcattgcagtatcttggctataatttgttttttattagttacttcatatctcatgcagatgagctcttagttcatgcatgcaagagctattaatccacgcaatcaaccataatgttactaatacttaccaaacgagagcgggctttgactacttgagaacaacccaggactcgtactgctagagaataatccaggggtttgactgttcgagaataacccagggctttgactgttggaaaatagaccagaactttgattgttggaaaataggccagaactttgattgttagaatatagcgcagggctttggctgttggaaaataatacagagctttggcccttggatgatactcctgagctttggctattggatgatactcccaagctttggctattgaagggcaatcccgagctttggctattaaaggacaatccagagctttggctattgaaggatagtcccgagctttggttgttgaaggatattcctgagcttactcctaagctttggctggtggagaaatttccaaagctttgactgctagagaaaacccccgatccttgactgttggagaaccctccagagctttgactacttgacaacaaaccagaactttgactatttggcaacaaaccagagctttgactgttggacactgctcccatcgaattctgattattgaaaaatgtcccagaactccatgaagtcccaaagcttgttgtagttccaattggaggaatccctgtttgtgcctgaatgaacttatttgcagcatccttggtttctgacatattaaactttatagcggtttgcgattctgcaggtgaacattctccttttgcagcattcgctttaagccagctaacaacatcagtgaatttctcctgaaataaaagggtgaaatgagcacatctttttcttcttagcaaatcgatcgcttcgcatgtatcataatgacccacaagacttcaaacctagttcgttacgaacatcaacttttttcttaattatgcatacatatgatcatcgacacacgttgattaagggatttattggaagatttgcagagttcaaaatcaatcagcaaaccaacaaaaaaaaacgaagccagcattgtcatccttaacaacacaaactagaaaagaatagcatgctatttgtctttatcaagaagcttgctaataatatcatatgtaaatcaaactaaccaaattggtttctcaatctaattttaccgaaccaccaatagacaatgtaaagcatgaaaccaataacatagcaaattaccatgatgcttgaagcatgagctaagtagtcgcgggcaccatcttcccatagttcatcaggatggttcttcaattgtgcttgcacccaactggaaaagatacaaaaatggaaaagaaaaaaaaacaatatgaaaagacaaaaagtcactaaaatgtaaagcatgtcaacccaattagcaaaaaaaaaaaacaacgcaaaagctagtcatgaatttagagtgttacataagtacaatactaaatgatgacggaaatatcacaatatcaacagaagaaatgattgagaaccttgcgaattgggtgttgagagctctcacatgctgccgagatgactcagctcgttctaaattcaaaggaggtgtggccattgattgctgtttagatatctccgtcttatgagcatcaaatggagatcctactattattcttttattccggaactgcatcatttgtcaaaaaaataaaaatctttataagcatcaactactgcaaagaaacgaagaatccaatagatattcacaaaagtgagtgtcaaatacgcacagaaagatgaaacaactctatcccgtatccattctattcctgtcttacagaaaacaatgattatcagctataatcttatctcttaatgattaacactatgcacatacgccttatgaactggtaaatctcactcacacattccaaaatcatgtaatttaatactccagaaccagaaataatcaaaataggtcaagccaatgtcgaaatttaagtaaaaaaaaaagctaacgagaccagcttatatacaactcaacagtgctcccgctatatgagtgtgtctgttttctcagtgccggtcagtactcctaactttatattagttaggcacacattataattaaacaaattagaagattgaggtcaagatttctacttaaataatacagtacttgaccaaaaaaagaaaactttgaagattgacctaacaataacaaaatttcaaagtcctctacttcaaattaacaagctcagttgtatgtctactacattcgtgtagattcactaagcccccaacttatttgaagagcaagaaaacccagacaaaagcaaacatttacattgaatcccgatagcatgttgagctcagctgtatcgtttgttcttccaatcaaaaatttctactttttctttttctttttttttttttttttttggctgtagataccgaaaccaattttcttgaataatgaaattgtaaatacttcaaaactcaaaagagagaatcaccaaactgaatttccattaccatttagtgaagaaaaaaagattaataatataataatgtcaaaaaagagagagaaacttaacgactgaatcattggtggcaccggcagcaggtctggattccgatacggctaaacgtttcgttcctttcataacgatttggtgaactttcagagctcaaaagcaagaaatagggttcttcaaaatttgctgcctttggctcaaccccgtcttactataaacaaaataaataaataaaaaaaaaattaaattaaaataataacactaataaagagtaaaaaggctctcttttttccacaaaaatatatatattattgtggaataaaaagtattattctgggccgtttgatgttattggcaacgagctttcaatcggaggcgttggatggtatcagaaactaagcgtggggttttttcttttataggatatttggtgtttttggtccctgaattttaccacttattacagtttggacctcaaatttcaatttgagcaattaagtccttttctttatcaagagcaattaggccctatgcaataatttttgtcaaaaaaaaaaaatcctttgtaataaataaaacttaaattttcattcaaaatgtatggttttcatatgtttagtaccaaataataagaaaattttaaaaagattagacatctaaattttttttggaagggattttggaacttattttttctttgtttggttggttcgataccataacctcaatgattatgtagcttatatggaggttaacccatgacagaaacagttagtatgttaaaataggataaaatttgataaaatcatcacaacgaataaatacgttcaatatctctaacatttttttctgtatttctttctaacagttaattatcagtctgactactaaactctgtttgtgttagacagtctcacattgataatgtgtagaacctaaataccatacataagatccatgtgctactcctcacattgccaattagttttgagatggaatctcgagaatttcacattgctaatgtgtggaaatataatagaatatataagatagataggctattcctcccattgccaattagttttgagatagaatctcattattcttatcttaaattctaaccgtttgctccatgaaaagcgaaggtagtttactctatcgtcaaatgatttcagattttcaaaagactctagagacaactttgtaaggccgtggtttggattcattcatcttctcgatcttccttttgaaagtgggagcaagatttcatctttgcaatagtttccattataacaaaagagaaaagagaccaatcaagcttgacatctcttccatgagataatcacttttcttttcctatacacattcacatgttgacatgttaatt

SEQ ID NO: 184912 - DNA, 3024 bp, Cannabis indica
atatatttaaatttaaaactaaattaaattttgtatattaaaaaaatataattaaattgtattagatttaatttttatcattattattactttctagtatataattgatgatgggttattaatattatgtgtggtgtttctttttttttttttttcagttgggatttgaagatggagatgagattgatgcatggggagaaattactggaggttttgttgctacttagacagttctttaattaattttaaacttcaatgtcatgatatttaagaatgattaatattatatgtttgttggacgattttgtctgaacataaggtttaatttaatcattttctttttcatgcatcaatctcatatataagaagaatattatgtttgttggacgattttatctgaacataattaaggtcttaattattttcttttttctcttcaaaaggtcatttttagtacttaattttaatttattgtaataagtttcaataccaatatatatatattgtatgtttgtttgttgtttgttgactgaaattcttttcaatttaatttatttaattatatatcctttcataataataataataaaataaaaaaaaaaaaacccttcactccatagattttattctaaaattttggggaatgtcctttttttttctttacatttatgtggattactaatatatttcatatataatgagtgttacattgaacaaatggttaacacagtttagcacaattgtgatgtcggaaaaattagttgtagttatgttgtaaaagaaaaaaaaaatagttgcagtagaactgagaaaaaaaatcgagcagagtatttgataaattataaattttaaagtgttgtgagttgttaagattttattataatgataatgatttgtaatgttataatctaatcacaaatataaaaaaaattatatttttatattttttatatatttttaattatttttttttaaaagtataaatttatatgcatttgataaaaataaattatatttttataatatgtaataaataaataaaaaatttaaaaacttaaatatataagaaactctaagttaatgtggaatgttaataataaaagtacaaaataaaaaatatttttcaagacaaaataataataaaaaaaaagagagagagatttaaatattatttattttattataatttatttaattaaaatattttgttttataatatataataagtgaataaatttttagtataattaatataataaatttattatttagttttcatcaaataggtttttcaaaaagttaagtttatcagctgtagtttttaattgtagcttctttataatttttcaataaactatttttgaactgtttattaatatagtctgttgattatgcatccaactcatcacatttatcccacttatcaacatgagattgccaacttggcttctatacccccttaaccaaagcctataaatagtttattgtgaataatcacttatcaagaatattaaattttaatgtttaatatcgcgttttcacgtcgtatttttgtgctaaaaattcatgtttttgtgttttgtttctgtggttttttgtgtcatgtcgtatttaaatttatattatttgtgctatgtatctggactcatatttattcgtgtcgtgctggacccgaactcatattctttcgtgtcgtatcgtactcatatttacctgtactcgtgccaattttgtactgtgaaaaagtctaacccaaattagtacaactttaatcgcaaggccctaccaccctatgagtaagactaatttcacattgagattagatttgaaccaagtaaatttggtgttcattgattttactttctagcatttgtttcaatcacaatgtgtttgttaattgttgtttatctgttaatatttgtttactatttgtttgatctgtttgagagtggattgtattgattagatcctaatataaagattgaacttcgagaaaaaagtgaggtcaacaattgctcaatcttgaaaagctgaatttctaatattccaaaccttatatatccaaggttaatccaccaattttgttactcatatatatatgcattgaacctattccacataagtatgtacttttataaacttattaattaagcaacaaaaaataaattaataaaattatgagtttggggtgattgcaccgcccaattccgaatctttgaaatcattaattagtggtcgtggcggttaacttaaatatttatttaattaaacatttcaaaatattcccatcaatatttaatatctttatatattaaaagtgcctatctaacggcatttcttggtttaacattcttggtttaacagaatatacttaaaaataaaagaatattctgttaaatttaacgattaggtttgatctcccgttaaacccaaaaaattaaacaatcttttaaataaacaatcttttaaatattaataatctctttttaaattaaaaaaatcatcttagccacatatctctctaacaaacctatcttgggagaatattaataatttttttatttattttttaaaaaagaaaaatatagataaaatatctagaaaagataatataaaagaagattgattgtgttggcttagagatttttgggcttgggcttaaaaaaataataaaaaaaaaagatgaaatgggctgtaattagtatttaccttatatgtttgtgcttatttttagttttatttttaattttaccaccaagaggagaaggttgaaaaatattagaatatgaaaatattattggtgcttattagtaatttgcaaagaatgtgaaagtctataaatatatagttgtgtagctattattagatatgaaatgagataatagaacttttttcaattagaagattaatgtacattttactattaataacatacattattataacacaactatgttttacttactaaatatactgacacatattttatttttataaaacaaaaatacgttcaaataattatac

SEQ ID NO: 184913 - DNA, 1491 bp, Cannabis indica
agagtctagaaatgtatattcatattctggaacttacttgacaatattacaattaaaaaaaaaattcaaggttgttccaatttccaaaacttccctgaagattgtacaagagtctagaaaaaactacatcaaatcaaatcattccttttctccttaattaatttatatattaattaagatccatcccaatattttccactataaataaactacttcagttaaatccatcacattttgtgttccaaaaaaagacacatacaaggctcatacgacatgtcgtttgttcccaaaatctgtggtggcgaagaagtaatcctagacccattcctgtcgttgatgaacaagtgccctgttctcaacaccccaactgactggaaagagaccccgaaagcccacgtgttcgtctccgaccttcccgggttgaccaaagaccaagtcaaggtcgaggtcgtcgatggccgagttctgcaaataagcggagagaggaaaaacgacgagggtgattattgtgggttacccaaagagcagagtcgtcatcatggtgacacgtggcatcgcgtggagcgttcacgtgggaggtttcatcggaggtttcggttgccggagaatgctaaggtgaatgaggtgaaggctacgatggagaatggagtgcttactgtcaccattcccaaacaagaagtgaaaaaaccagagacaaagcttgttcagattcaagctaattaatttaaattaaggatatcttatatataattattacaaattaataaaagaggagagtgtggtgtgtgacttttgttttttgttttttgttttaaaggattgtgtaattaattatgaataatatttatgttggttggttttattactatgaataaataaataaagtggtttctcaaggttcaaaaatgagtaaatattaagtcgctcgaatggggggttattccttttatggaaggataatataaatgtaattcttcttaatttcaatactaatttttttgactgttatatggctttggataacggttttgcatggcactttactgggttagaactcacaaaagacaacaaacttgaactcttttaaaaagattaattatgggatgtggctccattgctaccatgaatgatcattggtgatattaaatggaattttaatatagtatcacaccacacaaacccggctcaaatcagacagagcacgtgtgtgggtcaagtgtgtgagtcttcaccaattcgtacaaaattgagtactctttggagtctaaactcaaatgccaaaattgcactctttataactttataaataagggttcatattctatatggaactctttccacttcacacacaagaacacttatatattttgttaaaagattcattaaaattcaagtattaatgaattctttccaatcaaaacaagaaaggtgtagctttaaggaataaaatgcagatggaaaattttcgaagcactcttgactattgtttac

SEQ ID NO: 184914 - DNA, 5903 bp, Cannabis indica
tgtgacagtatttttgcaaaagtgacccaaatttcagtattttttttaaatttccccatatttcatggttgggcctgagttaccaggttttagcccaaatcaaaagcccaagaagaagttcttctccgacggtggactcccgcctctgaataatcagcaagtaccaacctccaaaaccttgccagagagagagagatgagctcggcggacctgccaacgaaagaggtgaacgtattaaaagggcacgaaggagcagtacttgccgcaaggttcaacgccgatggaaactactgtctgagctgcggcaaggaccgtacaatccgtctctggaaccctcaccggggaattcacatcaagacttacaagtctcatggtcgtgaagttcgagacgttcatgtcacactgttagattctttttcttgtccgggtttttctgtatttgaaatcttcgatttcccaatgtttattcgattctgccatttccctcaacagggacaactccaagcttatttcttgcggcggcgatcgacaagttttctattgggatgtagccactggccgtgtcattcgaaagttccgcggccacgaaggcgaggtctgctttttttttcgtttcttattttgaagaaaactttgtgatgttttgtgtaagggagttgaattttgttcaatttgcttttgttttaaaggtaaatgctgtgaagttcaatgaatactcgtccgtggtggtttcggcgggttatgatcagtcattgcgtgcttgggactgtaggtctcatagtaccgagccaattcaagttacgtttctttgaacttgtgcaattgggaacatattggtttgaagcggtttgttttttattggtgaatttttagaatttgattcatttaatttttttggttactgctgtttgcagattattgactcattctcagatagtgtcatgtctgtttgcttaactaaaactgaaattattggtgggagtgtagacggaactgtccgaacttttgacattcgcattggtaggtaagttctgttcatggtgaaattgttataagtaacatgatttttgtgttcttggagtagtctgtgtttttgaacaattggaagtttcttttctacctgaattataattcaatttccttttcttgggtttgctcgcttgaacactaaacttttgcattgaattcttatgggatgtgttaatgagtttttctaaaccttcttcttctctattatatagggaaatttctgatgatttggggcagcctgtcaactgtatatcaatgtcaaatgatggtaattgcttattagcgagctgcctagattcgaaattacgtcttctggataggtaaaaatcattgtgtcttcgtctatatagtcctttaatttaatctaataagatttggactgacatttggtgtaattattttacgttataggtctagtggtgaactgctacaggaatataaaggtcatacttgtaaggttagtacaaagattactttttctctgtttagtgttaaattgctacttccactgcgagtgacattccttttcttcaaaaatttagatcatcattttgctcgagtttgaattgaaatcttatgcttctatgatatgaagttgatatccttcgtgctcttttgttactcatctatcctgttacttttgtgtctcaagttttttttcttactaaataggataaatcattcaagtggcttttattctgtaacagtcatacaaactagattgctgccttacaaacactgatgcacatgtaactggtggatctgaggatggtttcatttacttctgggatctggtagacgcatctgtggtatcaagcttccgggctcattcttcagtggtaaaggctgcatgtttccaattctttctggcagattttgttttaacaatgcataatggtcattgtacttgtaccttattcttgacaatagtttctgtagggaaagtgatcaataattctttagtttagaaatggattaagcttcccatatgtttccaagaatgagagggccttgttgtaattatttagtgtactttttccattttagatatccaattaagtaccttcattgtaaaattcatggaggatggtccaattaattacacatgatcttttcctccacgtttgatagtaagttcttttattggttttactctccttagtttatcaaatttagatagccatgtgctgacaaatcacaattttaagttctgcacacttaagctggtcccccattcccccagcctaacatgtagagttttggtttagagggatatcctagagagcgtggctttctctttcaattagtttccctttcaattagttttatagaaacaagcttttaatagaatcttgggtatgttttattttgttttgtcttttcttcatattgtttttctttggcaggtaacaagtgtgagttatcacccaaaggacagctgcatgatatctgcctccgttgacggcaccattcgggtatggaagacatgagattttaacattgcaggattttttaaaatcaattattattattattattattaattatcaaagatcttttcgtgttccttctcaagactcttgaacaagacccatttagaaatttaattgcattatcaaaatttctattttaagctttgtaatgaagcattgatttgccagtcaaaagaacaaatgcttggtaattgccaaacttaatgtcatctactggactttataaatgaaagtaaccttttctttgctagtcaattcatttatctaatttgtttttacacaatgaatgtgttttcaatgtatcagtccaataaaatatgaataccatacatattgctatgaatagtataaacaatatactgttcaatgttcacctagaagatggagatgcttgaattgaatccaccatgtttcataattaaaacttgcatcgaccaagaatcaattgtcacatgggttccatgccccaaaaaacaaatttaggcatttctactcaaacaactattgaacaaggtgagccttctttcgaggcttgggtctctacatttttttttatttgttttttttttttttttaatttgcaaatacatatacatttgtttgatatggtattttgactcttttaggaaactttccaaaatcgctcactcatcccatgaacataattgtgctttgctcatacttacacgtatattgggaaaaaaaaacgtcaattgaattcgatggtaaaaccatccaatgtcctttactctttttttcaggataatttattctagtgaccactctttcaatatttgaaagaggcagcttcttatgtgttttcaaggaaacgtagattacttttcatttttaattagactaatataataataaccaattgccataaaactttgtattatcttggatcatggctaaagatggtaaagcttcttccgccgaaagtctctgactctccgtctcacaatcacaaaactagattagttaattccatctagctcggttgcttgactgttagactattcgtcttggacaattacttttacaatattcacattatatatacttagataccatggaaaaacaaaaatagtatgtatacttcgtggggcattttattaaaataaaggggggtagtcaaaaggaaaacatagaactggagattacgttgtttggtttgactgtagagttctgagagagtccttaaccagctgtcttattcatatgttttatttacaactcaacctaataaagtaggaaatatccaaatacatttcaccctccaacaaacttcactacttgaaaacaaataaaactaattattttcttcttggttaataaaagaattttatcgaaataatggaactttttttaaaaaaaaaaataccaataatattggaaattttactttaagattggcttttataataaattaaaatgattaattggagtttggttgggaggaataaaaatataagaatgaaaatagaaatagaatagaatcaaatttaaaatgtataaaaaaaaaattaatgaaaatattattttctttctaaagcattagaattatcattcattttattttaaaatgtactaaaattagtttattttcatttcattacctccaacgctttaaaggtgattatgtaatacttttttaattaattttttgtttttttaattagaaaaattgaagtattttcaaatatgttctgtaaaagtgtttttaatttttaaaacgagaatcaaattattttctttaatttttcctctttcacaaaaaaataaaactaaattttaaatttaatttctttatttatatatataattgagtgaagaaagaatagagtgaggagaatagtgagaaacaagagagagaatgatggcttaacgatctcaacaagcaatctatgtttcttaatcttctgaattaaatttttacgttcactctagtttataaattttcacgttcactctagtttataaatttttagtccgttcagtttataaaattttctataaacttttgcaggatttggacctcatattcgacttacataaaaataaaaaataaaaataaaaataaaatttgtaaaatatattgttgttttttgttgttaaaattaaaaagtaaaaatagttacataataaatttttggcttttaaaattaaatattctattttcaccattgttacaatgatgatagaagtgatagacgagatctgtgatatatgttctatattagtttgatattacataatatttttgtaatgaaaagaaaataagttcataatatttatatcaatcttttaaaccattccatactgcataaaattaagtttgtcataaatataaaataagaaacactaaaaaaaaatcatgtttagcatcatttaaaagattattgtttctctacaggttgtgtactttaattggagaattgttctgttaaagtaagttctattattttgaacaaaatttttaattaataaatcttttgattttatccaaaaatatgttatattaatattattttatttaatgtaatatcttttacaaaatttgctaacatgtcattctgttactatttaatagttgtagtgtagcaatgctcatataatacttacactgttttttccttttggtacctcttttaatttattatttagctattatcaatatcaaatataatatttgacaaaaattgaccaaaatattcttatcgaatattaaaacaatactacagatttttttagggaacaatacttcagatttattctttggtacacatccaaaatatttgatatttagtatctcacttataaactaatatctgaaaatgggaatatttttaattcgaataatataatttgttccaaatcaaaaaaaaaaaaataataatataatttgttgaatttaaaactgttttatgtttatgtttccagatttggactctacccaatcatttgattagaaggcaaattaccccaagcccataacaattacaagccttaaactttgccctttttggtccaaacccaatccacagagagtgaaacaattaaaaaacgaatatataaacggctggtttccgtacaaaataccttttgcaacgaaaggtaattgacttgacggtgggatttgctgagctggctccaggctgtgcccccctattaccctttccaccaatcaaaaagcaattccggtcaattgtaatcaaaaatagaaaaaataggtcagtagctagatttttctctcaattttgtgtgttgtgtggttcacagttcacttttgcacaacagtaaaccaaactgccagctgtatcctctctttcacaaaatgtcactgtcatctcatcactcatcagtatgctcgaatcgggt

SEQ ID NO: 184915 - DNA, 2550 bp, Cannabis indica
tttaactgtatattgctgtggtgatgctctatctcccattgcagggaacatgcctcattctaaattttttatatcaaaatgatttggagaacaaatttattaagtagaagttatagatgagaggcataacataacaagtatttgttttgaactatagaatcaattcaatcaataagcgcaatactttggctggctgtcttgtgaaattctgggatttcagattttttctgttctttctagttatttccattacctcgtatatctatttcttgtgtcattaattacgaaaagtggggtcatttgtttaaatgtgctaaacacaattgaatgattttgtatcaatttacatgataggttcgggagtgtgaatgtgacatcataatttcgttgttcttttcctcagtgggtggaaattattttattaaaatacttttattccaataaagtggattctttacatttttgaatttcactactgatagattgaggtattaatcagacagaaaagagacattatgctttgagagtaagaaaagacatctgcacctggatttcgatcgaaagttaagtagcaagtgttactgacctaaattttttgtttggatgtttgatgtttttgtggctgatcctttaatttttagattagacacgaacaaacttatatagaaatggcaaaaagggtctagaagtgtagggatttcaaggagaagaaatgatagaacattgaggccatcaaagcccccatttacttaactgcacttggaagtatgcatgtcgttgtggatttcctggaaaaaaaatagtcaaatctatttgagctggtttcttggactgtagcaatttctaggctatgtttggtataagagaaggttggtaaggaggaggtatagtagcttttttttaatgttgtttcgtatttgaagtagatatgagatagttaattgaaataatgagtgactttaggggcaatttttttagtactcaaaatttacacacttgtgtaaaacaattttatgccacctatgtttttatggtggccatcgctgatattttttggcggttataaaaatgtcgcattgccgagtataatattattaaaagttgtgtcacaatcaatactcttttaaatatttatctattaaccagtttgaagggtaattatggtgtttgaaaacttttgtttcgtttgtttccctcatctttccaaaatgttgattgagttttgttggcaatgggggtgccttttttttgtttctatcttttcttcaatgtatctgtcccttccttccaacctctatatccaccaaaaaatcactcatgccaaacatagcgttagggttttaagatttggtatttaaggagttttgttattcaaacgtaggatctaaactaaataaattataccgaaccaattcaatccaattacaaaaagttgaacaatcaattgaattggactggatgtgaatagttggatttttaattggattgaatcagttattagatgatactttcaaaatccaattaaaaaccgatttgatccaatctaattacatatattatatattaaaaaaaaaatactatatttatttatatataataaaacaatatttaatttttacttgtttattaatttcttatatatcttattacacctgattaaaaaaaattaggatagtttagtttttatgtatgtcttttgtaaatgtttttagttaatattaacaattaagtgttgaattgaaatccaattaaaaaatcgatactaattggattcgattagattggatcggattagaggaaaaatgttggatttgattggatccccacctctaattcaagttatcctctttccttaagcaaaacactagttgtttgtttgtttatttattttttttccttttcttttggaataggtttgaagaaataataacagtggttctttcaggattgtctggtttcctttgtttggatagtgttattcaagcaaacagctaatagtatagggagtggctggggttagaaagatgttacataatcaactattttgactaagcacaatgtgtagatagcatggttgtagatgctctaatatgataaccatttacatgtatgctatgcttatatgataaattatcacttgtatgctttgctcatattcattttcattgtaaaagcatctaaataagaatgatgttattgtttctcctagttttatcaatgaatttgttgcatagttttgagccttggctgttgtgaaaattttatgagggttttgtttgctccatatcaaagtttaagtgtattgagtgaacttataactagagtttgatagataaatctctagcatagcaatgtctgtatataatagatgtaacaagaaaagaaagaagataataaggtgtttactcaagtattggatatggataagatgggagttgtcattgtggtaggatatgcttggaattcaaatagactgtatgttagttgaatttttctttgtaatgtttatatcatttagctgcgacataattcttctacatatatgtttgc

SEQ ID NO: 184916 - DNA, 6316 bp, Cannabis indica
ttttaaaaaaaaaactagttagagaagttataaatttttaaaaatatgttttattatttatatgttagatttaaaaaggtaaaaagaaaaaaagtagccacgctcgtgagtggacttacatagaggcgaggtgaggcagtcgcccaccttaaaaaaaaaaaattggaaaaaagatatatatgtattttagctagttacaatatatatttctatataaaagtgatatttaagaacgtaatacaaactttggtgtaatgctaaaactttttcatgttcataaagaaagtcagtcatgagttctaatcctaataaaaatatgtttacttgaatatataaatttttctttttatttagtatcttagttattaaatctaatatttttattgttacttttttttttttttatactaaaatataaatttgtattaatttttaacatattatataataatgtaaaaaacataccccctcaacaaaaagtgtgatttacctcaacttgaattcagggtccacctatggctatgctatttggtaaaaatggattgctctagcctgattattctattataatccaacaatattattattattattattattattattatttgtttaccatttgacaagactaattggaaggggcatgacaatgacgaatcgaagtttaataaaataatttggtttcatacatattctgcttttcatattttcttcccttaaaagggggaaagaaaaacattcaatttgtcaaagcaacaaaacattattacatttgtgttctgttgttgaaaagactaaacgaaacccaaattggtgcaatttatcaaacataaatgctttccactttccactaatctttacctgtaaagcccacaagtcgatgtactgctactatcaactatcaaaacaaaggaattattagtgaaaactaatcattactaagaataacaacttcagtacttttttttaatgaaaaaagaaaaacttacaaatttataattctttatttttttattttggttttttttttttctagtagattgtaatatcattgctggtctcatcattcttgtctcgtgaaattaaaaaaaaaatgggaaaaattatctgaactacatgttagtttgtaaataaaattttaagggaaatttgttattcaaatgattagaattgttctcggtaaatagttaattaaaatttatagatataaatacctaaatttaaaaaataaatacccactttgactgctatgctagttgctgattgggaattagaaactaactaaaagcatacaccattggggaacaatcaatgaggatgtggttgacatggttattcacttcttcacaaatttggacttgccaaagttcataaacgacacttcaattgtgttgatcccgaaaaaagactctccaacactagtgactgactaccgtctgattgcgctctgcaatgtggcgtacaagataatctcgaagatcattgccactagacttcggccattgctacataaattaatatccccgaaccaagctgcgtcgttaaaggcagacacattgcgaaaaatacaatgattgcaagagagattgtgcactccatgagcaaaaaaagaggtaaacgtggggtcatgctcataaaactggatcttgagaaggcttatgacaaactcgattgggattttgtccacacggtactcattcaatgcgggttcagcagcccatttacggaatggattaaagcttgtatcaaggtggaggaaattaagttactacttaatggttcgatagttgggaaattcagtccggaacgaggtttgagacaaggagacccgctgtcccctactctctacattcttgcaactgaagttttatcgcggtttcttattgaaaaggagaaccaagggcacataaaaggtttcaagcttgctcgaaatgggacccctattacgcacttaatgttcgcggatgatgttattctattcggccaagctacagttcgagaggcaagaggattcatggattgcctcactcaatattgtaactactcggggcaatccataaacctccaaaagtcgacggtcttcttctctaaaggggtaccgagtaggaaggcccaagaaattgcagacttactcgggatggggagaatgaacaggcaggcaactcacttgggacttccactgttcagatcagtaaggcgaacggacgacactcaacccttggtagagcgagttctaaagcggattcagggttggaaaatgaaaatgctttctagtgctggcaagacgtgtttgatcaaggccgtggggtcgagtatttccaactatgtggcctcctcagatgtaattcccctagccatagaaaataagattgataagcttcttcgtgatttctggtggggagatactgaagaaaaaaagaaaatgcacacaatcgcgtgggagaggctctgtaaaccaaaatcgggtgggggacttggctttcgagcaacggaaactatgaacagggcattccttatgaagtgggcttgaaaaattttgacggaggagcaagggttatggagccaactcatgaaggaaaagtacttcaagacgccgaatttcctggacctagatgccaaaccaactgatacaatcctttggaaggctattctgcgtgcttgtgaggagttaaagaaaggtatttgtcgtaggattggatatggacaaactacattcatttggtttgatccgtgggtatcgggaacccaccgtcaaccatctccgcgagtgctttctgtcgaaggagtgagcctggttagtactttgattcaaaataatcaatggaatagtgacatgatcatgcaatggtttcaggaagaggatgctaggaaaatccttaacatctcccttcctagcagcccaacacatgactcttggctttggttacctgagacaagtggaagttttcagtgaaatcggcctatagggtattaaagaaccatgatcctagctcggaaacggagaggaaatggaagatcatttgggggacaagcatccataataggcttaagatgatgtggtggaaaattctttccaattttcttcccaccaaagacaaacttagctccttcattgccttacctgatactaagtgccccctttgtgatgctgagaatgaaaacaccttccatttgttttgggaatgcaatttcgcaagaattacttggcttggaagtagatgggagcttagaccggatacttttcatctccaatcctgggaggaatggctgttatggttctcaaaaggagaaaacaagccactgtctctcgatattaatcatctcttggagggggcagctgttatcttagagcacatatggagggagagaaataaaagaattcatgaagggagatccactccagctgaactcttcacaagaacaattaacagccgtctaggtgaaatgaacgccttacgcgatgctccaataggactgcaaacagaatggaaaccgccccccttggggtggatatcctgcagtactgacgtctctattggaaacacacaatcgaccggagaaattgtcttaagagatcacacaggaaccatcctcaagatcataacatttcagacaaattgtagtgaagtgctccctggtgaaacccacgcagtgtgcaaaagagctgaggcagtgattcaaatgggatacaataatgtcatctttcagtgtgattctactagagttgttgaggcgctgaatcctcatcacattgatattctgagtatgcacttcaacattcaggaattggccaggaacttctcctttttggctggcaaactcaacctttgtgaggtccaatggattccaagggattgcaatggtgtggcccatgcggtggctcggtgggcaaatcggaataacaggtttgggactttcgatttgtccaattttgacgatttcctgcaacatgttgctgcagatggtcgtgttgatctctgagtttaactttggttgttttttctttcttttctttatgttttgttagtttattaagcttggctttagtttggcgtttgccttttgtttgtctttttagtctggattggcagtctgcttcttttttctttgccttcggaccttgttgttctgtttcttgcggttcatgggaccattaatcaaaacaataaataaataaataaataaataaaaactaattctaccacgccttatgttaaaactgtgtctttacaacagctagtccgaatgattaaagtgcgcgataaatcattttgaactagaaaattctatgctatcggtacatgaatgtccatcatataatcagtataatcgcaagtattctactataattttggacgatttgtatgtataaaaactctcaagggatttatacacattcataataatccggaggggatatgattttgtcccgtgattgtattttcacggaatgcatttcgtgatgtacggcagccgtcagatgagggacttatttgatcttacagctgagattgatctaggggtaattagggttaaaaagtagaaacgtactctgacattcatttaatgtatcccgagactcatctaatgtaccacgatatacattccgtgaaagtacatcacgtgacaaaatcgcgtccctaatccagagacccaatatgtaagtaacacaaagtgaatgtgtatgttcaccattactaagaatatgaacatccaatgtgcgagtagagtactcgcacccgttcgaattattaattgagaacggttaaaactattcattcatttattctaggaacgttttatttttatcacaattaagtataattaatgttgtaagttatgtaactgaataatcacttacgttctatatacagtggtgatttaatacgaataagactaacacaataatcttttcaaagtgaactaagcaaactaaattttagctgaaccactataattttttggtgttatttatttatttgatgtttatattctattaatcgttgtgttattttgagtatttgccattttaggtgaatactcgcagttctataaatgagtgttcttatttagttcgagtactcgggatttgttggattgtgtaaactcctccaacaacaccatatagttaaggtattaagttgtagaaaaaagtaaaaagagaattgagtttttctatataaatattttttggaatcaatagtgaacggttataacaaatttcttaatcttagtatgagattaaagcatgaatttttgaaggatggaacccgaactccctaagtgttttgctcattactggtaacttatcttaacactagtaaaatttagtcttaagttcatgaataggtaacaataagtcaataaagtgaatgtggtaatcaattatcctatttaagaatgagtatatgtggtgaaaattgagggttaaaattagaaagttttttaatagagattaagcctaagaaaactcatttaagcttataaagtgtctaaagtgtagtgagatactaaaattttacctatatagactagaggtggtgccacttcttatgagaaatgggattattctctaaagagtccatgaattagaattttttacatggtcattaacagtgcaagagcgagacatgtggtctcaagtgagtattaataagggtgtgtgtattatcactgacttgtagtaacagaataatggtttaatgctacagtaactaaaatttcatcaaactttgtggtaactaaactaatgtaagattcaaatcgaaagatattttacaatgcacttacccaagacttcaataaaagtgtatatttattcaatcaaagtgggagaatgttatattttgatacaatatttttgattgaattaaatacatgttacaaagttacaagtttattattaaaatctaggggaggattgttctatcatttttgaatagtgtaatgtataaattaaatatgtgtaataaacaaataatatgttacatatgaaaatctatattagatttcatcattttgtaacgtatggtggagttacatgttactatatgtaatctccacgattatcacctatattaagtgtgtcaaaagatgttacacatcttaatttgaaatattaatgcaaatttcctataattatcgcttagatttattttgagaattagcagatatatagagcttatttttagaaataggtttttaatatgacttcgaattaacaaaaagtttttttttataaaacttataagaaatcgaataagctttaaaaccatataagatcattaaatatcgatgagaattgagggagttattg

SEQ ID NO: 184917 - DNA, 2363 bp, Cannabis indica
ggatcagaaatacgtatactctcacatatcagcaatctttctcatcgctttttcgagttcaaaatttattacaagacatcaagtcataacattttcgaacgtactcagctctagaagcatagtcattctctatagaagaacataaacctgtaacattcacacattgtgatcaaaagcaattgagatttcaggcctagaatctcctgttaaccaaaaaaaaagaaaaagaaaattagttgactcgattgcgttactgataccaatccaatttgaatctaaactgaaatcactgcaacaataaacacaaattcatctaataacgaatatgaaaaactttgtaaagaaaataaactgacccagaaagggaaaaacttcattgtttaacttcatcggacggcgcaggagtagggtgagaggaatcttgatggctgagagaagggagagggttggaacccttgatgacccatccgagggcgaagaaggaaactccagcgagaatggcggtgccccaagcgtgagagtaccacttactgtattgtctgatggcgaacctccactgatccctgagcgtggccggatcaggattggtggagtcgggtggattggggaaatgaccctttagggctgagaagctgctattggctcggccatggtttgtttggtttgatactttggtggaagtagatgaagaggaagaaggagggttctgagggcttgaggggttttggggttcactcatatcttcaaattgaagtgatgatgatgactaaaaacttgaagacttatgtatcatttgcctagtgccacctgtcctttacataaggtgttgccagttggatatgtggttgtgtgaaagggcagtattcaatctaattcaattgaaccgaacacattcaatctaattcaattacaaaaatcaaatatttaattataattagatgttaaaagttagattctatttaaattgaagctattattaaacgttaatttcaaaatttaattaaaaactgatccaattacatttatgtaggtgaagaaattattctatttatttatataaaaaaatatattaaaataatataatatatattaattatatttttattgaattttttttttaatttattaaaactataacacttaattgttaaactaaaacaacaaaacaatttttttttgtaacaaaaaaaaaaaagtctttaattcaaaacaagcaagaaaacaaaaacaaaacaccctaagctcaaacagccacaccacactaccaactgtctattatattaattttatagttgtctaatccccctttgtccctgctgctacaacttaggattctatgtttaacaacaaacctaatctcattgctaattacaccagttacatttcagctcaaaaatacaacacttacaatttttccagacgaagtacatggtagctaacacaacagtattgagcaccttctttttcagattttttgagggtctagaaaaccaatctttggagttgctcggccagttgaacctgtcgcaccagttcatgacctcttggataactttcaagtgaagcagcaactcacaaacaagtgattgtgagtttcccacacagtgcagcacacgagacaaagattagtatgtatcgatattattctacttatattatcccttgttagcagctgatcgttcactatttgccattcgataaatctgtattttggcaatatcattctattccatatgttcttcgcatagccagcattctgtacttgaatgaaggaaacatagaaacttttagtatttacctttccttacagccaacttgacatcatcttcaccaattactgaacggagacgaagaagtttcttgaaataccaacttgcgtcttgtttaaaatcagctacccataagctttgacccttcaagtaaatagcatcgatccaccgaacccataggttgtcttgtttgctcgatatagcccatagatacttggccataagagctacattccatttcttccattccctaagtgcgtgcacaactaattagctcatcattcaccctaagtgcatgcacaactaattcatgcgtaactataaaggcggaatgatttgcatgaataagagatgtcttaggaaaattggacagtaaactaaaaatacatcaaatagagccctttaatcattacaaaaagaaaatctcataaaaaaggcagagatcaaatctaaacagttaggctccaaaaaaatgagatgaagtctaattctggcaaccaatccaaagcaatcattataagagctacaactttcagataactgtgagatttccttgattctatcttaatccaaccaagaagctagaactgctgc

SEQ ID NO: 184918 - DNA, 1954 bp, Cannabis indica
aaacaatttttatggttttgttttttccaacaccgagcacagagtttcgagtaatttacttgtagattttgattttgagtggctttggtgaattttacagcaaacagaaccaacaagtcctgatccatgcgttgatgaacctgcacggccgaatgttcattcattctgcaagattttgacggcgtctgatacaagtacccatggcggcttctcagttcttcgaaaacatgccactgaatgcttgcctcctctggtattaaacttcccatggattggatactattctctggcatgagcatgctggactttgtttggcttttttgtttgcttatatacctctttaatgtttttaggacatgacacaaacaacaccaactcaagagttggctgctaaagatcttcatggctatgagtggaaatttaaacatatatttagaggtagtgagatcaaacatgtattcactaattaatttacaggtttaaactatatatcatttgaaaaaaattacccccaacgaagaatagctagtaggcatgttgaattgcttgtaaatgatagttgttcttgtttggttgccgaataggccaaccgagaaggcatttgcttaccacaggatggagtacatttgttacttccaagagattggttgcaggcgatgcttttgtgtttttaaggtatgtgcacttgtttattcttgtgtttttcttagtttaaatttggtggaattattgttagctgattagctttgttatgtaacaaaatttttgaaggggtgataatggtgaactgcgagttggtgttaggcgtcttgcttgtcaacagagtctcatgccttcatctgtgatttcaagtcacagcatgcatcttggtgtgcttgctactgcttctcatgctttcaatacccgaactctctttgttgtttactataagccgaggttggagaatatcttcttttctttttttctgtagatgttcctaggtgaacattgcattgtaagcagttaactttgtaagttttccaggactagtcaattcattattggcttgaacaaatatcttgatgctatgaacaataaacttactgttgggatgcgctttaagatgagattcgagggtgaagactcacctgaaagaaggtatttacagttatatattggctattgatgatgttaattgttttccagtgaataatgagttctaaactaattttctaggttcacgggcactattgttggggttggagatctatcttcacaatgggctaattcaaagtggcggtctttgaaggtatgaaacaattattttggcccaaatttcagtgtatgtattgattgcctctcattaattttgtgtgttctgttttagattcaatgggatgaacatgcttccattccaagaccagagagggtttcaccctgggaaatagagccttttgtagcttcatctgcccctctaaacctaactcaaccagtaacaaagaacaagaggccccgacctgttgacattcctcaatctggtatgaagaactatattgtaattttcttttcaatgagtggatgcaatttacgattgctaaaatgtacgtgttaattgaattatagaaattactctcaattcggctgcctcgtctttttggtatcaaggatcaacaacacagtcggaattgacacaattaggtagctctgctgatgtccaaagctctgatagtcaggctgtgtggcctttgaagaataaagatataagtaacgggaactattatggctcaatgtttcgctctgaaggtatctggccttctcctcatgttggtatttctttgaatctattctcagaatctacaggagatgccaagactgtttctgcaaggtctcttctttctggttgtgctcctctatctcatcaagggtaaatgaccagtatgaaaatgtcgcaaagctcgatgcttctgtaggttgc

SEQ ID NO: 184919 - DNA, 4294 bp, Cannabis indica
ctaacaaagagtgttagcatacagaagtttaggcacaacctaaatctactcaacattaagtaatgctaatctggtttttgacaaattttattcctctattttcgaaagtttttttgattcaagagattgaaccaaggaggatttgttgtggttcgagctacttgatcgctactatttgatgatgtgacaaagcttcattggttatgtatcattctactctaatccgagaatggacaattaaatttttagttagttgttagtgaagtttttgtttttaattttttatttgttagttagttttgtacaaaggtataaatacctcatttcacttccattctttttagattgtaattctcaatttcggtgggttgtaaattgagcttgagtgtgttcgatcacaagacacactgtgtgaggtttctttgtaatttgagagagttgttcaatttatgttgttctcggatttattatcatcaataaagtttcaaccattaaagattttgtttcatcttgtgattcaattttgttccaacatatctatttttttgctttcgttttaattcaagttcagtttctattaatttgttgatacattgttactttgatttttgtttttgagtgtacattcttgcacaacacaatgctcactaataaaagcacatatcttaatcaattctctttattattcttactctattatattttactaaattaagcatcacataaaatgaaaccaaacaatgtaataatgattacattacatttcactgcaaaattgattaaagaaaacaaacatgtgcttaatcattcacattaggtgaggtaaaatagctaagatgacaaaacttgttagatgagatatttactgaagcactattcattagctacatttagttacaactattcatgctctaaactattattctataaatctttctctctctctttctaatattttagagaaaaaaaaaagttaatatgatataaatatgtgatatagtataaaaataaaaagttataaagtattttaaagggtacgctaatagaataaaacaactgatgggagtgctctaagtttgaggaacttgaaaactgaaaagtttggttcaagtgaaaaatataacgagtagtgttatcattaacatcctattacaacttcttaatcaatctctgtgctcgaaaacacataccaaaatatgttttttcaattttttttcatggcaatgttctttatagttacaacattattcttgtaaatttttgaatatttttgaatagtttgtattgttgaaaatagatttaaaattttaagaactcactttttgatactataaactatttgaaatatttcaaaaattttacgaaaataatatagtaactataacaaatgcaactataaaataaatattttttaaaaaatatattccaacatataatttcagcgtaaaaattaactaaagagtagtaattaacactcgtgggaatctataacaaacatttcattgtcaaaattgagcaaaacattaaacacagcatcaatatttttttaatgttgttctttccctttatctcaatgaaaaagacaactcttgtcactagccttttctttttaccaaatcagaccaaaaatcaattataactaccaaccacaagaaaagcaaaaaaaataaataaataaaaaagaaacaatatacaacttcttttttttattaatatattttgttccacctgaacacacactccccaaattatccaccaaacaatgagccaaatacaattcttccaaaaaaatcctagctgtataaatatgaacgacatttgaataaacaaaaggacaaaccaaacccaaaatgactattttaccctccttttttttccaactaaagagaagaaagatttggataacgttggcatcgacgactgagaaagaccatgcaatcatctttgggacatatcgtagggacataaacgatctcatcacaaccgtccgttctatgcctcttgaaatccaaaagtgtagaaaacatagcgatgaacaataccaaatggtttaaggcatatctttggcccacacattggtgggccccagctccgaaagccaaataatttcgtttataaattcgatcctcttgcctctcctccgagaatcggtccgggtcaaaccgatttgcgtcagtaaacccttgtaaacacgactcgtaagtagaagggaacacaatggtgccttttggaattgtgtaagattcggtcaatggaaagtcaactgcggcaatgtgtggtaccagagtcgcgggagctctataccgaaccacctcacgcgcaactgtgtgcgtgtacttcattcgcgacaacatttcccctgtaatgagcgagtctgattctggattccatatcgccaagacctcatccctaactctttggagaacatcagggtgagattcaagcaatgtcactgcccaaagaactgacgaggtcgaagcatcttgagaggcaaagaggaaatcaaagaggtaagagcctatatcgacatcactaacgttttcagctgccatatcttcctcctttaatgtctcttgcatccaaaaatcgacaaggcaagttggttcctctccttgcatcattctctcacgactttgtttcgtgcaattactaagagtatgtacaaggcgactcacggcgagcctcgcattacgaaatgcagtaccgggaaaatcaatagggagtttcatgagtccaatgttgaaaaaattatagtcaactttaaaaacctcgcgagcctcaaggcccaaatacggcccaacaaagacagtttgagaggtttcgaggttcatgtcacgagccaataagcgaagaggaatcgacgctggagccgagttggaagaaagtctctcccatttcttgaggtggtcgaggattataatttgttgcaatgtagtgtaggtggagagagctctagggctgaaattgggagccattcgacgacgaacatccttgtgctcctgaccagtcatgtagatgagattgtgttccccgaagagttttttcccaaagggtgtccgatagggcaaaagcatccctaacattggcaaataccttgtgagagagttcagtgtctctgatgaagacaatgaatttaccaatgatgtagttggcacaaaagccaagaccagaggatttggccacttcagattggttgtcccaaaagtgggtagggtcacgaaccaacgcaatagcgtttccaatgaatggaagaacgacaagtggacctggaatcgaactcttctttacaaggtacaagatttgctccactaataaaatcaaaactactagagtgatcaagtaaggaatgagtgacataaataaggaatccatttattttaaacaaaataaatttttcgtctagcttaaggacatgctaattcgacacatggcaactggtatgaaaaaaaagatccccaagcaaaatttagtcaaagaaacttatcaaacacccaaaatcacttgatgaaacattccgccaaactcctgaaaataaaataaaaagttggtaaaattaaaaaaaaaaaaaaatcaattgcagaatcatttgtggcataaatacttaattttaatttttagctaaaataaatgcttaagtttaaattttaatggtaataatatctaatttgtatttcttaaacgttaaattggtacaaatcattaaatttttattttttatttaataatatatttaaatatatcaataagaaaataatacatagatattaatttgatgcttaagagctaattatttacataagtttcaaaaatataacttaagtatattattactgttaaaaattaatcgtaagtattcatttataaccctaatttaactttaagtatttatgttacaaattaattttaattaattttaattgaatgtaacataagactcattctcctaagttccttcggttagtatatataaaggatgtgactaaattaattgaaaaaaaagcaaaaaaaaaaaaaaagcaaggatatttgtgacttttcaattctaaactcaaccaattaatttaaaagaaatatatacttactattttttttttgaacaaaaaaataattaaaacctactaaaattgccgaaacaaaactataactatgatcatatagtataatggttaaaatataattatttaattattttaaaaaatacaattatgcctgcaaaatgtttatagtttcttgtaaacatatatacaaaaaaatgaaataattatgagtaataattacaaaaaaaaaattaaat

SEQ ID NO: 184920 - DNA, 1567 bp, Cannabis indica
tagaagtgtcaacatctttcttaccaaaaatatgaagcaacaaagcaatctaatataacctctatcaatttgaaaattttagtagtaaaaaaaacgcattgtgctccttcatgctgtgtttaagctgattataacaataacccacattaaaaactaacattaaaactaaaaaaacacagatacagcaaaatgtgcatgttaccttcttgtaaagagcatcaagtgcatcagtggtgatagtgtacccaactctgaaagtgggaactgacagactctcaatcatgttcttgctcactgcaccctgcattgtagtaaaaggcaccacagttcccaactcaatagcaggagatgctgcagctccactgccaggtgccggaccaactgcagccgtcaccgtcgactcaacagctgctgaagccgctgcctccacatccttagccacaattctccccaatggcccgcttccgacaactccccccaaatccaccttaagctccttcgccagtttcttcgcataaggtgacgccacaatcctcttccctccatccgacgccggatgagctgaagaagccactaccgaaaccagcgacggcgtcttcgtgactggacccacattttcggagattttttccgcctccggctctggcggcgccacagaagccgccgacgaagaggaattagctttggccttggcctcatcgatctcagcctctgtctccgccaaaagcgcaatggcagaaccaacagtagcaacgccgccttcctcgaccataattgcagccaaataaccatcataaaaggtctcgacatccatgtcggccttgtccgactcgaccacgactacgctctcacccttagccagcttgtcaccctcggacttgacccaagacacgatcttaccctcggtcatggtggagctcaatgcaggcatgaagatctcgcggatcttggcatggactcgagccctgctccggcgaccggaaatagagactccaggaggcagataagggttccggagaagggcttgggaagagggaacgaaagaagtgttgagaaggtgagccattttgattcagttcctagcagtgttgaaaagaagaagtagatttgtttgattattgtaatatgaaatgaatagagaagagaagatgggttttgagtttttgttttatttagtatttgttgggtttctcgaatatatcgaaaccaggcggaggttccaagttccaaccaaattaccggttgaggaatgtgatgacgtggtagttgagtttgtgttcttttaggttgggtttggtttgattttagttagagttttggagggtttccctttgtttttgtgtttagcgatcaatgcaatgttttctttcttttccatagaagtatgcaaagccaaagttttagctttgggtagctggtcgctcattacctagtatttacgatttgtaatccttttctatcgaaactatccactaaactctttttaattggaaaatatatttggttaaaggaaaatggcgagaattttatttgtgtctaattaacaatttttttccctaaattttga

SEQ ID NO: 184921 - DNA, 2504 bp, Cannabis indica
agagaattaagtaattagggtgtgttttttacataaaactaccattactttgtattaaggacaaggggagtaaaaatcaattctctaaaaattatttctacaactcaatgacttgaatcaattttctaaaagtcaattctacacctccatgacttgtctttctcgtgaattggtttcttagtctttatgaaatttttgtaaggattcattaagcctgtgttatgcacatactattgctaactgagctgctgcaggtgttattttgtatgttcacctgtataaatgcatatttcagcattaacagctgggtgtctctgtaaaactttctgacactgtctttggttttgacaccagaatcatgatgtaacagatagagatgcagaaattatctctattctgattgagctgttcattgagaaagcgagtgaatggtcccaaattatccatgctatcaactgcattgatgtgctaagatcctttgcagttacagctagcttttcaagtgggaccatgtcaagacctgtcattttgcctctaacaaaaaatgtgacttcaaatggagtggccagacgtcctgtacttaaaatcaaggggttgtggcatccatttgcatttggagataatggacgagtgcctgtcccaaatgatgtagttcttggtgaagatgcaaatggttatggtccacccacgctgttattaacgggacctaatatgggtggtaaatcaactctcttgcgttccacgtgtctagctgttatactggctcaggtttttctttgtccattttgtctttgaccattggaataagctaatgtttggtcatcttttgtactaaaattttgatgatttgatgtcttgcagctgggctgttacgtgcctggtgaaatgtgtgttctctcacttgtggatactgtatttacaaggcttggtgcaactgaccgaatcatgacaggcgagagtaagttcttgtttaacaaaattgagactcttcatgatttatattttatacctgtccttctagtctttattacatcttttcttgtcttaatataaaagtaagatgggaaccttttcattcttttgagatggttagttgatacattgaccctagtggcttaggagtaaaatgagaatgttatatgtcacgcacatgctaatgattttataggttctgtagcagtggtgctggtagatatggtggatgggtggggggtttattaagcgtgaaattgcttgaagtgatgataacgacggtcttttcctttgattttatgggttgttacagttacttggttattgttttaaagcagtcttaccgattgcatgatataagtagtttaaaaacaataagtggtagtcaagtgtggtgcgtagcaaagtgtatttttgtgccttgttttaaatttatagagttcatctgaacaattgacaacttttgttaggtaccttctttattgagtgcacagaaacagcatcaatacttcaccatgcaactcaagattctttggttattcttgatgaattgggccgaggaacaagcacttttgatggatatgccattgcctatgctgtaagaatactttcttctaaccactgcacaaggttatataattttaaaattacaactatgtgcacacagacaaatacacataccctgcattccatctaattatagatgatgattttttctcaatgggaaaagaacacgccttctaccatgcttgatgaaatctaagcaattaattaactgtggcctatattacgagtttggatgttactgaaaaaataagctcacatttgtttcaggtatttcgacatctcattgaaaaagtcaattgccgattactcttcgcaactcactaccacccactgaccaaggaatttgcttctcatccacatgtcctcgttcaacatatggcctgctatttcaagccaaaatctgaatcattttcccagaatgaggatcttgtttttctataccagctcacctcaggagcatgtccagagagctatggcttgcaagtggcaaccatggctggaattccgcagaaggtggtcaatgccgcttcaaaggctggccgaataatgaagaaatcaatagttggagatagttttaagagtagtgaagggagagcagagttctcaactctccacgaggagtggttaaagagtcttatgaatatctcactggttggaagttctaattctcctgatgaagaagatgatgtttttgacactttgctttgcttgtggcacgagctaaagagctcgtatcggtcggggcaaataaagtaaaaaggcacgtttctttgtctttttttttggttaatgtaaatttgtagttctcattaattacgagtattaactattaagacagctttgatacgagaaatcataatcctaccactgcctttgttgcgtttgtttttctggttgagaaaataaaaatgatgcaacggtaataagaatttcatttttctaatagaaaagtaatgataataata

SEQ ID NO: 184922 - DNA, 6866 bp, Cannabis indica
tagccacatttgggggtcaaaaatcctaaaaagtaaaagaaagaaaaagctcctcaagtgggagtttggttttggcgccataactcactctctcactctcactcctaacgacgcttccgtagaaaaagctcagacctttggactcaccaccggccaccaccaccgccaccatgaccgaattcatttctctgatggacatcgacgatgaaagcaccggaggcggagacacctctaaacccgtttccacacccatcatcaataaccccaaaaacgtcgccaccgccaaagcagcgccttgggtcgagaagtaccgacctcagtccctcgccgacgtcgccgctcaccgcgacattgttgacaccagtcagttctttctccccttttccccccatcatatttctttttctccacttagttttgttttaatttttttttcttttcaattttctgcttggttctcgggaatttgattacatttctcatatgggtatttgcttaatttgttttgcatcatgttcatgcgcaaacccatttgtgaattcaatcaattattcttcttatttttgaagttttaatttttattttggtgtgtttgaatagttgatagattgaccaatgagaatagattgccgcatcttctactgtacggacctccgggcacaggaaaaacttctaccattcttgctgtggctcgcaagctttacggggctcagtttcataacatgattttggagctgaatgcatctgatgataggggaattgatgttgtgaggcaacagatccaagattttgctagcactcaaagcttctcctttgggtatttttctgtattttgatactattattctcttttccagctatgttgaaaatggtaacatttaattgcaatggtagcttaaatggttagtatatggtttgctcccacaagtccgaggagtgttttgcgaaacaaaacctattggataggcagggagcttagtttgaaaaaaattgtaaaacatttacaattttttaaatgattcataactgatgttgtaatggttttggttgacagtgcaaaggcatcggtaaaattggtattgctggatgaggcagatgcaatgacaaaggacgctcaattcgctttgcgaagaggtattgtattgttctctgtattagatcaagtttttgtcatttctggaaagaaatactcctaaagttgctttgtttgtctgtcaattattgtttgtggtgcagtgattgagaaatacacaaagaacacaaggtttgctcttatcggtaacaatgtcaacaaaattattcctgcactacagtcacgatgtactcgttttagatttgctcctcttgattctgttcatgtcactgaacgactcaaacatgtaatcaaggctgaagggtaagttttatatcccttcaattatgtattttctttatcttgtgatttttctgataactcagagtggggtttagtttgtgtgacattattttggactgttgtttgcaattctattaccaatataaatactttgtctgtgaagtgtggcatagctttattttgagaaaactacctttgttgttcctgtaaattcttttgggagctcccacattctcccacccattgttcattttcttctttggttttttgttattgagatgataactgaaaactgaaaagcttctttgacaactttttcactgaactaggcttgatgtatcggagaatggcttggcagcacttgtacgtcttagcaatggtgacatgagaaaggctttgaacatcttgcaggttatttagatctctgctctagtttgttcacgtgtttctacttccttgttatcgaaggaagtttgttaatctgcaaatattaatgcatttaaatttccaaacaaaagtctctaatttaaaagactaaaatgcttgaaactttgaattatgttctctttttgttgttgaattgacattgaatgacaagttccttttctttttcttactgaatgtgcacagtcaacacatatggcttcacagaagataacagaagaagaagtatacctttgcactggaaacccattgcccaaagacattgagaaaatatctcatgctcttctaaatgaatccttttcaaagagtttcaaaggtacatataaccttttcttgttactttgaatacctaatccgttacaactaacttttctgagctgtttttcacattgcatcctttttttttcagaaatatctgatatgaaaggaaggaaaggattggctataatagatatcgtacgagaagtaactatgtaagttctattgcatggatactaaatgcctattctgataatttaactaccccatttatttaatcaaggtgttgtttgaacaggtttgtcttcaagataaagatgcctgctaaagttcgcgttcagttgattaacgatttagcagatatagagtatgttaatacttaccttcctttctctatgcattatttttttagtttgtgattgcaacagttgatgatccaaaccggtttttaatcactagagccgattatccgtgtgcgcagatacagattgacttttgggtgcaacgacaagttgcaacttggatcgcttattgcttcattcacgaaagctcggtcttctctagtggcggctgcatagtaatatttctgtgtctaattttgtcaacttaatttctaggcactgattcaaaatgtggttattgtgtagacagatgttttatttgggataccccactttgtcaattaaagttttgggttatgtgcttttggaatagggaaatggcttcaagaaagagtgacctttttttgttgatgttttcaattagagtgaattttagtatgtaaagctcaatttggcaaacctcatataaattatcaaattttaagagtaaattaaggtaaagaagagaggttgttgaattttgggatctctgtattttgaaatttggaggaattataaaaataaatattgggtaaaatgacaaaacaatgctcatgagtaagctacttgaaaaaagtgccaagaacaaaatacatatacaaacctatttaaaaagggcataactttatgccaaaaaagaaagcttgattatgggattttgaaatgtctattcttcctagcaatttaaaaaacttacacctagaacaaagactgaactgtacaaacttctaatcagcttttctttttttaagttcactatattgtgggaatgcctttttccactctttatacctctgcaacttgaaaaatataatttacacttacaactcaagcagcttttcttcatcttccagactacaaaaatggatatctagaagacatcaataactataagcataccaagtttgtccttcctatttggacactcaaccttagtctacattcgataacgaccttaatctttacgttccttcgtctgcgtttctgttggaccattcaatctcgatttctagtgttctagaagatccatctttgtttccatcatgattaaggctgaataatccgctgtatactccttcagtaacaactttgtctatttggatggtcactttccctagagtactctgaaaaatagccacaattgtcgagattaggatgacaagaacattaaagtaacaatcctaaacacagaatactaattacctttccgaaagtgtttttgcttttgcaaacaatgtgaagcttttgtcctttcggaggtacatcgaatccccacgtaaacccttcttcccactcgggacaactactatggttcacaacctgattaaattatcgacatgttagcatgaaatacaatcaccgatatataatgagggcctcttccagtttattaaatatttaccttagtttgtcgagcaggaccgttgcctattgtcaatcgacaaaaagcatttgtacttcccatagcctgctttaagttgttaccccgtcgaattgtaactgtcaagcaaccgggtaagcaatgcaataaactgtctgctctgtcatggaaacttggtgggcaagtcttcatgagcatttgcaggatgggaatggcttcggcggcaaccatggcttgagactttgctatatctattggcatggttgaccaagaatgctttagcaagcacagggtgtccagtacagactcctgagctgcatcgctacctgattttaaaaccccaatcagatgaggaatgcaaagggtagctgcttccgagatatggagcttcggaaagttggcaaatatgacattcaaggttctcaagacctcttcattgatggttgctgaggaccacaattccctttcaagtgcagctgtaaaataaagacataatgggatatcaaaattaagataaaactagaagatgaagatcctgcttttattgtaaacttccaatcaagatgaaaaatttgtttgcctatagggcttccaacaagatccttatttgataaacaatttattgtgtgacatttcaagatgcaaatgaaagaagaggatctttaaaagaaaggaaataaggagtgccattatagctacctgtcaaagatctgatgagctcgtttgaaacatactcttggagtgtgtgattagaaaataaaaacttgattagcaaggctgcctgagcagaaacttctggattcggtgacagcaggaattcctgaatgaccaaaatgccacctgcttctgcaacagctcgcctattggttctactatgcatgacgaagttttgcaacgcacaaattgcaaccattttcatatcctctgttggttggtcttcaagcaaacttattaatgcacgacaagcagaaacagaatcactagctcttgcaagcacctcatgctgtgaaaggtctccaagagctagagcaacaagaagtttaccaggttgcgatctggtctgtgggtctaataaatattgtgataaaggtgctatagcatacttggaaaccttcatctgtcgtatcttcacattattaaataaaccttctagtaatctcccacattcttcttcgaactgatgagatcttaacaggtccagtagagcatctatagcaccagcttcagtcatttgtatggcacttaaggcatcactcctttcatgaacagttaatgcatcaagtgacactgtaatagtgctctcaactgttgagagcaacattttcacaagaactaccacaggaaccttataatagtactcggcgttggatcgtaagacattagaaagaaccaaagcagctgattcccacaatgcatgaggtggctgaggatcatcctgaatgagtaatttagcaagctcgaaaattcctccagcatcagcaactgcctttggccaagtcatagagattttttccaatgccttgattgcagtctgctgtaagttcaaaataccaattcccgctagctgcacaagaggcacaactgcattttttgtggtaatatcttgctgaaaatgttcctgagcaagaagatgagataataattctgttccaagctgctggatggcttgggaaggtgattccagaaaggaaagaagaggttcgatgacttcgctaggtgtgagatttaaagttgcaaggctttgtggcttctctaaaatatttacaagtgcctgcaaggcactgtgctgtccccacaaactgaattctgaacgaagtaaaaccagaaacaaaggttctactatttttgcggctgctgaacttctggcgatcgcattactatttgtcagaatgcggaaaagttctgcaatagaagaacataatgaattgggtgcaacaggtaacaactcaagacaactatcgatgataccagcatcaaccatttccaatttgcgtggggtccggtctttccccagcttaatgagagaacagatgctagcctcaattagctgatagctcttatcagaaaccaagccaacaagaagatccacaatatcataggctgatgcaagctccaccatttgttcatcatccaacagtttctcaaaagcacaaactccagcttcgacagactgaaactgaaatcagatgcatcagtgaaataaagggtcaatgaattcagaacaattggattagctctaattttacattgcaaacagaacaaagcagaactgtgcagcatttcttttcaactctaacgatgaagcagaggacaaaattttgtatagactctcaagtgagtttgcttccacatcagttaaaaaaagagctttcgaagaatttcctgacgtcaaagaaatcaaggcaacgagagcagcctcctgctcactctcggacgcagcattaagcatctcaattaatggttgaacagcctgtcttgcaagctcagactctctgatgctctcagcatcaaaaagttcgtggagtgctcttgcagcactgaatctggcatttcttgacccaagacgcagaacagctataagttgatttaaggagctggctgatgcttcgtagcgaattagatcagggttgctaaacaatattctgaataattcagttataatggtttctgttgagtcttgagggctcagagacaagtactttgtcagagcatccaaagctccagcttcagccataattaatttgtttgtatcacttccatctgcaatgcaagtcaaaagttggacagcaattggaggagcagcaggccgatctggcattggtgtcaagagatccactaaaagaggtatagctttacgtgcagtggacccaaacttgacatcttcaataacaaaaagttgctccaaaacaacttgttcaggatttcttactagagaaaactcatctgataaagcaacaagatttggcatatctgactctatgaaaccaattagggatatcaacccggaaacagcacctgaatttgcaat

SEQ ID NO: 184923 - DNA, 2287 bp, Cannabis indica
gaaggtggtgttatattttggatcacaacacaagtcactattgtcatctcctttcatagtgtaagagaattagattttttttttcaagaatggtaatatattgattactaattttaaattaaatgaaaattcaacgtcagcaatgacgatcaagtgtgtccaaagtcttaagtagattgattgtgcttttcataatgtgatttttaaaggcaggcacatgcaatgaatgaatgaaattgaagatagcaaaagtcaaagcttggtgtgtattggaatcttaccttgcttgtgcctagattgcgctgccatagtgcaccatgctgccctaccaaacacaacacgagtttctttttttctctttgataaggcaacacacaacacgagttgcttgctcatttaggcatgtagaactacactgatttagatctttatttttattttgttattttttgaggtatctacctagagtgtgaagaacaagattggtactagcggcaaacttagtaatgttgtgacttagtgaaaaaatgcatgcttagtttgaaaaaaaaatggagtattattttcatcctaaaaatttatatagtcgctctattttattatttatatttatatttttacataaaatataagaaaattatatggtgctagtgctgtaaaaataagaaaaacaagtaaataaaatggagtattatttgcattctaaaaatttataaagtcgcccaattttattatttgtatttttatttttacataaaatatgaattgaattttttgacacgacatgagtctaggaggcatgaacacgacagactctgttattatcttaaatattagacatataagacctagattttaatcattagctcaaattggcctattttatatctaacttctcatattttcaaaaaaaagttatttgaaaaattaataatgttaaaatttgattcaattttattatttagctatcatcaaataaaatacataatttatttcatatatatatatagttttaaaaattttaaatagttttaaataatttagggttttgatacagtgttggtgttttgttttctgcttgtctttgacgtcgacgaccgtagctgggaatggcactggtgagggtcgacttggctggggatggggtgtggtgagggtcatggttggggtgtgtgaagaagacgaagaggaaaaagaaaaagcaacagttattttatgaatttaaaataattttttttggtttttatattattttaaatttttttaattaaaattattatttagaccaataaaaaattgacatgtgtcatttctttggatttaacggagcaattaaaaagagggaccaacgaactcacaaaaaaatgtgatttgggaactattaccgccaatttttgaggttggggactaatctccatcaaccttaattttttagggacttttgccgcaattatccctttttttttttcatctccatttccagtttccacaagttttctttggttcaatcttccaaatgaaaatcatgttaacacaaatccgatacctgatttcttcttgcccattaatgttaagactaaagggacgaaaagggattcattgaaatagctaaatctgtttcctcaaagatatcaatcatgaaactacctaatcatcttcactttcatcactatatgaaactaaagaagttctcacaacagcattagttttatcattatcacgactaggtaaatttgctggctgagatcttttttctgtatcaacatcacaaatgtttgtttcatttgagggcagctctataacatctccctgatccaacttagctttttttgcttgaggtttcacttttattatcacacctaatggacgcggatgagggtttttctttctcgctgccttctgttcctgcagaacagatgtatcttcattcaacataaaccattacagacactgtgaccaagtggaaaatagctctcttctaagtttctaacacattaaaacagacagttacttcttctctttctggcaaaatttcttaattacaaactatatacacatacaaatagctctgtaaccataaattcctaaaccaaatgctgatgctgaatcacagagataaaagaatatgtatatatgatcaagaaagtaacctggactacaggaacaggtggtgtttcctcaaaatcttggacgatcatagattgggctgccactgctgcctgtaccaaaaagcacagcactaataaagttgaagctttaatttgatttccaatcaatagtgcccatt

SEQ ID NO: 184924 - DNA, 3268 bp, Cannabis indica
taaaatattatttatatattattcaagagaatgcactattcgttctctacctaaagtaagttatactggtttaagtacatctttgtcatacatatatgatttacaagagctaatggaagcctttttttttttaatcatatttaaataaaaattaaaaaatctattgtgagtgctcttagcaggaacaagaatctcactaatttttttttttgatgaatcaacagtgtattcattaatccaaaaccaattatattttacaacctaatagcatctttacaacctaatagtatcttcaaatagaagacccgtgtattagaaaactatacataataacttctccaattacaaacaaattatatataccactttatatccttatggcctacttttttaggccataaacatgagattctagttttaatatcttcttttgttttatggaaaactctacctatatacacagaatcaacaagccacattttttttttttcatttttagctctccaaatctgataaacaagagaggctgtggcagtagagagaacccacttttgaatttggaaagcttagctctttcaatcccccgagtgagactttgaagagaaagagagttggcttttcacctgagctaagtcttcaactcatgaaggcaattttggctgaaaggaacaactgttctaaattttcaatttgcaccttatgaaaaacacattgagagtcttcaatcacattgatacggtgtagcctttcttttgttttcagcttgtcctgaatggtcaaccaaagaataaaattgtatttggggatatttagtcttccccaaacttgtttgctccaactaactctttcttgagaaaaatgtattagtttatatcccatggaaatagtatattttcattcgacaacaaattttgataacaaagaatttaatcttatgcacatcacatttttcgaataccaactactcgaggacttgcatattccaagaatctcagtaattgcaatgacgacaaattgcttaagctttagcaaagtcatttttgttatgtattttcacgtataaataatttgtctatttttttacccacaaatacattaataattataaattattaatgactccaagtttatatgaggttttttttttaatttttatctagaaactcaaaagaattattcttctttaatcatgaaacatgaaagtggacatggagaattatttcgacctatatattagaattatgatatagatatataagacggggtacatcgaagaatgcaatacaatagagcccatagataagtcatcatatatgtattattatataaaaatcatgatcaagtcagtgtttcttgtccaaccagggagtaaaacatctaacactaacatgtaaaaacgatggcaaagacattgttaacctaaaaaccctaactccaaaccttctcctactcacttgatgcctgatattcgatagagcagccaccgctaccccattcagctccttcaccgatctcttcagcttccccttgaaaccttgatctgccctttgttgattagacaagtggtaactgcttaagaaagcccttctcgaactccaaaagtcgcgaccatcgtggttatgaaattgtatgattccatatgaatcatcacaattatttaattgctgttcattttcatcactgatgaacacttgggcatggagtggtcgactgcagcagtgggacatgtcactattcttttgaatatgcacgcatatggacttaattatttgtgttttgtaaaaggattcctacataataatttgatatatagtgtttaagtctattcttctaattggctacatcatattttattaatctaatgcgtggaagtgtgaggaaatggtgatatagtttatttgtacaaataattcacatttttgtgtaagcaaatatgtcatttgtaagtttcttgagtatatgtataaatggccaatagggtttattaacttatttgttataacttacaagatagtggttggtcggcaaaggaaaatatatatgcaagtaatatagttggtgagattttggtgtgatgatatgaaataatgagaactctttattctcataatttatgactttgtaaccttcattaagtccacgagatcaccaaccataccctcacaccattcctccatgacacaatcatatttaaaacttactataatatttctccacctgccaaccaagacaccattagtaaaacccaatttccctgcagaagtcataaacgttgctgcagaaatttaaataggaatgaaattagtaatttcaaattaccgaatggagttttgggttgagttgcggactagagcctttcttttaagacatttgtagcactgctcaagattgtacaatatggcatagaaaaatcatgtcatccttaggataaaattctgtctcgaactcccactctacagtagaagatcgagatacaaaaacccaaatataataccactgatggttgatcgaaaatggttttatagaaatctatctttgtttatataagagatatgtttctcttgttagtgagttgcactatatactgaatggacttagaaaatataaatgggaagaaatacattttaatcggacatgtccttaaaatatgtaattgtaattagtttaattaaacacgttttcataatttaaataaataaaattattattattattattattattattttattaaataatttttttgtaaacttgcatcggacggacgacaaagctcatgtgataggtcaagtatgtatcttgaccaattcacacaaaactaagtacccgttaggaccccaacccgggccaaaagtttctctttatgtaccttgtaaataaaggctcatattcatgagtaactgctatctacatacaacatactaagatacttttttttaaaaaaaaattcactaaccttataaaaagtttgaacaagaacaaaagaaaaacataatttttaatttaacccattcaagcatgtggtatgaaatcatcaccaagacataattcaagtcaaccctaatagttctcccctataagtattattaggggcgacaaaaacaatcatccctaattaaagggcacaaaagctcccgtcattttctaatttttacttttagggttgaaaaatatgcaagttggaattttacgaaactcaatttgggtcaaaattgagaaagttgcacttttttaaaaaaaatgggagtcatggatggtcgagataggg

SEQ ID NO: 184925 - DNA, 1419 bp, Cannabis indica
aaaaaaaaaaaagagagagagtttatataatatttccactcttttttttacatttacaggttttccttcaattttgacaaccatcaatagttggagttttgtcatgaaaattctccacacattcaaattgttctttattgggaatagggttctcaacaacttcagatgaagtgtgggtgggtcgtactacattcaaaaactacactcttctacttgctgccacaaacatgttcagttatgaagagaagaaaacgagagaagaaaaaaaaaatagggcaaataatcagagcaatcaaaactcacttgatggagtgggcatcaaatgaactttcatctaggattcttattggcccaagatgttttcatctctacaactctagggggattacatcagcagtaggtaggccccgtagatatttttacctggtttgtgatgttcaccttcaacaatggagtatagatctaggtaccccaaagcttcgactttgatttcgaccattatttcactttcttcaatttcgaccaaccatttttctgggtttgctttgattttgaacgaaaaaatgggtaaggtctcttaatctggttttgggattgatatcacagttgttgaggtcgttttgggttttgtggattcctgtttggttctgatttaattttagctttttttaattttatttgttttaaattgtcttaaaaaaattattgtaaaaaaaaaaataactttttagctcctttaatatatgccacgtaaataaaattctcgtgacatggtattgccgagtctacgtgacacttggtaccctcgagccatgaaggcaaataatgaggtcaagtgaatggagatgtgatttcgctaacaggttcatggtttaagagattttaccgtcaaaaaaatagaaattaggaattaatttctagcaagatgacaattctaaagttatgtcgaatgagaagttttagatttaattatgattaaattaggtaatatagctgatcttgcgcggactaattttaattttttaatactataaaaaaaaataactatttattaatataataaatatttacttaaaaactaatatataataaaaataaaattatattatctaattctatattatgattaataattttatttataaaaagataaaactctaataaaagaaaaaaaaaaaaaaaaacttaagtctattcacaattttattaattattattatttggagttgttgattaagaagtataaaatttattatatatagtattttaaattgatttgttaaaaataaattgttgttataaaaataaataaatagggtaatgtagaaaaatataagtgtaccgtatcttacctattgtcatcactgtatcttatctgttatttcattatatctcataatttgtatatatatcttatcc

SEQ ID NO: 184926 - DNA, 11359 bp, Cannabis indica
ttaaatttattgtatttcaaaatttaaaaaatgtatatttttttttaaaatacattactattttttttgcccttatgtttcaaaaaaaaagggcccttaaataaattaaaacataaagcaattaattaacatatgtaattttttttttcgacgttgtgattaaaaatcacttaaattttaaagaaatttaaaatgaaaaaatagtttagaacagcaacatgtttttaatttgatttttagaatctctattttatatataacaataggtgttttaattgtaaattgggtttgcttaatcgactcttgacatcatttctaggaaaaaggattatagaacattcataaatgattgaactacacaatccaagttacaaactgatccaaaattggtataatgatgaaatttttcgtatgaataagaaagattctttcttttccaagctaacgactttccaatttagaaacccaattgaaacagattaaataagtctgtagtgtatttttaattcatttatagttcatgtttataaccccaactcttattccgccggcgcgtgtatgtgcacgtgcgtaaggtgggagagaggaaaatggcggtggtcaggactggtgctgagttgacgaacttgaagctttgatgaataattcgaaataatagaacctctgatttttcttttcgaacacgagaaccaatataaaaactcaacaaattccatatgtatatgtaataaaaagaaaaaaaaagaagaagacaagtttatctttttatgtttttgaaaattcactatttaaattgtgttttcttttttgtttgtttttttaatttattatgatgtaatgtaaagagtcggactaaacaaacccaatttacaatttttggtttgtttgttctgtcaccaatcaggaattgtctacttttctttctttttttttcctattcattatttttataatcagttcataaaaaagtagtttttatgttttttttttttcaatttgaattatttttgataatgtttgaccctgaatatgttgcaatgatatttcctgacacctacacctcatttatgtttgataactttttaattaattttaggaggactgtggccatttgattttgtgtttttgtgttagagaggcttggaaagagaaggagataatttataattcttatcgagaagtagattctttttatacggattatttttccctttttattatttttttttgggatttgatttttaagggctagggtttgctgtctctatactttactctcttccttgtttatgattattcaaggtacgaactcacttgggtcgttgatattttcataattcctcatctgggccacttgacgttcctctctttcgcatctgggtcggtcggtaatcttactttccttctctcaatcgcctcaagtcgctggatttttccttgttttctcgctcgattcgtgggtttcctcatctgggtttttgtttttcgatttttttcttgaatttagagtatttttaaggttaaaatcgtagggcttttttttaactacttgattccattaattagtgaaatttgttcttctggtttcggtttgcgtttttcctctgtaaatttcatgggatcaagttgctaggacctctgtatgagtacaatttttttcttcttctgtgattttagctctctttcattattgctccgcagaaggtagaatttttgaattagaatactgattaggaggacattgctgcctggttgtgatgaatttttcaatttagctctactctgaggacgttgacgactttcctttaccaaaaggaagtttaataccttgtcaactctctaggaatctgttcagaacaaatgtttcatcctcagggagcttcgaaacaatcttgtagtctcttagcagttacttgcggcggtgtctcagaatcaaaacttaaaaaggatgtgttagggaatcagtcggcatatcccttcccggagttggtctctgcagggcgtttggaggtgaaaaatcttttctttatttagtgtctatcattctctctgttataattattaattatgagctcagttgcatatgcatctaggatttgcatagttagaatcccaggctttgtttccagtgttatatgatttccccccctgactgggacattgtatgaagcaggttcaaactctgactagcccaagcaaagaggagttttctaaacttcttgaatcttataaaccaaatcttgtatacttacaaggagaacaacttgagaatgatgaggttggcgctctagtgtggggaggagcggacttgtccacccctgaagctgtatctgagctctttggcaccacattgccttccaccgtaagcaaatgtttcatgtttagttgtaatattgattgtggactgtatctataatttgtttttcttccattcgaaattcttacacttcatagctattactacttatttctctcacttgtgtgaagttaagaaatgttaatgttatcacgaaaacactatgtctgtaacttgctgtaaaatgtgataagtactggaatgttatttacagtttcagccaagatgctagggtacttactgcttatcgtgcttgtatccatttggattcacaatttaaaaagtagagagacttgaggaaggtttctcgatttggaatgtatatgtgtaccatgtggatagcatggaaagtaatggaattgcaattttttatgttaagtcccaaccagatttggcaaataatgtgatacttttttacacagttattcctttaatctcccatttcatcctttcttggtgaatttccttctattgtttgctatgtgctttctttatcgtgttcatactgcttggggttcttgattccttactactcttattttggtgtaggtttatttggagataccaaatggtgagaaatttgcagaggagcttcatttaaaggtaatttttctttgcctatggacacacatgaccaatgattactgtgaaaggagtaatttttaaaaataataaaaaaaaaggattgcttgtatctctatggcatttacattagtttcataagtttcattgactcagaatgcctcattctgcagggaattccttatgtgatatattggaagaacactttttctcgctatgctgcttgccactttcgtcatgcactgctttcagttgtaaagaggtatagtataaacttttccaccagcctataaattagcatttactatgtgttaagaaatataagtttctttctttcatcactttatgtgtttaaatatgtataaactaaacataaataattaaatgtaggatctgacttagatggtgtggatcattagtttggcataattgtgatccataagttatggatcaaagacgtgatctctttctgtctgctcagaagcagcttgaggtttcatgtagttcatctgtatttgttttgcattgcagttcatcaactcatacctgggatgcttttcaacttgcggatgcttcctttaggctttactgtctccgaaacaaccacgtccttcctgctaaaggccataagattagtggtgaactagggccatgtctacttggagagtgtttaaaaatcaatgtagatcctccggcagcagaggcagaggaagatgaagatggttctttagatgcagtccctgccattaaaatacacgatgatgatgtgagcttgaggtttcttgtttgtggtgtaccatgtgcattagtaagttcacaaagtaccttttttttttcctgttctatttaccttattactttatatttttgcttttgtacaatccctagaatccatatttgaacttacgagatttcttttgtaaatttgatttattttcttccaggatgcaagcttattagaaccgttggaagatggccttaatgcccttttaaatattgaagtaagtcttatactttatgctccctggattaagacccttaatttgcttatgtttgtattttgcctgttcttcctgatgaatacattccatgcattaagtgcactatttaccagttgaaactggatgcatttttctgcaacaaatttctatcgaaattaatttgctctggttttcattttcttgttctggtcctttttctacttcagatacgcgggagcaagcttcatggaaagttcaggtatactgcgtgttgaacgatttttctataaatgcacatttatacactagagagttctgtgttgtcctcctgttggtttatttaattgggatgcatttaggcgttggttcttttaaatcactgtttttatgtgactgtacttctctaaatagtatctagtttgtttgttttttttctatttttattattatcctagttttagtttttcatagtgcatctactgctctttgtgggtatgtatatgttactaatatctttgtaatgtggtcagtgctcctccaccacctcttcaggcgggaactttctctcgtggtgttattaccatgagatgtgacgtatctacttgtagttctgcacacatctcacttttattgtcgggaagtgcacaaacgtgctttgatgaccaggtgattgcaaagagttttagttggaaaggttgttgtgttcaagcattttgtttcttactataatttattttcagctgttggagaatcacataaagaacgaaattattgaaaatagccaactagttcgctcacttcccagcagcgagggaaacaaactacctttgtctgaacctcgaaaatcttcttctattgcttgtggagcaactgtatttgaagtatgcatgaagattcctgcatgggcctcacaggttttctaacttctctatctaatgtgaaatctgcaaatgattttttgctacagttaagcttttgtctttaaaattactgtacatatttcttttcttgttgttcgttcttccatttttctttaattttaaaaattcagatgtatatgatatctatgtttgtatgggtagctaatttattttgtcctacaatttcaggttttgaggcaactagctcctgatgtttcttatcatagtttagtggcccttggaatagccagcattcagggattacctgttgcttcctttgagaaagatgatgctgagcgcctgcttttcttttgctcaagtcaggagagagacatctcaaatggcttgattttcagcaatcctcctagttggttgagaccgcctgctccaagtaggaagaggtctcatccatgccaagagagaagcgtggttgtgtatgatggttatggtctttcaaaacaagataatcccaaaacggatgaagaggacaaggggagagggtcagtaaatggggttagcactccactactgccagcaaggcaacgattgaaagttgcagccatgaggccaatacctcatgttcgtaggccaaaaatggtacccttttcaggaacttcagtggcagatgggcatgatggaagccaagttaaggcaaatattccggttgctcctcccaccaagctcagcatagtaggattaactcctgcaactcagcgtaaatcgttggcaagctcatcacaggctaagcaaattatttccttgaatccattgcctttgaagaaacatggctgtggtagaagcccaatacatgcttgttcagaggttagttatgttctgctcagagctcaaattagtttctagtgtttaaaatatggccagcattatgcttgggtatgaacttctacaagtatgatttccattattttctataattatttgcttgtagtaggttatgaaaacacaaattttcagttattttactcaactctttttcttaatgtctattgtttgtattttgttaccttgtttctcctacataatcattcattcacatgcaggaggagtttttgaaggatgtgatgcagtttctaatgcttcgaggacatacccgacttatccctcaaagtggtattgccgagtttccggatgccatactcaatggaaagcgtcttgacctctacaatttgtacaaagaggtgagctcttgatcccgaattcaacttggttgattcaattaaagtgcaggaactcttgaactgaattttttgggtatggatgccctttcaggtggttaccagaggtggctttcatgttggtaatggcattaactggaaaggacagatcttctctaagatgcgcaattacaccatgaccaatagaatgactgtatgtatagaaatcttttaacatgataccactttcacatgcacagaagtccttaatatgatactactatagtcatcttatgacaataagaatggccaaagaaatgtgaccatagcctgggaagaggtgatattgagattataatatatgcattagcgaaattacgctaacatttataatgtgggcactgggcaagaatgcaaagataattcaattgtaaaaaaattgaatctggacaatgaatcttctctaactaccaccattataatggcagggtgtcggaaatacgctaaaaaggcattatgaaacttacttactcgaatatgaattggctcatgatgatgtggatggggagtgctgcttactttgtcacaggttcatatttttatggatttatcttatatattaatatttctttgtgctgaaaatgtagtggatattatttacaactaaacacctaaagtctactaataatggtatttttttgggcttctgttctacagtagtgctgcaggggactgggtaaactgtggtatgtgtggtgagtgggcgcactttggctgcgacagaagacagggtcttggagcctttaaggtaagtatatttcattccaaaacaatctctcaactggagggtgggttgtgttagtacactcatgtaaataatttcttccttatcatattttgttataaactttttcaggattatgccaaaacagatgggcttgaatacatctgtccacactgcagtgtcagtaacttcaagaagaagtcacacaaggtttcaaatggattcggtcaaggactaacagcatcatcacggcagctataattcaattttggttaagtttcattgtttggcactctaattacaaggtcgctttctcccctaatcctgcaaaattgttactttgttggtatgtgtactattcgttaaaggaatggaaggtgatagggaaagagaagttagggggagaaagagaggactaaaaggtaggcaagtatagagtatatcagtatactaatgttaatttaggccaatatatttatcctaattagtagtaggaaaccttcatttttgtctccttatattgctctcttttcctccccttttgttatggggttttggggaatttgatggagaagaaatctacgttatataggaaagggtggttgtaatatatttgtatttccattttcccgaaattgacatctactaatatttttttccttattcaatgaaagctaatgataacatctacctcgactagtctttcttaatttgaaaactctttattttactttatttaaaaaagtgttttgttacttcatgaaaaattggatcacagacttttttcttataattattcaaattcaattataacggtaagcacaatcatttattgtttttaattttattgaaacttgaaagatttgccataccgctgcccctttagctgcctaaatttatttcatttatgtatttagcgaatgaaaatgttcatttccaagttaaactcatttatgtatgagcgaccattcaatttttcaagataaacaatccgaattattttttaatatgtagttctcaatccctgtatatgcatccatgtataaatatctatctaaaaccaaagaaagaataagattaaagaaaaaacacatcaaaaccaaaatagaataatggcaggatcatcgtctaccaatctcaatcctttggttgatgatttttacttctcagctctgtttgatgatgatgaattatttcccatctctgatgagaaatatgcacatgagttacagctccaggaggctctaatgtcagcagcattttcatcaaggaaacttttccccgttaaagaggagaaagatcataataatatgttcaaaactactgcagcggatcgtttgttgatgaaaaggttaagttagaaaagaagaaggtgagtcttcttcttcttcttcacttgtagtagctgccgccggcttctgtccaatctgcactgaacccaaaacgacaagagagatgttccgaaacgacaactgttcccactcgtattgctccgactgtattggtagatatgtcgttctaaagattcaggacaacatatctatggtcaagtgtcctcaccccaactgtggaggcgttttggagccgcagctctgtcgttccattgtccctgagcaagtgtttggacgctgggaaaatgctctttgtgagtcgttgattcttggagccaagaagatatactgtccttttaaggattgtttggctatgatggttgttgatgatggggaggtgtctgtgacggtatctgagtgtcccggttgccatagactcttctgtgctcagtgtaatgtttcatggcatgaagggactgagtgtggagagtttcagagagtgtctgggaaaagtggttcaacaaagatgtcgtcttcggagaaggaagataagatggtgctagagcttgccaagaaaaagcaatggagaagatgtccctcttgttggttttttgttgagaaaacagaagggtgtcttcacatttcatgcaggtcaattttcatatttgattaatgatatcttatacatgttagttttttcaaaaaaaataaaaaataaaaaaattgcaggtgtggaaatgaattctgctatggatgcggatccaaatggtcttcaagccatgcttgttcttctaattaagagtaaggaaacgactgcaaagcaatggatcagggaagaagatgaagaagaaggagaaaaaaatatgctattttaacattattttctgaaaattaattgcttggattataagtatgcttttctaaggcttgatttttctgccatgtatgctgatttttgactgtcaagttgtcgtttcttttcaagccactgatctttttcacgactaatttcagaattcaccaatccgaaacaaacaacacgactaagccaatttttggattgagtatttaaatgaaggttgcatctttcggcttgtatgtcattcaatgagaaattagacattgacaaaatttgtcattttagcattgttgtctaaagataatttacacaacataattatattttttcttctgatcatggatccacatattaaatcattttgcaagtctgaagtataaaaatctgtagtaaattagcacatatagttcattattttttttttgattcactggctgaatttgggagaatgagtcgaagataaaagataaaatcctacggtgaatttgatacatttagatttttatatttatcctatttgattatatcattatttattttctgaagtctaaagaatttaatcgaaacataaaaatattctacgagcaatttggcaaaatattaacacatttgcattttctctttcaattgtgcatccacatgttagttgtagtgactcgaagaataggggtaaattaatttctttttatacctctttgagtatatctctttttcagatttacgtgagctaaaaaggtgagtggagataatttttaattgttttcttttatcatgaccgatttttataacggttaacacaccccttattaagaattccacgcatttttttggttaagaattctcgatctaagcatgtatggattaggatatgaaagaggtcaaaggttaggaaatgaagttattttccattataagcatttgtaattattatttcccttattagttagtgtttatggtagtttgttgattttattcttattacttgtatcataaatatattctctacagtacgtcaaaaaaaaaaattctttacataaatatgtaaaatcacagagagtaagattaagggggggataaaaacagagaaatggcaggatcatcatctggcagtctcaatcattttatcgatgatttctacttctcagcactatttgatgatgaaactgcactccaatctctgatgagaaatatgcacacgagttacaactccaagaggctctaatatcagcattttcatcatcaaaaaaacgttctttccccattaaagaggagaaagacgaagagtttttaaataaaaaggtcaagttggaaaacaatgaagggcaaggctcttggttttgtccaatctgtacgcaccaaaaagcataagcagagatgttaaaaaacgacaattgctctcactcgttttgctcttgactgcgttgggagacatgtcgtttcaaagattcagaaaaacatatatccatatccaaggtgaagtgtctactccccaattgtggaggccttttagagccgtggctctgtcgttccattgttccggagcaagtgttttaacgatgggaaaatgctctgtttgaatgtgttatccttggagccaagaaattttactgccctttttaggattagtgactaaatctgagtaccccaattgttatagactcttttgtgcgcagtgtaacgtttcgtgcgtggcatgatgagactgagtgtggagcgtttgaaagagtaaccaaaactggtggaacgacgtcgtctttggtgaaggaagaacaagcagcaaacggagagtatgtcccgtttgtaattattgatttatttatttttatgttgagggtaactgaagtcaagctgtgatattacatttgatttgatgcaggtcattttttattacttttattttcacggttaatttataacattctataatttttttcatcattaactttaaaattttggaggttaattaacgactgagccaggaatagaggggggacaattttttttttctttagattatatatattttcagagtaggttaacatacatttttacatttattataatttcttttttctaataaatagaagtaatagaaaaacatggccacctgccccatatatagctctttatatattataaataaagtctatttgttattccaaataataatttacaggtacggatattaattctgctatggatgcggacgcaaaactgactctttttttttttggaaaagcccaaaactggacttcaaggcaatattgtgttctcatctcatcgaatagctgaaggaaaagagaaataaggtatgtagtagggctgtacataaattttcgtaaaccgtccaatccgaataatccgactaaaccaaa

SEQ ID NO: 184927 - DNA, 2510 bp, Cannabis indica
aaagttaaaaaaaaatatatgagataacttgcttcttcctaagaagtactgtagatataaccaagtaatctaaaaaaaaatgtaatctcactcattccagttaagctcattcgcccacaatggcctttgattctaagcatatcaaaaagatccatttagttggatcgggtcgaagttccaatttgaaacgtttggatacttattaaatctcggattagatccgttccaccccgctaattttttttttcaaattggatctgatccgatactcaatatattaaaaaaaaaaatttaaattcaagactcggacccaaacctggaactaagacatcggacccggacccagaattaggacatcggacccggacccggaactaggacatcggacctagacccaagacttgagatcgcatccagacccgaacccaaacctgggaccgagactcaaactcgagacctagacctgggatccgaacccaagacctagacccaagaattggacccggacccgagacccgcgagctaaacccacgacccagactgaacttgagactcgagacccagactcgcactcggggcctaggcccggatgcggacctggacacgggacccaggacccgggcccgaacctggacccaaccccaacccgagacctagacttgggatccagactcgggacttggacccaatagctggacccgaactcgagacccgggtgccagacccaaactcaggaccaaaactgaacccgcaacctagacccacgacccggaccgaacccgggactcgagactcgagacccaaacctgcactcgggacccggactgggactcaaactcgagacccgaaacctagacctgaatccaaaacctgacctgagacctggacccaaacccgagaactgggacccgactcatagttggtgttgggtcaagtttattaaaaatatattataactttacacaatctattaatacaagtcattacccacatagtattgtattaaataatactaatacaaaatttaaaatgtatataaaattataagtttagatataaagttaaatttcttacataaaaaacaatcgagtcggatcatatcaagtcaggtcagatttgattcgattcgagtatttgatttagcggggtaggtagggcagatcattatatgatctggatccggtcgaagcataactgaattagatctgatccgatccatttacactcatattcagttctacctcaaaaattattagtcttatattactaatatctagaaataaaatgtcaattaaccaattgacattaaagttacaatcctattcgattctacctcaagaattattagaattactctttttattatcaattacttaattctaaattttaacaagaattggaatctttccttggatacccttttacttacttgttctcaagaggaaatattatttgttgcgcctaattacttcaaaattggaaaagtgagaagttggtgcttgaaattttgagtttgtgaaaagaatcgtaaacaacctttaacaaattgtcaccctatatcatatctatcctcattagccaaataccttcatactgcacacaaaattgacagtcttgtcaagtaggaaaggataggccatgcacactatttactatgttcttatgtttcaatttattaagagtgaggattagagttgtatattcatttcaagttgggttgttagcactctacgaaaacccgccacaagcatcatacaacacaagaaatatgagctctcacttagtttgacataaaaacacaaatatattggtacgaaaataagatacctaaatacgaattaaattcataaatataaaaaatttaatataagtacttcatgtatatttttttcaaaattaaaactacaacaatattattatttatactttaaaaatttaaatattgtttaaaacttaggaaaaaaagtatcaattttgtcataagctcatatcttgatcagcatatgagaaatttacataaattcttatttttggtaaattttttacatttttacatttaaagatattttttatatttttacggtatttataaaaataatacaaaaataataagaaaactatatgaaaataatacctaaataatatcaaaacaacataaaaataatatacaaataataaaaaattaacaataaaataataagaaaactatataagaatacattaaaaaactgtaaaaaaatttaaaattctgtagaactatattttgtaatttttgttgttgtttatatttgtgtatgtgtgtgtttttttttatataaataatccataaagaataggttgatccatttataaaaaaaacagtaaggctatgtaacaaaaataggatggcctatttatttaaaacttattggtccaataaagcatagtttagcaatgagtccgtcaccaataatttataaaaaaaattacattgtttatccactttactttcttgtaattttttttttttt

SEQ ID NO: 184928 - DNA, 2008 bp, Cannabis indica
aaaaaaaaaaaaaacccttaattacatagttaaagggttaaaggatgagatgcttttattttgacgcattaaattattttaaatttctcaaaaaattgcaagatgtcttaaataattatgatgcacaataaaatataatataataagggtatttttaattaatgaatacaaaaaagaagtatttctcaacttattttttgaaatagactcttttaattttattttattttttcgattttcaatcttcttcattgtggagagtatttttttccatttctaaaatttattacaccattacatgtaatagttgaatcatacaatataacatacatacaacatgctaatgttaatgaacccctcaatttccaacccaacataatatccctaccaagaataactatagaagaaaaaagtacaaaacttccactgaaagcaactacttacagagatcatcaccacttggccttggtcctactttacctccaccctttgaacaactatttttaaaatttacaccattcttaatttcctcataaaaaaaatatatttatatataaaaatttgttatattttaagattttagtatatttttgtctggcggccagcctcccacataagtcatatgtatttgttgttttgatactcaattaacagaatcgcacgttgtggtgtgcccattaactccgctccactcaactcaaagccgcttccttttctcttcacagaaacagaaagatgagtatcgtcggtgttctcgctttacagggttcttttaacgaacatattgcaggtcacttttccatctctctccttaattgtgtgtgtatattttcacaagtggttctgtcttgtgcttatatgtgtaaaagtgtgttttttgtttggggggcagtgcttagaaggattggagttaagggcgtggagataaggaagccagaacaacttcaaaatgtttcctctcttattattccgggaggagagagtacaaccatggctaagttggctgagtatcacaacctggtctctctctcattcacttaaaacttttctcattttctaattccatatatctttttcatatgattccattgactgtttcttgtttcgaaagctctactccaggtaacatgcgtaacgcttgtaaatatacaaattgttgaatgggttttctttgtcaattcaaattactctgaattgctgaaattctttgtgttcacgtatgtaacatgataataatagaaaggaaaagataaagaccattgatttaaataatgctgtctatattgttttgaatttagattttatagtacatatatcttcaattgttaaattatgctcataatcaaattctattttcttttttcttacccccattccctttatattgtggtcagtttcctgccttgcgtgaatttgtcaaaatgggaaagcctgtttgggggacatgtgcagggcttatcttcttggcagataaagctataggttggttttcttgttcgggattatgaatggtctatatgatttgtctattttcaagttgaattatcagtttttatgtaggaaatatgtgtgttttgaaaatgttctgtaattgaaatgagcacatatactttcagggcagaaagaaggaggacaggaactggttggaggcctagactgcacagtgcacaggaatttctttggtagtcaggtgataattgaattgcttgatttccattgtcaattattacatttaccaaaataaatcttactatgctgcaaaattttgtgtgtgtttctgtatgtagtttctttggaattaaatttatgttttaatttaggatcaagtgtgcaaaattttgacatgttagattagttcagtactaactactagtgtttaagagtagactaggttgttgtgaatttgtttttgtttttctttttcaaatttgttattttaacatgcaggcatacacagaaagccaagtagagaaatccattggaccttatacaagttcttgaaattttt

SEQ ID NO: 184929 - DNA, 2600 bp, Cannabis indica
gaaaaatagttataactaatcaagattaactactaactaactaaatagtcctaatataaacttaatattttttcagataaattttctaaaatgaaactcaaaaacaaattaagattttttttttctaccatagaattgtaaaggacagccttgattaaggaatatgattattttattttattatggtagtggagtattgtattgcctttaaagtttagagtgagtgactcatctcatccttttcctaccctaaaactcacaaagcacttccatgagtttcatcaaccaaattgaaattggtgagagtttctcacgagtcactcatgacaagagaatttgaatataaaatggagatcttgccatttggtagggtggagtgcaagattggtgtttaaaatgtttattaaactaataagttgcaggtgatttagaaagcccaccctacactaaaattgtttctcaaatggcctcttttcttttagaaactcattccaattaattattactttattttgtgtccaactaagaaagaaagaaaccacctacacctactcaagactttatatgtcttttaccacacacaaattgtttttactaaggtcacctactagctgtttttattgtgtgtttttgtttttatctaactaataactccatcttttatataatctcaccccacttccaccttttattgcatcagcttctcatttcttcactgccatttctctctgacctcctcttgttctcagtctgaggtgggtttccttaacactctgttctgctcttctcattgtaccttcttttctcagatttctttagctacatttgtttgtttgtaatttttttttttttaatgtttccattttgagaattcttaatgctttcttgctttcttttgtttaatctcacaatgtgttttacttttagtaagatctgatctagatctgcttctttgccattattgatgtacattgtgtgaatgtgggaattgtttgtggcacttcgacggatttggtgaaatgggtttcactagatgttgttagtgagctgaaaagtaaggttcttcaaaatgatttagatgttttcagtttaaaggccattttgatttggctcttcttctcttcaaattttgagcgtcctctactgagttggatctctcattgaacagtttaaagtatactgtatcatatttgaaagatgagagaattacgtgtgcagtgtgtcattgcagctgttcttaatctattatattccactagatcttctttccccacctaacaatttcatcttattagaaaatgggtatgtatagttgaccaagatctagttcttcaaatcagtagtactcactgtgtagtgttaaaaaaaaggttccatttcgaaataaaacatagaatgaatgataacccacattatgatttgaccggagcataacactaattcccttcttttattaatactgagatctgaattgggatatgaaattgttgtttttataggaatttggagagtctggtatttctcacaataagcacttttcaaagacagtttgtccgaaatggcgtccaagtatgttttcattgccagcagtatgctgctgcttctgtgctcatcagcaatggctcaaaaagctgcttcaccacctcccctaatcctaactccaactccggcaccagccccagctcctgattacgtgaatctgaccgaattacttactgtggccggtccattctcaaccttccttgactaccttgtatccaccaaagtgattgaaaccttgcaaaaccaagccaacaacactgaagaaggtgtaaccatctttgtcccaaaagacagtgctttcgcatcccttaagcagaagccctctttgaaaaacatcaccaatgatcagctcaagtcactgttgctgttccacgctttgccacattactacagcttagctgagttcaccaatcttagtcaaagcagcccaatcaacaccatggctggtggtccattcactttgaacttcactgatgtttcagggactgtccacatcggctcgggttggaccaacacaaaggtcagcagcagtgttcattcaactgaccctgttgccctttaccaggttgataaagttctcctccctgaggccatttttggaactgatatccctccaaccccagctccagcaccatccccagatattgctcctgttgcagatgcgccaggagatgagggaactgatgccaagtccccatcatcttctacttcacaagggaagtctgcttctcacagggtcaacagcttgggagttttgagccaaatggttttggctgtttcaggtgggctggccttgttcttgtgaagggattggattcaatgttgagttgattttatttttttaacttattatgttaaaagggtatatttggatttgcatcagttgctccttttttcattcgaaaccccatttttttctgaacatatctactattgatattgaattttatgtatgagaatatgtgagatcttctgatatggaagatgatgcattttgtttgatatattatcatatagaaaatgattgtactcttctcagcttaaatccatgttgtttt

SEQ ID NO: 184930 - DNA, 3504 bp, Cannabis indica
tttctttcttctaacccgaccccgaaccactaactgcatccattgattgctcaggtgaaccccagcgaatccctaataaaaaaatctaaaacatcccaactcctcggcctccatactccttttctcttgtctaagtctctcgattagcctctcactttcatatcaatctcacattcatttttctttctccccatcgtccccctctctctgcctcactctcctcttaaccatgattccttctttctctgcgcctctcaccctcaatcaatctcttcatttctcttgacagtcggcaccacacaactcctccttcctcgacagttggcaccacgctactctggcctctctatcatgaatctctacaaggtatttttatttttaagctagcttttgagtaggtagagttaattcctttgttcaattttgtgtatattgctgcaatttgttgagaaagtatgagtattgatctgcttgtttaaatattgaagagttaaaattaaattcattttggttacttttgattttattttagaatcattagcaaggattttgtatctgcttctgtttcagcaatttagtccaacctttaacaagtattcaaattttattttgagattaatttatcctaatatttgatttttattgtcgattttgtgtttcgttttgcgattttagatctagacttgattgtaggtttttggttctgtttaggggttcaaatttgtgaagggagattattttttagctggtttgaaggagtttttcgattatgttatttccctatttttttgatttttgtgttgatttagggtaatagtggttgtggtagtggtggtaacaatggtatggtttagtggagatagcagtagtagtgcgatggtggaaattagacacaaagaggaagaagaaagaaagaaaagaaaagaaataggaaaaaatattttatctatttaatttttttataaagaaaaattaaatattttttgtaatttttaataattaattatatcatatgaacaaatgaaaatttttcacgtgtatatagtagtagtctatcttgacacttaatagaccaaaatagatcgatattatgatgacaaaactataaagtttagatagtttatccccaaaaaatttagtaaaggggttaacgtatgaaaccttaaaattcatatagttttacaaaaaattatcctttatttaatgaaaatgtgtgggaccatcgatgatacttactacaaaaaaagaaaaaaaaacaaaaattaccttcagtgataaccttttagtcacaataaaaattatgtgtgattaaaacatatttagatacaagttgtcactaatttagtttaagtcgcagcaaatattgtaactaaaaatgtacatttagtcacaacaaattttgatttttttttactaatacttttagtcacagactttttaatcacaacataagaattaatgataatttataattagtcacaactttttcacttatagtcacaaaaaatgactaaaagtaagatttttttacagtgactatattttgtggagattaaaaactagctgcgatggaggactcaagcttcaacagttgcaacattgggatattcaataaacacgtttgtgctgttgccatagcagccttggtgtatcaactaaggtagaaccgaaatgaaattttgtgaaaccaatgctctaaaggaggctataaaatcaaaactaatgtaaagaatagtatcatttttgtaattcctaaaaatactacacagatagacaaatatcgggttgggaatttataagggttgatggaagtaaaatgtaatggggtgcaggctatttttggtgctgaagtttagtaataatatatacagtatatacatttggagacccgataacaaattatatcaatagcagtatgtcaccttttgtagtgtgtttgacacctaaagacgcctcttatagcttgatgaaagtagaagtagcaagctatgtacaactaattaattgaattattcatgtttgcaaattgttacatattgagttataacttctcaatactttcgtttatttaatattgataatatgattttgaattatttatgatatatatattttatttggggtgatccaataatcaataatgttgttgtagtagttggccggtacatgttcaatcatgaacagttgtttaaattttcctataaatagaaaagcaaaggaaaagaggcattcataatcatcatcatcattatatatatttacacataaaatatataacatatataatatatctaaaaaaatcaggatgaagaagtttattggaacaataataatgttttttgtgatgatgatgatgatggtgcagggtagctacggcgcagatcgttgcatggtggccggggaatactgtcacatcgcagaaatgaagatttgttgtaaaggactacaatgtgaaggtcccataatcggtgcgagtcgaaaatgtgtgcctattccgggatgtttaccagccggttctaagtgcaacattatgtcaaacgagtgttgttacccttatctatgcaatgctatgggctctggttattgtgtcccaagaaatcaagtcttaaacgccttatttcctaagaagaatgatgatgaaactactcatcatcctctcatatcaattattaattaagtagtgtgtgacaaatatatatatataagaaactatctatctatatatatcaagactgggctccatgcatgaaagtacatagctatgtacttatatctatatatctatatatctatataaataaataatatagtccagctttgtttcttatgtatattgattggtgtttgtatttccttgccttatggcttttaatgatgaacagtttgtgtctattttttgttttagtatctaattttatgtgaaaaattggtaaatcaacttatttggaaacttagattttatgggcctaaatttagtctccggaaatcaactttataatttattaattctttatgaatccactataaactcggaattcagtacttttgattttatagaatgttgtatatacataatatagatacactataaatattcattgttttaatcacaataataaattatcttttgtagatggtttatattgagtatggataatattactattttatcccttattatattttattcctaacaattagtttcttgtaaatagatttcagtaaactaacacttagtttcttgtaaaaaaaaagacacaactgtaatatattttttataaataaaaaaagtaaaaaataaaacatatacataagtttacaataaagaaaccctaagagataaaaaaatataaccaagttgcacaccatttcttctccttctctcgcctctctctttcttcttctccctttccttgctgctggccaacatctccagcaaacggtagccatgacactccatggcgaccaaccctcctttgcctaacccggagtctctctctctct

SEQ ID NO: 184931 - DNA, 3058 bp, Cannabis indica
aaataggttgatactctttttctaattatgtatgatctgatgataatatacttgattctgtctaaaatgtacttgtttgtatgaattatagaatcacaaatcgagaagataagttcattcgaagagcttttagccggggattgcttcattcttacgcagtatgagttgcaatttcgaaagaacattgatacaaaaacactatgtgagaagactttgacagaggatgaagcaaggaaatttaggagtgctatcgaaagaaatcttatgtacgagatgagctacaacaaacatcttttccggggtatggtgggaaagattgtgtatgaggaaaatgggaaaaaactcacaaccccaaagtattttcttgttacacacattcatttctatgttaagtactggaggacccatgttaaagacattagtgttttgagcaattatagctcttctgtggacatagctgaacttgctgcaaataaagtcaagtttacctattctgtccgctgggttgaagaacccgaaaatcttggtcagtcctcgggtgacactttatttgatgaggagcttatgagggttagagaagctggtggtctgtggaattcgaaagtgttgtattggggaattgtcactcttgtttgggttgggctaatcctcacagtgactgtgccatacttgatcaattacttggatcggtatgatcacttgtactgcaggttctgttccagagatcaagaccattcagattgtcgagttaataatcagcatcccgtccatggtgataactgcaaatgtcctccttacacatcacttctcggtgctgttcttgggaatggaattcacctgcttgctatgtaattcaccatatttttatataaagtttcctaggaataatttctctttaccacacagttcttcaatattgctaatatgcttcaatctgcagggtctgtatcttcttcattttggcatacaggggttccttgaatttttgcaatttcaaatcactttcttctcaaataatgagaacatattgttttacctctttcattctggggtataaggctacttcatttcattctagattcacatcaattggttgggtaataattcctctgcctaatttcaaccactgtaatatcatttccatcttatgtttttcatgcatgcaactgatatcttaatctcatatatacagaatgaatgtattttgcaagctggaactctattctttattccagcaatctcaacagttttgattgcatacggcttagtgataatggagtttgggatatccgaagttgcagaattgggtggtatctttcaaaacatagtcgattggggacttgtcacaagcgttgtggttattctaactggtatcattgctcggcattatttccagccagaatctcaaccaatatgtcccacaagaaatttacaaagagagactcgtcagcagccttggtacaccaagacagagtttcagttcctgtttggtggcctagtgccattcattgtaattttaccaaagatggacaacatctttgcaagcttgtggaatttcaagatttgcaacacgtttcaacctttgattacttcattcattacgcttgtcataaccaatgtgttcctggcaattggtttcactgctaggcagatatcctggaatgatcatcactggtggtggaggtaatattctttaatcatatttaaattattaatgcttgtgttaacaaatgtgattttgtgttttttatgtgtgtataacagatctgtattacgtgggggagcaccagccattttcatgttctgttatggcatctacttcttctcaaggataaacatggatgaatcattgatgctacgtattttgggataccatgtttgtatgtcctatgctttgttccttatactgggaaccataagctactatgcttcagcttttggcttttattgcaccttccaccaacagaagcatgagtagtctcctcaaatacaatattgttctataataattgacactgaaatgtagtttttttttttctcaatattgtttctataagtcaatacgttgtaatgtagataattgaaaatatgcatataaaatggcaggtgtactttttagtcaatcattttttgttaagacttctacactcattgtcattgtttgcttatataacctttgatagataacttcttttttctttctctttttaatatgaaacttgagtttatttatatgcttcaaaatatctaattttcacaaaaaaaaagactacaacaaaaatatgtaaaattggaccatacttcctcttacataattaccactgctggtttctagtaaaacaccaactttggctgttaatgccattaactatgaacctaacttttaaagatattgttcaaaaaaaaaaatataaactcaaaaataaataaaaataacaaaaataattataaaacagtaatgtaaacatgttaaactcttttccgttttcattttttgttttcagatatggaaatatgaagtctacaaattttagataaattttattatgtatcgatccgagtccatgataaaaccttgattttggaaaataatttcaatgaaaaattgatgtctaattcaatagttcttttaaattttaatttttggagacaatttacattataaaattaactacacaatacaacattaacacatcccaatataatgaataatccaatttattatcatataaaaagatacaattcaatacaaattaacacattgcagttgatgaaagtttctttaaaaaaaaaagcttatgaaggtggaaaataataaaataaggggctaaatgatatagaattggtaaggtatagtggggttagaatgcaaataaaattgtcgttttgtatagttgtgaacaaatgagaaccgttgcgctaaaaaagcaaaattgctaccatttgctccctttcacaggattatttgatgctttcgacatcattatcacaataaacccagtgagcttcctcaaaaatgctgtacactacctaattcagtgtccaaggccggcgcaac

SEQ ID NO: 184932 - DNA, 2144 bp, Cannabis indica
tcatataatcaatgttcattattaattaaaatacatatggttattagaataccagaataattttaagcccttaaataatatctgtcacggtgtgtctactagttttatagagacaaaactgttcctcagcgagtctccatgtgctttgtgctccctccgtttaaacctcccaaagtcctcctctttcgcttgtcccaccattaataatcccacaatacacacatcaaaacattaactctctctctctacaaaagtcagaggtttcatataaataaacaaaagccttcaacacagttttttcaaacccaaacaacatgtcaaactcaagtactacttcttcgtcttcgtcttcgtcttctcatagatgggtgtactcttacataaagcttcaattctacaatcgaatccgacggttcctgcgttcaaaagctggccgcaagcgctacgtgtcatcttcttctgatcaactcgaagattcgagaagtattaatagtactaatgatgttaataattgtagtaataccgtagaggtcgacgttggtaatcaagctgttgagtcgaaggcggtagttgaagcaatgaaaagtgaagtgggaagagaaagccgccacggtggtgatgacgtggcggggttgcaaagagcagtgaagaggcttcactttgggagctgggtggagaaagagatggcggctttggagattggaagcttggctaaacaggatgtaaaggtcagaaagttggtagccgagctcggtgttataccggttttggtttccatggctgcttccgacgttgtttcccgccgtcgcgctgccctggctgctctccttcaacttgctaatggaacttacacgtaagttcattaaatctttttaattgcatatatgttattatttgaaaatattttagttctacattacataattaataatttaaagcagaaaaagaaaaggataattataacatgacgaattgaagagattttgactaataaatcttaattagtgtatttgtcaggcatggataataaaagatatagttttaatcgctataatttttaatgggttcatgcctaataatagcactattattggtactagtgaaagaatcatgtaaaagaagcctcacaccataaccaataagaaatgatcatgtattttagtgccataacatacaagtttctttgcattggacataggattttatttttaaataaattagaaaatataaagttaataccatagttattatttcaggtccttatgggatccatgacttttatttgacaattgagcccattagataaattaaatatatatataaaacattgttatgggttattttagtattggatccgaaatagttgaatataataatttttaagaaataattattaactaattataagataatatatttagagctgctagacaatcaattctcatatatataattcagtctttgagtcatgagcctatctagtctttggcgtcagtaaatggaatgcatggttggcagccatccactcatatctacttctgacctaattgacggtacaatcgatgcttttattcatgacatgtatgaattactctgagaaaatgaaataaaaaatgataggggtttcaactatatattgatgatgacggagattctttcataagaagaggggcttagataatgaattttctttaacatcaagctaagctatctaaaaatcatctcatgtcatgtagggttcgtaaaaagttctttaacttaattgttacacttatgggtgggaatcttagataaaataattaaaggtaaatattactactgttgtcttcgtgggtgcattcattctgaagtagtaaattagtaattggactctagtagttgtcatatttcacatatgcatcgcacaatagaacccatcttttttagtgggtcagtgggcttatcacatatccatataaaatggcatattcaatcagtatgtggcatggtaccctttattttagtgaaaaagacttcatattacttcaatattcgtccaaaaattataacgtggaaatataatttataattctaccaaaaatgtgtatatttaatttataaatatcagattattatttcgagttaataaggctgggagagttaga

SEQ ID NO: 184933 - DNA, 2378 bp, Cannabis indica
tcattacctgaaaataaagaagaaaacgttgcagctactcctttaaatgtatggtaagcctttctagtcttttatctttttcaggagttcatttattattatttattttgaaagaaaatattggtttgtatagataaagtggaccagaagagaattgcgaggtattgatgtgggtgaaactagtgagaagagaatagtagataatcatcagctactttggagagctgaaacatattattatatactattcatcaccctttcccatatccgaagcgaccatcaagatgcttttatttcaaagtctttatctagttagaatccctacggacataacctaacagctcaaaagaccatatccctttctttactctttactcctcatttgattaacaacacccaaaataaaagaaaggttaaaaataaaaaataaaaaaaatagagtaacccacaatcgcctcttccaatttccctctagtaacttttttattttgttttttcaatggtttttttcccttgacttttctcccttctagctagtaccactaccattattaagcctttaaaagaaggaaaaaagaaaggaaaagaaaaggaagacttcatatctctattatcaccagctttcacataagcaagaaaaatcccacatcggaaagagtggatcaggttacaatattgaatcctttcagcttcacacgattgagaatgaaccccctcctctcaatctcattcgttgttcgatttggcactgaaaatccatggaataatcaattctcaagccatttttcataactccaaacagtcaaatccataaagggtagtcggaaaatttccctccaaaaagtgtttctttggtgcttgtgagaaagtagtaaaaccccaatatactactgctactactactactacttaccaatggtgtctcttcatcatcactacaatcatcaccgtccgtaccgcctagtgcttcttgacagtacagagtcaaactcacctccaccggcggcagcagcagcagccaatgaaaacagaggaaatctcacacgcgggtcatcctacgtgagtgaagccaacttcgacactaacatggtgatcatactcgcggcgttgctctgcgctctgatatgcgctttaggactaaactccatcgtacgttgcgctatgcggtgcagccgaaggttcgctttcgagacggcggacgaagccgcggcacgcctcgctgccacggggctgaaaaagagcgcattgcgtaagatccccgtggctgcatatggcatttcttccgggatcaaaatcattgatacggattgtactatttgcctcggggagtttgagacgggtgacaaagttagagtgttgcctaaatgttgtcatggttttcatgtccggtgcatagatccatggttggtttcccactcttcatgcccgacttgcaggcggtccttgctcgaacagccagctagttcggacgccgcccctgccaccgaagcagatgtgggaattcgacataatgggaatggagcagggcccggagttggacacggtgaggtgacaattaatgttgatgaggttagctaatgatggatgataagtaaaatggggacacaaaggcagaactagtttattgctgtgttcttttttctttgttattggcctcggctgcagtcaatgaaacaaggctaatcttacaagcgggccatgctcttgaacgaagggatttggcatcattgatcggaatgctgcaacagggtccagagaggaggacaagttgaggtgaggtgataatattaatgtggttagctaatgggttaattaaagaaatggaacacaaaagcagtgctagtttcttcttgttgtgttttcttcatttgtaattggcctaagttaggttatttgtttatagagatttaatgtcttgtcttgattggtggttgttgtagttctgtttgagaacttctgaagtaatacgatgtacatttaacacactcacggagaagaagaaaaggaaatagaagagcgttgagttcaataatatttgctggagtgagtagtgtaaatgtagttttgagtaaaatcatagggttcgtctgttgatagactcattagaatgaagaataagaagagcccacctactaaagtagtatgttcttttttattatcttgctcattttatgttccttacaaaaatatgattattgtgtgtttcagcaactttgcaaactgacttcatctgtgtaccaatttggtaaatgaaaaaaatatatatataaaatggttgagtgttagaacaatggagattagattaaattttctatttgccaagtcataaaagggaaagttaaagtcagtcttgacaagaagttattctatcttccact

SEQ ID NO: 184934 - DNA, 978 bp, Cannabis indica
aaaaaaaaaaaacatcactcttgacttttataatggaatcaattgtataaactttgttatggtttccaaaacttgttaattttggatttcgaaatccatgcacttcaaaagtcccatacattggaaaaatttcatccaaacattggatattttgataaaatatatatttgcactcaagtggcaattgaaaaatacatgatcctttgtttcattgttcaacccggacaaatttcatccaaacatatgttgaatcgaaataggcgtgtcttaaattttaatctgtcaagaatcactaaccagaaaattattctatatatcttttggaatagatatatagcctgattccaaactctctcctaccaatgagtttttggataacgacataaaagtttgtaaccttctttaattgagttttaggtatatatatcacatatatatcatatatatatatatatatattgaattaactaatatgtgtttcacatgcatctgttatgattttttattgggatggaatgagtttcttaattagtcgtatttgtattctggtttgaaagttggtgtagattttttgagttgtatgcaagtacttttcttagtaagatatatatgcatcttttcagttttctgctaaaataggtaaattatttatatttaattaatataaaaataattacataaaaaactatattttttttttataaaatatttatatttttacgtttaaatatttttcttattatatttttacaatattttataaaaataatacgaaaaatatataaaagcaacaaaaccgtatttttgtaattttttttattgtatttttgcatattaagagattttacggttttctattataaaaataacataaaaacaataaaaaaaaattacatagaagtataacagaaaaatatataacatccaattaacataaaaataacaataaataaatacaaaaaaatcaataacaaatta

SEQ ID NO: 184935 - DNA, 3792 bp, Cannabis indica
atttatcaattaaaataatagtagtattagaattataataattataattattttacaaataattatatgtaactattattaaaaaaagatataaaataactaaaattataaaataaatatatattttaatatttagttcatcaattatattaaaaatgtgaaaatatagagtacgaatttaagctcgtataaaaaaaataggttgatctatttaataaaaatgggttggcccacataaaacactgcataaatctgagcacggtacaaaattatcagacttgcaggtcgtatcgggctcaatcaaattgttgtacgacaaagcataatccatattttttattgtatggcacgacacaacacgatctatattttttatggcataacaggacacattcttttttttatagcccgacataacacgacctatattttaaaaaagtacgaaaaatataaatcgagctagtacgacacacatgtattacagttgtgttcgaagctagaatctataatggactatatccttgaaactattgaatggaatttctatttatccattttttttatatgaaaatagtaataataatagcttctaaatcatgtagttgggattatattgaattgaaaatatgggcaatatgataagttgcgtaacttagtaacctaggactattggtcatcactaaatatgagtggttttaactattagtaactttaatagcaaaaaaagagcccctgtgtttagtaaatgtattaatactaaatttgcaactagaccaaatttaaactaagtgaacaactgaagaagattgtaatcataataacacaaaaccttcattggtaaccatcaaattcaaacccaacaagaggtccctaatacctaccttagtaagcttccaacccaacccatattcaaaagaaatcccaaacccaaacctgattccaaattcacaggcccaaacaaaaaccaattactggacatgttttgttttccaaaaatttcttactatatgaacttattttataaacttattaaaacaaacaatgcttcaccatttatttattcataaaaagtaaagatttcattcaatggtaataagggcatagtctattttctgagtgaagttctcttttaactgatatcatgagttactcattatttatcactttcggtatttctcccgttaacactatggcttataaattagctaagaatgtacttatgaatactcaagttatttggttggccaatgttgcaccatataatttgaacattgaacacataatgctcattaaatatacaattataaatctcccaaaagtgatgatccaaattgaataatgaacaaacttttattgcaaaaataaacgtatagtacatcgtaaagaaaagatgaaatattcttcatcctaacgagttcaccatccactctaagtgtatatacaactaatttataagtgaccttatcagacaaccgacatacatgaattaggaacatctcaaaaaaattgaacaataaaactaaaaatatcatctaaaagagaatcaagataattcgtttactttcaatttttattcgatgagcactggtcatttgatataaataaaattacatagtcaattacaaatcgaacacataatgctcgttaaaaatagaattataaatctctcaaaaaagtgatgaccctaattactaatgaactctaagagggtttatttatatagttagttaagcccatttctatactataacaaattatggaatagtacaaaagtataaacttggttagttggattttcacatgtgcttttagcatctcaaaaccttgttttaagccgtcaaaataattttgaaacttaaatctagtttaaccgatcctattcaaaaaacaaaaatgatgaagagattggtaattgttttggtatcttactatctagtttgtatgacctcttttgtgcatgtctcaattgacatatttgcttaatttatttagaccctaaaaaaggagacaaacacaaacagcaaacgtgcatatctgggaacaaaaaaacgaattgaaaggacataaaatctaaactaaaacaataaaataaatacaagagacttaacctccctgcatcatcatcatcatcatcatacaactgtaattaatcaaaggatgcctaaaacgcaatagcaagatccagttacctgatttgataactttttattagatgcaaagcaattgtgatctagtctacgaaccaatcagacagtcccagatgatttaaatcatctcaatgtgttccgctactgctagtttttttaattttctttttctgttttcttctcaacaagcaaaaggaaaaaaattgaagtttccgatcaatcagacagggcgattgaagagccttaagccagaaatgcacacaccacgattgacctgtgacacttcattccaccccgaaaattattggaaactaataaaaaggtagatgttctccatacatctgggcataacaaaacacccatggataccaactgaaaagaggtaggtatcaaatagggcaatatgaacacacacgtttaaggagctttggctactttatcgggaagaacattatcgggaaggataagctcgggaggggtttcacgaacaacgccaagcattgaatcatagtcctcatcgcggcgtgcaaacttcttacggagcaccttctcgaactctatctcctcaaagccctttgcattttcagctgcatgaacctgtgccaagttggtataatttacagctgactgggagatgaaggctatctcttcttcggttagcttcctcaaaaactttgcagggttacctccccatacctgtataaaaatataatcaacaatcaataaatttgaaacccaagttgaatccaaaatttgtataaggaaaaatgttgcatttactcataaatgcaagctcattgaatcttggtatcccaacaaatgcattctaacaaagcactcaggtaaacaaattagatatcaagccatcagaatttcagcgaatcaataggagtgtagtattgacctctccgtaaggaatttttgtattctgccttacaagggctccagcagcaaccatggcatgtttctcaacaagagttccatcaagtaaggttgcacccataccaacaaaagcctcatcctccacagtacacccatgtaaaacagcactgtgacctgttatgttcacatttgaagtcatcaagcaaaatcactaaatgaagttgagaaaaaggactgttatctgatatcatgttaaacacggcacaactcacctactgtaacgttatctccgatgatagttggcaacacctttccactcaaattagattttgcaacatgaacaagggcattgtcttgtatattggtcccagaccctatactgatactgttaacatcgcctaattacaaaagataatatcttgtaagttatagcagataaaacgccattatacagcaataagtttcggtactcccatactgtttttaagagaagaattcagtcatcataagcaatttcattcctttctgcattgaatgagcagcaaccatgattgacaacctacaaaactcacactaaaatacttgggactggacttgacacttttttatgtggtttcattatctgaacttgcaattagctacaatagttcttctaatgttctcaaatattcttcaagtcattgtttcacaattatgaaatgcatttcctcatatagactcatcactcataatccacaccacaatatccccaaaaacagaaaaa

SEQ ID NO: 184936 - DNA, 4140 bp, Cannabis indica
acacatatttttgtttccatgatcagtatttggaacttcttaggccgagttgcaggtggttacttctctgagattgtagtcaggtacaaactgattttcattgaatatacatatccatattgactttgagttacaattagtcactgtgatctcattttcacagggattatgcttatccaagaccagtagtaatggctatggctcaatttgctatggcatttggccatctctatgttgctttcgcattgcctggagcactatatgttggaaccatagtaattggtgctggttatggttttcactgggcaattgtaccagctacagcctcagaattgtttggcttgaaaagtttcggtgctttgtacaattttctcacaatggcaaaccctgctggatgtctaatcttctctagcctcattgctggccctctatatgaccgcgaagcagagaagcaagctcatgggcgaaacctccagcaacagtttataggatcaatcttctcaggcgtgcttggaccgaacgatccaccagcatgtgaaggttcagtatgtttcttcacaactttggtaatactatctggcttctgtattcttggagttgccttaagcatgattcttgtgtatagaactaaggcagtatacacacacctctatgggaactcccgttcagcgccagtttcataatcggttggtttatcatttgtctgtataatttgtctagagtatgtttccatgtgtttgttaagactatatcagaagaaagaatgatgtttttgggaagatatagtcttaaaaaagttttcctctagaagtgggagccataaaccaatacagttttttcccttttgtctattttgttcagtgattaaacaactcattattgagtctttttcaatttttttggtattctttccatttcaattttgtgctctcttgagctcatatgatagctgtatccattatatattgaatgagtaagtaaaaagattgatattttcttcatatttttagttctcacagtgaaatagtgctcatatctttttacccttatgttggtgaaatggtacacttgacttgaaccaccaaaaaacaatgcgctttcttcatattattctaaacaaaacattcagtaagatcatcaattttactctttaaagctttgaactttatgataaaacatcatacaagtttgcactttatgtttaaagcaaaagcaatcaatgttgaacaaacaccatcaaagctttcacttttctctgtttttaggatgaatgacagatagtgtgcattaaaagaattattagagaattaatggtatgattgttatttctttaatgggtagaggcaaaggtagcttttttatcatcaagcattcattgcagtgaggaatcttctaaaatcactaggcgacaaagatgaacatgagttgggtgaagttaaagttgaagactttggaaggtaattttaagttaaaggtcttccttatacatatatacacaacatgtgaaaatcaaacaattaaatcaacatcaacccacttgaaagagtgactcttcttcttttatgtgttggctgaatactaatactaatactaattaattaattaaggaccaagtgtttttgcctttttcagaccttttcttctattgttatagttaggtgcagtgtcattatcttgtcaaattcaaagctgtcatctcaaattttgtaacatccctttgttttttgttgtgtgaataacttcaaaacaaaattgtgcttatctcttcttttttttttttgttaataattttataattatttcagctaaattccacacctttattatttcagcccactgattaattaaatacagtcatttataatttaacacattgaaaactacaaaagaagcaaaagacaaccaaaaacagtgtttgcaatattattcatagtttaaggtaaatagaatcttacacctgtattttgtaaattattctcacatgttatgtatacatttacattgaattaggcaaaggaaaaaacaatcatatttgcaggtgttcttttttattttcttttttaaaaatgatttgttaaaaataacttaatatttatgaattgaaggcagtacagtctctcctgatctcaccaacaccaccagtcttgacaccaactcggccgagttttctcatggccgagccaaaggccgcattaaacacaccagcattgttggcaaaatcaagaactgtttgttttgattgagcatcagtgaaaagaacctgatcagaagtaaaaagtcccttgttggcaactaagttctggtagtacacattatcgaaagctcggggagttgtagggtccatgtcaatggctatagttgggtcaacatctctaggacaagaagccattaactgctgagcatatgcagagtccaaagaagggtcaattgggttagaaggtgtgaatgagtagatgcgattgggccacacggttgcagtgtgagaaccccaacagtgtgagcaccagagagtgctatcatgtcaagttggctaagattgtttttgctaaacatggcattgagttcatctaaatgagctgttggttctggcaagtttcctttaactcgtgacgcttttgatattagtccatcacggcgtcccatctccacattgaatgttgagcctcctgcctacaaaaaatacctcaaattaacacaaagcagagtctgacataacataacaatatggtatcagagtcgagttaaattttagttaccaaaacaacgacgtctctagctgcaagagctaaaatatcagcacaggagacaatgccggggcattgagcttcaacggcttgtttggctttgatgactgtgtcaaaaccgtctcctgctaaggagatgttgtcgtctgagtctttctctgcatcgccatttggcgatgcaatcattacagatgcatcacaaccctgccacacaacataaacatagatgttaggaataggctactacaaaaagtttgaaaataaaacaaacaaaaaatgttgttgaccaacgtaatttgaccagggttcatgttctgatttatgttgttatgtattgcctagtcaataataattggtttgaactattcctaggttggctgctgattaaatttccaaatagaatagcctccattagtgactgtgtctactttttaacataaaaaagagaaaagaaaaacacaataaataatttgtaatataacttaatgaaaactctccctctacattcaaagttcaaaaccaatgatcatgataatcagaactagttaacaaattaattaagacactcattactagtaattattgaatcaaaacttgagaaacatgtgtatgtatatatgttatgttaattacctcaacgaaacaatcatggaaaaacaaacgaagagtagccggaacagtgacaaaagtctgagcaaacttagtagacacaacctgtcgaactatgaattcaacattaggacatgtcccactatagaagttttcaaccaactgagcttctcctcttcccatgttcataccaatcaaaaccattaatatcaacaatcctctcatatttctcatctccattttcttctctatgagaaaattccagtagagaataataatatatggaataagagaatggtgatgagaacccttttatacaaataaataaataaacttggtctaagagcgtttgttctagtaacatatatgtgtcattttcgtggaaactcaattactataaataaatatattatataatgtttgatgttgtattacactaaaatcccagttgtgaacaagaaatttgtatgtgtctatatggtctaggtgagctgccttaattgtaatcttaatcgacggctgagaatgagataacagtgctatattaatttggtgttgatgatcaaactttggaataatattagtcaaacacatagaaaaataattgtaactgctacaatatataaataataaacaaaattatggttatgcgtataggtcttaataacattggtgagtttttatttattttttgaatttaaaatatatgtatacacatattgaattggtatatgtgtgataatgttttcaaacataatataatatatgtatactataaatttgttag

SEQ ID NO: 184937 - DNA, 1159 bp, Cannabis indica
aatgcatgcgcataatattatatttctgtatatgtacatatgcatattatttctgctcttattctaaatgtttataaatatatttaaacctccaataataattaaaagaaaaccatatcagcaagaaaaatatataattaaaagaaaaccatttattagatagttacaccatttaaatattattttatacaaaataaatatataaataaaattatttacacatcttctgaagagaaggataaatacctaattatacttcatcttcatttacatagttataaaaatatgacctcaagctccactagcttcgtatatgcttcctatatgttttttttctttttattttcagctactttattttcttcatctttttttactctgcctgtaagaaaaaaaaaacgaaaatggggtttaagagaaaacaaataagattaacatgaattaaacataaaaaaaagaacatcacaataatatttatataattatatatatatatatataaataccgtaatcgagattgaaatcactcttcaacttaattaacttcataacctaatagtttggcaatgtaatagcaccagtgttgcttactttctacaagaaaaacgattgtataaaaactcaagctatatattgcaaaacctatatattaagaaaatcaagaactattataaaaatccaacaaattatttaattaatttaaagaattttaagtgaagagtaaactcattgtttttcaaaataaataaatagctgtaagtcttacatatctcaacagtagtaaaaactcacagaaaatacacaacaaaattttaagcactaaatccgataaaacactaaacaacatttataagtgattaaaaatcttaaagtaatcaaatttcacttaaagtggaattgaatattaaaaagattttttctcctatagttgtcttgatattatttggaactcactcactgaaggattaattattaactcaaacttttaggtcttgtttttgtgatgattaataaatatttaattattatttgttactaataatttgttaatttagtagcaaaattaaaatataaaatatatttttccaaggtaaaatagtacatttactgaacttctcaaagtgaatttaacaagcatatcaactactttatatttgat

SEQ ID NO: 184938 - DNA, 878 bp, Cannabis indica
gagagttccattagctcattttgcacattctgaaatttgcccataaggtcagatcatctctttctagtttctctctctagaaatataaagctcttgccttagtcaattttcttgtattctcatgactaatataaaaacttgaagtagatatagatctattatcgtcacgacaagggagtcaactactataaacctcttgtatctctgtatttgctttacttaacttctatttcatctcaccaatctaacgagtaagtgttggccaattttttgtgccaacatttacttacacattctttatgtgacagtcaagagtgggtctagagatacaataaagttgtaggttcttaaaaatattgaaataaagtaggcacgttaatgattgaaatcatagttatattaaggtaaaatcgaaaccatgagcacttttcatatgttaatgatatgagtgttttccaaccaccacaagagcaacataaatacataagggagatgttttctccaacacttgatcaaattatcgaacacttttgttgtagagttcaaggcaaggctagattaacaaaaaaaactcgtcttaacaatattgagattcattgcactactatggaggctatgctaaagacaataacaacacaattaggcatactggctagtgctatgaaaaattcagtatcaaattcttttccaattgatgtagagaataattcaaaagagtgcaatagtattactttaaggagagagagagaacttgatggtactagtgtagcgaagaacaaggatgagaaggcatgtcaaaggaaagtgatattggagatgataagtcatgggacgagaaaggttctgtctagaaaagaagacatctacaaggcacctct

SEQ ID NO: 184939 - DNA, 1301 bp, Cannabis indica
ttcctcagagtcctaaaaggacctgaagaaaacttcacaagttcaaaaaaaaaaaaaaaaatacgagagaaacggaaaccaattctcacacaaaagccctaataatttctcagattctctcaattttcatttctcatcatttctaatataaattttaacaataatctgtaaggtaggcagctacacagggaaggatttaggggtttttcttactcattattattattagcaaacgccatgagtcccattcagaacttcgagcagcactcgaggcatctcgtcgaccccgagcttcgtaaactctctttctcactctctatttatatattatatgtataaatatattatagggaagtattgccttgttgtgtttagtttgaattttgaattttgagttttttttttttgaaacgacagctattcagacgagattgcagatggctatggaagttagggacagtcttgagattgctcacactgctgagtacttgaattttttaaagtgttactttcgagcattttcggtgattctattgcaaattactaagccgcagtttgttgataatcctgaacataaacttagaaatgttgttgtggagatacttaatcgtcttccacacagtgaagttcttaggccttttgttcaggaactattaaaggttgctttacaagtcctcaccactgataatgaagaaaatgctttaatatctgttcgcataatctttgacttgcttaggaactttagacccactttggaagctgaagttcagccgttcttggactttgtttgtaagatttatcagaactttaaatcgactgtgagccatttttttgataatgtggctgttgttggggaagatattaagcctatggatacttcatcttcagacttatcgattcctagtagtgggtattctggttctgggcagctcaatccaagtagtcgttctttcaagataattacagagagtcctttagtggtcttgtttctttttcagttgtatagtaggcttgtacagaccaatattcctcacttacttcctttaatggtagctgctatatctgttcctggtcctgaaaaggttccttctcatttgaagactcatttcgttgatctaaagggtgcacaagttaaggtacgggctatttactaataatttcgtgtcgtttacaaatttttgattgcaaggttatgatatttaggcataaaatggctgctactcttgtaatgcttttataggtgattaaattggcacagtgaagtcattcttttgtatttttattatggtgccgtttggtaa

SEQ ID NO: 184940 - DNA, 7673 bp, Cannabis indica
gagaagggcagcgtccccgttgtcggaccggaacaagaaacggaagctagtcgttggagggaagacaaggctcgagagaccttatgatgctacggacggctgtccgaagtgcaaggggtaaactcggataggataggattgtgcgcgccgggccctttgggtgtcatattatggccgagtttaccatacctccggcccttatgttacgcgaccgtaatattttgttacgttccaccgctgttacgccagaaataaaaggtttcacacgagctcccgttctgcggcgtggcggcaggaccgataggggattggctccgggtgtagatagggtaaaatctgcaggggtcatgcaaatacataggccccttcccttctcttttggatgaatggggtggtttagaaggtgctttccgatctacggtccctcggagcgaggggttaggcaggtaatatgggccctctgacttccagctatgtgctgtgcggctcccgcgaagcgaatgaagggaagctcttcgagctttcgggtgagcttacgcttactctcagcctctttgattggtaggcgggcgggctaagccccctacttaagattccattcataagggtacttttttgttgtcgtgacgcttttgttatgttaggccgactactatactactacttctagcttctatagtggcccttccactttggtgtagttgtagtttgtattggtactgaatgaacatatcaaacaaaggcgagcagtataagcccttcttcggcctgggaaaagcagcgaactctagaagctagggcgttgttcacctttggacacgaacactattccgttctcagcggaaacccgccttagagattgaacgtcgacttatcttattgccgttcaatctaaggcagcgctgatagcttgtagtgaacagcccccttatgaaaccaaccgaaagcagcctttggtacttaattaaggtttggaacccttgcaactatgatagaaagccgtttgcttgttgccaaacccttcgcctttcttttgaatcaaagtaggtcgcgttgtattttagtcggtcgggggaagcgaagcttctacgacagccctcgtcttgcttctggcaaagcgtctactttgcttctctcgcgcttgcttgcgcgaaggcgaaaagtcctttttttcgctaggtccaaaagcttccgtcaaagcgaaagatctgatccaacagaaatcccgcatattgagcgcagctgatatgcggctacggctaggcgatcatatcatgccataataaaattttatgtgtataaagagatcccctagatatacagatagaatagatgttcatggatagacagacattccattgattctgagttttggggctgaaaaagctcgtcgatccaaatgaatcattcttctggtctctcttcgccccccgccccgaaactgacccacagcacagcgcccattcgcttcgcgcgcgggaaggcaacgaagttcagttcatgagaccgcggcggagtggagcagccgcgacacgaagttccttaccttagctggatctcgctggtgccacctaaacggtaggtaggcgacggatgtgtgacgtttggagttgtcgttcgtgcacctgtccccaatggaagaatgagtgatccgttcccctgcagatcatggccttaccactcggtccccgatggccagcgggggattcggtatagcagctcacgttcgtttgcgctgcgcgttcccgctggctggacacgtgttagctgtaggaagtatggttccgaaagtgacttcggttcgccagttcaggctcaactcctcgctttacgttagcggacctacgggtcgggccggggctctgcgctctttctttctgtgtgggacgatgccggggagagaagggaatgcgtcgaggcggcgaacaacaacaacacaactacatttttgtggcttttccctccatgaaataagcccagtgcattggaccgatggataagagaactgactgagctggcctaaaaagcgcttgggcgctctacgtacgatgtagtagactccatcagatacatatcgatttctttctgatggatcaagaataaatagttgtctcatcaatagatagaaataggctgctaggctccttttattattgatggattccctctctatccattcatactctttcgatctatcagaacaaatccggctatctatcaatcgatttgaaaatagcacgttcatatcgcttttcgttcatttccgccacgccaacatagccgccataataagaagcagctagaagcgaggtacgtagttgctttcattcttattcacgaatgaattgggaaagccaacagaaagattcgattctgacttcgtagagccggtgctgctgttgcctgcgcgtagggccgtcccccactcccgtcccggggcgctaaggggcttttgtttttgaaacagacggcagtgttttgctgacgcctcgaatcaagcttttgttgcgacatgctatgttttcccccccattgctagtaggttgatgggtcgcacgcccggcacacatgttttggccttgtgtgtccataactcaaaataggtgacctaacggccgccgcccgactaaacataccaatagtcaccagattcatatgggctactgaggagtaagcaatgatctttttaagatcgatctgtcttgaagtggtcaaggaagtatatattatagcaatcgcgcttggagtataaatgaaaggagtgaaacaaagtgtcgcttcgggaaacatgggtattgaaaatcttaaaaacccgtgggttcccaattttgatggaattcctgccaagatgacggatcctgccgtaggtgcctctacatgagcttcgggtaaccaaatatgaactggtaccataggcactttgacggcgaaagaggcgaaagaagcaatccatagaaagatttggcgccgctcactaaattctgtggttaatgagatttgtaaatcggtggttcctgtttgaagaagaatcaacagaatagctaatagcataaaaacagatccaagtaaagtataaaggaaaaactgatatgctgccttgatctttctttgtctcgaaccccatacccctataataatggtagagtaaggggtggccccaaagctgaattgaccggtgttggtcgaagctccagtaggtagccactcccttctcagggaaccgtacgtgagacttccgcatcatacggctccgtcccgagcttccgtcgtcggcctttgtcattagaccactatctatgcatgtattttccgcctggactctcgaatcttttgcttcttgggtggtggcgaacaatgcagcttgcgttgcgggagatgcccgcccgtagggcacggcccgcttctcgccggaaagaaccactcactagctagccggactagtgggggcctatctggagacatactgaaaaccatgcctttcgaaccgaacgcaacgcccgtcttccaaatcaaaagataaatgagctcgttgggaagaaagatggagtgcggcctgtagagcacatgtaacgcacagtcgggttgctcacgcagcggatctctctctctatctacagatatctcgagagagagagatgtgaaagtaataaccttatgttatggccgcccccgacttacggcctttacgctactactactgtgatgtgagcggttcaaattggtttgatctttcccaattatcctagccggaacttgtacgcagcacaactacgggcataaaggtttggaacttttttcttatctgaatcttaagggcagctaccctattctcgaaccctctgccgagcttaaccctgcccgcatttccttttgaagggggccaaataaatgtctccacctgctgccaacagtctttcttcggaattatacttcacgggtcgatcctcccctcccgtttgttttagcaacttatcctaaggtctcctcactaagagctccccggcgacgacagaggaaccaacccgcctgttgtggcggggcggcttttttgtttcacaataagacctggacgattatccctaccctcggtagcttacgagtttacgtccatccctggccggatacagtttcctttcgatttctcccttgtagccgttacccgaattcgcgcaagtgtgtccacacccccaaactgacttgacgaggaatccattctcgcgaacaaacacaacccctacacacacctaggagcaccccttcctgcatatccatacaagacccgagtaggcgggtcgaggtcctacgaggtacccactactcggagtaccctcccaaaaggaaaaagatgtgtctgtcaggttcggttcttcttagttgggttgggcgggttcgaccagaaatgctatgcttacacacaagactacccctcttcccgaaagcttcgcggggacgactttacgacgacggacgaccgcccgtagggggtttactgcacaaggcccctgcagaggaaaagctttatcccagcgaatagaagatgctcagctccgcacaacatagggattagcacgctttcgggaagaacatagaatagtaaaggatccagcatgcagaacacggcgatcattagaaattcacgaattagagatgctgtaatatactctttcccataacttctcataccagaccaacccactgaaatgcaaatagggatcagaaatgtggtcaatatcacgaagaataaagagataccgtctatacccaaataaaaattgatgttttcataaggaagccatcgaaggctttccacaaattgagatttggccgtagaaggatcgaattgtatccgaggaacagggggatacaaaaaagtaataagagaggcacacagaccaatcaatcgtatcggtcgtattcttgaatttggaatgaaaagaggagtaatgcttcctagcacgggacacagaataagaccacttagatcagaatagcattcacagaaatgttctaacatagagtagaatcgaacattgacgagattagttgacaacagtaaaaagatgggagcctaattccaatacaataggggtctatcagtgcaagtcagctgaacaccgtgattgatgagtgggtaggtgggttaggtgcacctctcgcccagtgggaaggtttgagtctccccccctgaatgaagaagtagtggggcccccttcccgcatatgcgcctttctttctcttctttcttttttggaattatttatccggagaatccttctaaaaaaatatctctggccgtcgggtcggttgaaagaaagggaagttttgtctttctttcaatccaaataagagcacaaagaaaccactcaaaaatgaaagttagataaagaagtttcagtaagaactagcactagacttcttcccccctttctactttgcctctctccttttgtgcttctacccgggcttttccttcaactagagacccgaggaatttttctaagatccattgctcgattttgcatgctctgctccaaaaatgcagagagacttgcgagggcagatccgggttggttggtccggaaagtcatgggagaggcaggctaagtgaaaaaaagaatatactggtgctactatagaatcttatgaatcacgcacggcacactttctatatctcctccgtctacaaggtgaacagcttagcttacagcacagcgtgttcgccaccccaccggctggctggtgcattggccttaccgtaatagggccgagaagtatgacccttcgattagaacgccccatatctcgtgacacgcggagcgtggcatttccttttataaagtccgtataacttctaaccaaaagattcattctttatgaatcaagtaccattcaaagagtgcattgcctctttgagtgaagaagagaaaggtgtttcaataacccttgagccctgttcgtcgccctactaggctcaccattatttcatttcattctatttatggccaaacaaagaacatatacatggagctatgtcgacttacgtacgtctcgttgaccaaatgatcaggtataccacgccacgtatcatcccctctttctatagaggagagataaagaaaaagaaaagatatagtgatcgtgccgtaagaccttgttcgtttctacttgacgtcattttcctcgatttttttttacattacataaggtagcttgcttacttagcgcttgcactaaggatctaatcagagtcaaacttggatttgaaaaaaaaaacctttcccttattagccggagtacaagtgtactccttgatctttagtaaaggcggattaagccaaaaaacattttttttttgagtccctcatccgcctggaaaggaaatggcactaagacagagtgaagcttaaagggaggaattggctggaatcgaagtaagctcgcatgtaccgacagaaaaggcaactagcatggttgctttataccacacgatgaactgtatgtaaaggcttgaaaagtaaggtgcttgcctatactccactccctacttgcctaagaaactgtattgaccgctactatggattttccctcgcctgtgccttcaagctttcatttcaacagattgaccgagaacccatctcaaaagagaccttctcaatcgaaaaagaaaaaggatttgaatgactcaatagtttagggatacaatgaatatctgcttgacaaaactactgcaatggaaatagatgccaaaacttcataggcttcttttattacaaaagtacttgaaagaaatgcgcttacttttcatttaatgagagcctgcgcctgataactttcttaagtttttgacccttctgctttgggcctgggacaagttgtggtacagtccggagaggattgataggtggaaaaaaatctctaagggattaaagtccaaccaactgtaaattaaataggatatgctgtcaaactttcttcctcgtccactggctattacggaacagggactattactactatttactattagtaaaaatataatgaatctctttacttatctttattttattatctttttttgaacagaaggaatctcacgaattatcactggcactatcaagactgtactctttttgaagaccttctcctttgattggaaaggccttctctttttggtgaattgcagttcaagttggaataactttgccctttccgactttcgctcctctcacattcgttcgagtggcttcgctcctgatagtttcattccatctgtcttggattctttgtgtttaaggcaaaagaaagtctatgttcttgcaagcgaaaagcaagaggagaggtgctctgtaaatgaataagaaagccggtgcagatgaacgctttttcaagccagcgatcgagtttccttccttttccttctcccatccatctagtttatgaaaggtagcaagcagtggtaaagaacactggctcgcttcgcttttatatcttataaatcagctctttctttgtttcctgttaaaaaacaaagaagctgccttttttagattattaattttcgcatttgtaggacttctttttgtcctccttctttttctaaagggcttccatggcaatgaacgcagaatttttgcacgaagcacctgcctctttattattttagaaggaaaagt

SEQ ID NO: 184941 - DNA, 3677 bp, Cannabis indica
aggtttgattgtggaaaaaaggaagtgtcgtgacgcagagtagagttttgatttggttttgttgcggaatattaacgtagggaggcacgcatttccataagtctcccattcttggggcgtcctcacctcaccaaagcaagccgcccaataacaaaagcaacccaagggaccccattttccatttcattcagctctgacctctctctcaaccctctccttcattggacgactttttcttcttctccgctctgaccgccattcctcattagccatggcgatgttcaccatctcacgccgattatcaactggatcaacgacggcggttggagttttacgttttgctacctcttccagattctactctaccgcgtttagagaagaaagagacacttttgggcccatccttgttccctcagacaagtttcggcttctgctctaatgaaaatcaatatatcaatcattcaatcaatctcaggtttcgccgaacgagaaatgttaattgttatctttgtgtctatttttcaggttgtggggtgctcaaactcaaagatcgttgcagaattttgatattggtggagagcgtgagcgtatgcccgaacccattgttcgtgctttcggaacccttaagaaatgtgctgccaaggtttgtttttttattcttttactggttactacccatttggagttttggtgtaaatttaacaaacttcaatcttgattgtgattttgttgaagctttgcctttttgcctactacgtgtttgttatatctactaaatggaatttttaaagtaatgggctataaaattattgtgttgcaggttaacatggaatatggtcttgatccatctattgggaaagccattatgcaggctgcccaagaagtagccgaaggaaagctaaatgatcattttccacttgttgtgtggcagactggcagtggcactcaaagtaacatgaatgccaatgaggtcaatgctaattcatgttttcctatcttatttgttctaatggtctcttcttcatttatttatttatgttgtttatggcagcctttttttaaaattcattttgattggtgctatgccaggtgattgcaaacagagcagctgaaatacttggccataagcgtggtggcaagtttgtccacccaaatgaccatgttaatagatctcaatcttctaatgacacattccctactgtaagctttttctttttttctacagtgaccttgccctttgttctatctgttatgtgatgacttggacattgaagcgatagtatcccattttctaggtaattgattggtcagtttcttgatgcctttttaataaatgagtgattactttcccaggtcatgcacattgcagctgcaatggagattcattcaagagtattacccaatttgaaaaccttgcattcttctttacattcaaaggtttggcatatgttgttttcatttaaagcaaactgacatatttttgtgcatttgaatactcctaatttccactaatgatttcaccagtctgttgagttcaaagatatatgtaaaattgggcgtactcatacccaagatgcaactcctttaactcttgggcaagagttcagtggctatactacacaagtaagatatcttttttccttttgatttgtttttatactcataatcttgtcctcggagtgtctactgatatctctagttttttaatgtaggtgaaatacgggattgatagagtcttgtgcactcttcctcgcatgtatcaggttagccttctgtagttagttgttcatttttttcattttagtttcagttataagtaattgcttgttctttgagcagcttgcacaaggtggtactgctgtaggaacagggttgaacacaaaaaaggggtaagtgaaacatttggattctaacatagtgattttacttgagcttaaaattagattagaaagtgagttttattttcataaactttggaaatgaaaatatatgtcagcatttctcttgagttttgactaatttataagtttgtctgtatgttactttgcctagtttgatgatgttcacatttctggatgttgtgcaggtttgatgtgaaaatagcagctgctgttgctgcggaaacaggcttgccatttgtcactgcagagaacaagtttgaagctttggtcagtatccattaataatgtattttgtttatttatttacatgtagaagtaagaaatacttcacatggttgaagttttcctttgatcaaatttgttgtattctaaactattttgtttttaactaggctgctcatgatgcttttgttgaggctagtggcgccctcaacacaattgcaacgtctctaatgaaaattgctaatgacatacgcctgttaggaaggttgttttttgatacctgcacttgcttatatttgtttttccccttcttcctgttcacatttaaagatttttaagctgctttgctgtgcagtggtccgagatgcggtctgggtgagctcattcttcctgaaaatgagcctggcagcagtatcatgcctgtaatcttctttctttccctttgatgctgtagctagatagtctaaactgattagattattttaagaatctattataccattaaatttgtcaatttgactgggcatgcttttgttcaggggaaggtcaatcctactcagtgcgaagctatcacgatggtctgtgctcaggtaattaaattgtgtttgagtctggtccattaaaatgattaaacaataaaagagccatcagtgagcagttactaactatgattcaaacaattgctaaatgttattgtaaactagcaagaagtatcaagcttcatttgatattatagaccataccagtttaacactatcagtatcattttgtactctatcctttgtgttacagattatgggtaaccatgtggccataacagtaggtggatcaaatggtcactttgaacttaatgtgtacaagcccatgattgctactggtctcctacatgtaagttctgctttagattccaaatttttactttatcaagtgaaccttatcaccttatcttttttttcacattcttttagaattcaggatattgaattagttgattataatttcccatgcctgtctttaaaagttgtttcacagcttcccgtctcttgcattcttgcctgaactggctttttcctcttattgcttttcccttagtcattgagattgcttggggatgcatctgcttcttttgaaaagaactgtattagaggaattcaagctaataaggagagaattgcgaaattacttcatgaggtcagttgattggattctgttaatgatacactacactgcttgtgttatgcttatgctatattttaactcccaaatagctaatgaattatgctgtttgctatattctcagtcattgatgctcgttacatcattgaaccctgtaagttctctgaccactattccctttacaataacatttacatttgatttgttataccttgtttatttcctaacacatttttttctgccttccctacagaaaatcggttatgacaatgctgctgctgttgccaaaacggcccacaaagagggaactactttaaaggtgatgatttgtgaaacttataaattttaaagggctttgcatgtgcaactttgaatgga

SEQ ID NO: 184942 - DNA, 3452 bp, Cannabis indica
gactttttagaacttccgggctatttggatgtaataacaatggatgtaaaataattagttaaccaaaagagcctaagacatcagttttgcttagtgaacattcagttctgccttctcatggcctgaattcctgtcatgtcacacatctttcaaaaaatctattggtgcaaatactaaatgaagtatcactttatatttcttgtttctctgatgtcaagggatttggcttttgcagaattgacagccaggagttgtgaagtttgtggaacaaacctgatcccttatccccttagcattgacccaaaatgtggtgaccccttgtactatagttttcattgcaacaattctaatggccaggttagtttcgagacaaatagtggcaccttcagagtcacaagcattaaccccattacacagtcattttttataagactcgaagatcttgataattgtaaagacagttttagtgagaagtttctcaagctcaaccagtcattgccatttacgatgaggcgtggctgcaatgcaaacttggggaattttagttctgatatgatatctaaacatggagttgaagtagaaattgcttggaaacaaccattggagccaccttgttcttcatcagtggactgtgagaactggccaaattcagcttgcaatactgctcaagatggcaagaataggtgcctctgcaataaaaatttaaatgggataacttgaacatgaaatgtagaggtatgattctgtttacgtctagctttttacttggaatgacataaaattttgagtttcccttggtaattaacagaacaaaagtaataaaatgaacaagcaacatgtttaattcaatttatgcaggaaatggctacaacaagactattaggagaggaaaaatgaactttgctttgatcactattattattcttataactattgctgttgtaattactctctcaagcactataatttacatctgctgttggagaagaaagctggtcaaaagacaaggtaacaagaaagcataagccaacatatggtaatttaatgcctatatgaatattatatcacaacatcaaaactttaatccatgccatatacaggtagcagaggaagctatgacaagaatggggtgcttcagtagtatgacagtgacagaagagctaaaagcatgaatattgattcaggcaggtacaaggaggatgataccaatggaatagaagtaccatttttcgatttggagagcatactcactgccacatcttacttctcgaatgcgaataagcttggacaaggaggatttggacctgtctataaagtaataaaattatgtgactgaaacttaagtattatgagtcactttcaactagatattgttaaacaatagtttatttggactgtattcagggtgagcttgcaggagggcaagaaattgcagtaaagagactctcaagtagttctggacaaggccatgaggaatttaagaatgaggttctgctaattgctaaacttcaacatcgaaatctggttagacttttgggttattgcattgaaggagaagaaagaatgttagtttatgagtacatggctaacaaaagcttggactctttcatatttggttagtatctatacatcatgtccctattgttttcaactacattatcattaatgaaactaaatgtgttctttcttgaatggcaaataaactccttaaaagatcgaaagttgtgcatgtcattagactgggatatgcgcttcaacatcattctgggaatcgctcgaggccttctctatcttcactatgattccaggttaaggattatacatagagacctaaaaacaagcaacattttactagatcaagagatgaaccccaaaatctcagattttggtttggcaaggattttcggtggtgatgaaactgcagcaaacacgaaaagagtagttggaacatagtaagttaacaataatatcctcttcttcaccaataactaaaattgatcacaaattcactaattcacattcttgcagtggctacatgtctccagaatatgcattagatggactattttccctcaagtccgatgtgttcagcttcggagttgttgtgattgagatcatcagtgggaaaaggaacacaggattttttgagccagaacaagcattgagtctcctaggctacgtgtgtatcttttcatgaccttcacagtttactctcgtctttcataatcattaattatattaaatggcatctttctttcaggcatggcatttatggaaagaagagaaagcattgaacttgatagaagaaacagttgttgaaagttgcaaaaaagaggagtacttgaagtgctttaacttaggtctcttatgtgttcaagaagatccgagtgatcgtcctactatgtctaacgtagttttcatgcttggcagtgaaactgcaacccttccaacccctaaacagccagccttcgtcgttaggcgatgcccttctagcaaagcctcatcctcaagtaaaccagaaacttactctcacaatgaactaactgttacattagaatatggcagatagcaaaagggttcttctgtttctttatcttttttccatcaattttattggcgttgaattgaatttgagacccttttcttttaaattactcattgtaacatatcataaactttgatcttttgattgtgtactctgttttgttcctaagtgcatacaaaagcattgccaatggatttggggaatcaaaatcctctattaaaaagtggtgtccgtattaaactaatctaattccaaattagaatcaaaagttgttttagtacttcacctcaagagttcttctacttggaacttgcaaaactcttttgttttcctgattaagaggaacttgcaaaactcaaaagggaacgtcaaagtctgatgccagcttaatagcttgtaagaatttgtcaaaagtcaaaaccatcaccttaatccattgtaaaataatgaaataaacattttacgctctcaaggagaaaagaacgttcgtctttatttaatgaacttcaaagttcaaacaatatcaacggaggatcgtgagtaaacgtcattttaagccttaaaaaagtgtaagaggtcttgggaaacatgactcccccaaaaaatttacattaaatttataatttataatttttcataagatagtataattgtgtatgcgttcacttcaggcaggaattaaaatatgaaaataaaaagtttgacctcaagactcaaaaatcatcaatatacattaaggtctttcttcttcatgtttctacattatcccaccaataaaaaataaatatttgtgagaagtaatattaactaatgtaattattttgaaagatgagctgcctttctttattaaaaaagaaacaaagaaaacaatgaatgtagtgaaactgactcaagatcacaagtaaaa

SEQ ID NO: 184943 - DNA, 8342 bp, Cannabis indica
  modified_base (8263)..(8263): a, c, t, g, unknown or other
ttttttaagttataatcatatgaatgtaattatctgttattaaactcctacaaataaaacaaatgcttttcttatttatatctaatacatgagcatttcatctgtacgtatacataagtataaatgtatgtattacaaaaacatcattggaaaatataaattccacgagtttataggtaatttattatgtttggtgttcatatattttgctcacaatatataactgtgtaatcaagataaatagtaaatatgaaatcaatggattccaagagcttccaaagcttgtgtgatatgatgcgcctcataactctctgagatggcaatattagggctattttgtgggacaacatcttctcttttgtaactgtctatactccgaagaaacttttcactgccacactcaacacaaccttttataattatgttcttctgaagcccagcgagtaagtcttcagtatcagtgtcccctctttctccactaatgacgaccattttggagagttcaattccccatctaacggaaagatacctacatacataccaatgacagttttgatttcagttaaatacaataatgacattaaagataatatacaattattgttgttgaatgaattaagcaagcctaaccttagggattgtgctcttgaagagtacaatggcacaacattcaacctagatgcagctcgtgtaaagaaaaggttgcatcggaagcctctcattctcagcctttgcctgagatcatcaaccttttgtatctgccattttcaattttcaagggtgtaacatgtataaagttgactttgtaactaagattaatattttattatagttaatttatcactaaagaaaatgtcactaaaggctaaagctcaccttggctccaggtttgagagagtaggagtaacagtacttcgctcggttagctcctacatagtctttggtgtcttcctcatccgttccttctaccctgataagccttgctgccatggaccgcacgttctcgccgccccatctatactcgatatgggactcatagtctccatcagccaccaaatctatccaagggtaatacatctcacttccacttgagcacacgagcgcatccaactcttgaacattgatttggcatctttttaatgcttccaatgtctctcctaagcttgaaccagttacaagcacaaaccctgttcggccacccaagcctgcagctttcatcacattcttcaagataggctgcaacaaactttcagcgaaatctccattgctttcgttgtaacaatcaatggctattacaaatagcctctgccttcgaccagggcagtaggtagtagctccgacctttccattggaggagcccttgcttcgactttttgtaatggcttcaattagctccttttgcctggtggctggatccaagttttcagaggaattgaagtctattgtagcttccacggagaatctcaaagataggtcttgtacgtctttgagagaatcactcatgggctcttctggaataggcatgatctcaaggcggctcgtggggtggcgattacggcagtgttccacgtgggagaggtagtttcgacaatgttctatccatgaaaacttgtgaatgttctttagcccattctttcggcaatccagccaaaggtttttgtctgccacaagctttagaagtgcatcttctatggctttatggtcatgtggatcgactaagaccccgttatttaatgcctgtactagaataattcatcatttgtatcaacgagggaaaatacaatatatcttctcttataatatagcatgaaaactaaaattattaccttcaaaatgtcaacaggacctccatttttagtggcgacgacgggtaagccatatgcagccgcctataaattaacatgtacaattgctaaatttttgaatggaaatacgccatatgcatctacataacgacttttctttctgtagtgtactaagaatcatatgtatataaaattcttacctctataattgtgagaccaaaaggttccactagagctgggttgatgaatactccctgcaatcaaaaaataatcaaataaaattatatttatattagtaattttagtattcccaatttattgtttatttattgaagagactatcaagtgatgcaggtatgtattacctttgtcttcgcagcaagacgatatatttcggggacatcatgttgcttatggtgcttgggataggccacttgaccatacaaatcgtacctgtcgatgagcttgagcactgtcgtaagcacaacggagctactattatgcatttcttcaatgtcatccctattgccaagtatcaacgtctgcatccatgtacaaaatatataataatatacttaaggaatattagtcataaattattttacgtactaatttatattattaccaagttggcaagctcccgaagggcttggcattctccataagccttgagcaatgtagtaacattcttcttggggtcaggacgtgacagagcaagaatgatgggcttgtgagggttggtgaaaaatctcattatctcagaccatataggaggtagattgggtttttgttgacctctaccagagtttattaatgatttaagatcagcagaatctgattcagtaatatcagttgttgtagcgaggtttgagaagtccatccctggcggtatgaccaccatccttggcatatagcggccaagacaactcacaccgcgacgtcttctcactctcaactttctctccaatttgagatcgaatccatcatacagtccccactgctcatcgatctcttgatgagtactagtcaccaccatttctgccgcatcaatggccaactcctcggcttcaatccttctcataatcctgtatgtggcattaatatcttccttggaaaatctcccctgttttagcaactgttcgaacttattccgccccagcgaatgtcctgtcatcaccatcggcacatttagtgcagcagaaagtcgagccgcagcctctccaccatcggcgtagtgaccgtggatcacgtaaggccacgtaggctttcctgtattgacttgctctcctaagactctagccatgttaactatgtgagctagtgccccatcgacgaactcctgtatgtgtggccagagagactccttgggaatgtactcattgcgaggtccgcaagggaggcggactatgtaagccccacagctacctgtagcatcggtggggcagcaaagcatctcatttggctcaccgtaggaggagtcaacatcagtggaggtgatttgccgagtgagaaggtcgacacggtagactccatttgtgttggctagagctctagcaagttccaccacgtacttgacttgaccaccagtgtcggagtctttgccgagctccatattttgtccgcggaccaagccatgcatactgattaacacaatgtaaagctttcttgaagaagaagaagacttgatactctcatcgtgatcatggtctggccatatttgaatctcggagttgattcgagtgatgacattgtgctcaaatgtagtagaagcagcatcattgttatctcctttactactaataatgtccttttcaccttcggaaagctcagagaggtcctcggcagcgtcatgcctgccctgctccctctctatacgccttttagccagcctttgggcgtcatcccatgcaatctacagttaggaaaaacaaaattttttatgctaattatattatacctcaaaatttggtattggatgttgataattgaagataaacttgactaatatatacaatgcggatgctacataactgttctattttaacattttcattacttgaaacaccacacactaattaatacatgaaatctccaaacatcaaattcacaatcatgtaactttttattagctgttttgtaattataagtagtaatgcttgagcgccagaaccttgtctatatacataggatttctaataaatatttgtgtatataaataagagtgctcattcagtattgtaaaacattttaataaaagaaataaatatgtatacatatacctgtttcttcttgcgggccagatgccaaatgcgccagcacatattctccagtctattgctgcgttcacgggtatttcttgtggctattacctgcaaaccatcagtgtatattgtttattcacatttattgtgactttgttcagttattctgtatgtcaaatcatgtcatttttcgtattcttcgtttatcgtttttgagggtttcagcgtcgaatgatttgtccccttcttttttgtttccacagtgtacataatatacataacatgtatgataacatcgataagagtttttaataaaaagtagaatatgtaaaattcaatattcgactattatatcatgaatttttgttttggtatgcccatagcaatattggtattgtatttgtttctctatttattacaaatagtctcaaataataatgaatgtgaaaaataatacgtgtttttatactatgaaatttttaatttttttacttttttactgtaggtattttttttttaaaaaaaatactgtatatgttttatactgtgtatcgtgttaagtttttattgttgttctacatacggttgttttttagttgttccattgttcttttagttgttctattttgttgtgtttacagttgtaagaaattctgtgacactaaaattataaatttttacccaaaattcactatttttgtaaaaactccaaaataataacatatctaggattaatagattactcttcttgtagttaactggttttgagatagaacctcgtatatctagtatcatagccaaaaacaaaaataaaaactctaacgagtattcaattcaaatccaataatcgggccaaaaatacgagttaaaagagccgtttgtaatctgttatgagcccaaagtatcgatggtctaaaaagatgagccaaagagccgcttgtgattaggaaatagggagccaaaagtgtcgccgatccaaaaatatgagccataaaagagcccattgtgatccgttgtgagcccaaagtaccgccggtccaaaatgacgagccaaaaaaatagccatttgtgttccattgtgagtcaatagtgccacttgtgatcgagttgtccaagattagtgagcaaatactagtcgcaatcttggggggatgttacacattgctagggtgtagaaatataataccatatataagatgtatcagctattcctctcatagctaattggtcttgagatgaaactccatgcaccttaaatcacacacttagagcaattaaaagcttctacagtctccgcatttactctccatgtaagaccatgtacacactcttaaattttgcaatttggcagatcgtttattatacctatactttttaagcccaaacgtgaaaaagatatattagaattaattagaggcatattgctaatgtgtaatgaaatagaaatccatctattacattcctaaattctaaaactattagaaaagaaaaaactcgtttggttatacttttgattgtgcagtgttctccaaatcatcatattcatcgccccaatttagatgctgcctatcacagaatgtcatatcttactttttcgccaacaatataccattatattatataaggcgctcatgccacgtaggcatcattactcttataaattatataagttattgagctaaaatctaccgttctaataatacacatgtagatgtagttgatatatattttatttttgtcctgacattactctcatacataagattctaaaatgcattttcttagtgtatagctacgaagcgagaagaggtatccacaaaatattttacgaggaggaggatgttggaattgttacttgtgcgtccacgtgtgaggaagatgattggatgaatgaaaacaaaaatgatttcgaccctactcaccaacgataccacccacctcttattacaactctgtacttaaaaatatattcaaaatatcttttttccaaaagaaaagaaaaattgatgacattattgattatttctccaaactttacattctcaaaaataaatttaaagttttttcttatcacgggcactaaattagaatatcaactgtgttttcaaaattataacctgttgtatcatattgtaattataataagtactgaaaaaaaaatattttaaaaaatgatttccattgcaaaattaactaaaaaattggaatttgcaatcatctaattaatattaatattattttctacgttggtagtgctttaatttaagacaaaccttaatccaagtcctgtggagatctgactcatcgaagctattaacaacttcttcgacaaagtatttagttggactaaacaacttatcctgatgatctttctctttcacttcgaactttgcaatattgttcagcttcccgtcaccctttttccccatatctaagattgcctccaaatacccatttatccattcgtttctcgccatcgaacaccttatatatatttatatacttgaaaatatatctatatatatctgtataatactttcaacagagaaaactatctatatgtatttattcatttatgtatgatagtataatagacagagagaaaagagaagaaagaatggctttgaactttaagactttaacaaggaatggagaacacaataagacttgagcttaaataaatcgttgcaaaaggtgagaagagagagagagagagagatgttagtgtttgaatggagttgacactttgaaatcctttcctgatggaaggatgaggatccccgatcgctaaaaaggcccctgatttcaataagtttattatttttatttttccaaaatgaatttgtcaatatgcatcgggtggctttggttctctctattacaatcttattcttttttagggtatattactctaacatccttatcctttctacactttttattatattctccaccatacaccccaaaactctattctaaatatattactttttctttatcattattcaaagtataccttcatatatatataaatgtaataatcctgcgcgtaagtgttccgtataggcattatattcttatggcatcgatactgtactttttaaataaaaaagaaaaaacaaagctcaagaaattaattctttattgaatagattaaaaagagataatctggtattttaggtaaaatttgaaaattacctaggccgttcaagtacaaaaaagagaggaaatatcatgaaagtattatatatctattagtaaagtgtcctgcccttttgtcttttctattcattttcaattaataatttcacgggagttgtggtggagtttttaagggtatcgataccgtgtatataaatatattctaaaaaaaaaaagaagaactagaagcttaaagtgtaatgtgaacagttttaattgttgtaacttgtgataatataggaagttaaagtaggaagtaaaaatgttttgttcgatgcatgcatatgcagtttgggttgatatttttattttgtttgcatgaggatagtatggaagaaccacccactatttaaaatcattttttgtcctaaccccaaaggacacatattcatttgtcatgcatggcgtgttcattctgctctcaaaattaattctcttcaaaattgtttgcagccctacatttcctaaccattttatacctagcattatgattatgatctatcaattattctttttccctttacttatttgctacaaaattgtgatctattgaataaaagtgcatatatatatataaataattaaatatatatcaatgcaatagaaatgcatgtttataaaatacaaaaacaaacttattttgtcatttagtctttttttttttttattctttttttttcttttttttggctttttatatatattttttagtatataatttttttatactttctattagcaccttaaccttatggtgctttttatcataccaatatggtatttattttagtaaatattttttttacttgctattagcatcttaaggtactcaatattataccaatatagtatccaataattgatttaatacgttttttttttgtcttgtattattagcatttattttatcttttgtttttttttttttaatataaatgatctttgtaatacttttttggtaataattttgtactatattattgtcatgtgacaccntaagttgcttaatactatattattcgaatatacaataattgatttaacatgtttctaaatcatttattaattaaaaatt

SEQ ID NO: 184944 - DNA, 2013 bp, Cannabis indica
gcggctgtataactactatagtttatattatataactgtccccctagctcgctcatatattgctatattgctattgtgttagtgtgtccaacactttatataaatagtgttgtacaattcgttaataatattttttaaaatttatttttttaaattatataaaattcgatatttaatataccatataatatgacataaagaaaaatactatccctaatttagcaattcttttttatattataactagcttctatatcttatttgatgaatgttgaaaagtgacaacaaatccgtgtatctcaactaccaaaacttaatatatatcaccatctacatatacacatagttaatatactcgacaaacaaacaaatgttattttcgatggtgaaatacaattatcaataataaatgttatgaccacaaaatcaaacagtaaaacctctataattaattaatataaatatatatattagaaccgaacaaaagaataatttattcaataaatatttatctaactgagtgttaatttatattattaatttcgatcataatctaaattatcaattattcttttatattatatataatctatggtattaaaaaaagttgtgtaattaaacttaagaatatagatatacaagtgatatatatggtttgaaattaaaataaaatgaaaaaagaaaaaagaatataaatatatatactaacctggagaagctgtttggcaaggtcgatggagataaggccagcactacaccccatcccaccaagattatagctcataatatttcctcgaagcttgtaatgattgacaatcatggctgacaaagaaggagtaggattgaacaagctacaattgacaacaagaatcccaatatccttagccttaacaccagtcttctccaaaagctcatcaatggctccaaacatcacagcttcggcttccttcctagcttcctccatagaagggtttggtgggaccctcagaagagcttcaggcatataagtcttctgtcccaaaccagacctctccaaaatctttttctgaaaagccaagttctcggcagcaaaggatccaatcctctctgacctttccatgaaaatctccctagtgcatgttctctccgcctcaggcttgtaacaagcgaagttgaccaagtagacctttctgggccgagtcatgaaatagaaagtggccaaaaacactatgaggctcgaacatagggtcaccaaaacgaggttgaatttgaggtgattccacagctggagcaagtcttggtacgtgagagttgacacgtgtgctgaggatattgctaggagtggtatgagtaagatgtacatggcgtttgttattaggtaatggtatcctagcttaacgtatttcagacgaacagataataaaaaatttggtaatttaggcctcccttcattattttcatccataataggagtagcagtactattactactactggtttgaacaactcgaaccgtgtttgttgggtcttgtctagtttcctctgccataactatatacactgttttttctttttcttttttggttctgggaccaacaaataaagtgtgtaacaacaaagaatacccagatggggaattgtgtagaaaataagttttaagcggcttataaggagtacccagatgagataattagggctggatcagagagagagagagaatggaaattagaaaagtgggtaatggggttgagaaaatggagaagaaggaaaaggagtttttataaggggtgtgtgagagaagtgtgggggaggatacaactacccgaacgaacttttaatggttaagctattgagagaaagaggcattcaattttcgccaactggaaactagcacctcttaccttgtaatttttctagttcacatttctcacggaaatcccttagttgacctaaatttataccattattttccgttttgccactttttatattataaaaaatatctatataagtacttatatgtttatgatcaag

SEQ ID NO: 184945 - DNA, 2701 bp, Cannabis indica
ccttctttggtgtgctggaccacgaagatagcttgcttggtggccatgctataacattttattgcttctccatggttcactcgaattgttagagtgtgtaaggaatttaaggcacaagtgtttaatcgaagttatggctctaaaagctaccaaagtcggttgccccattatggcgttgtaggctggcaagcaatctaccacaacaaaggcacaatacttgaatgtgctttgaggagggtcaaggcatagtgtcatcaaggagtctaattttcctataggaataagagaattcccatcaaatcatatgagttaggaaccactctgggacaggtcctagtccgtgaggctaatggcaaggaaggcttctttgaataggatgtttaccaaacttccattgtccactaagattcgagcaactaacttgttggatatgggagtttcaatcaccaatgggtcatggtgtggaaaatgcacctttgggggatcttcttcagtaaacattattggttggtccatgagacaaggtctctaagctagcagctggcccacttcccatatttcatcatcatgatctagggctctggcataacattttaacttgttatgggttgaaccccttatatgggggcctccagagatcataaccactctctcgttcggtctaggcgactgtccaaataaagcccattgatttggtggaagtgctcccagagaagcctgtacatttggggcttgtaccacacctttggatggtacttgagctctagcttatccacgattccttatccactcatacaaagtggcctagtcgtatcaggctctcaatcttgtcttttaaattcttacatttattggttgtatgtccaatgtcattgtgttattcacatcttttgttcggcaccctttatgaactgtcttggaataaaggaggtggccttcggtaatgaacattttgtcttgtagccaaatacacacgttcttgtatgtccacaaaatcagtatactgagtatactaaggattatttcaaacctttttggctttttgttctcactctgggtgctccttttagatgaccttttgctctgggaagcttcgagagctatagttgcactttccgcaaatgaaacagattgagtgagatgatgtgtgcatgctttgggagtggggccatttcctggaaactcgtagtcagaacgagttggtgccacagtgagatttggtgagtatccaggtgttgcttgaaattacacacttgacatgccactcatttagggagtggcaggatgtgtgattcctagtaattgcactccagaagcatgcccaaggcctcttatagggcaataccctccaaaagtcattatctgggcttcttccagattaatgtacttctaggctctcgtttgaaaatcttgaaggctggccacaccttcctattgtagttcattctaaaagggagttcccatctggatattagcttgtaataagctaattgttattcgtcatctatttttttttttgtcttggaagcctcttctttgaacctcttgactaagttcttcaaggtttctaaaggcaattatttaatgttggtcagagtgctaacttcaaggtttatctttctggctgcaatgaattgtcttctaaaattagtctgcaatttattccaacaattcataaatctgggctctaacttcttgaaccattcttttgcagatcctcccaatgtcaatgggaaatataagcatttggcaccccggctgacccatgtgactctattgaacctaaaaaggtgatcactcgggtttgtcaattggaaatataagcattttgcacagacgagactacagttggatctacatgaatgcctgcatttcccattgcctttttttatggcaattaatattttttgcattctcttattttgttctttttgttatgccaactcagcctcatggtcaacaatttttttgccttgactcaactagttctgtatagtcgtcttcatcatattcttcgtattcctcttggtctgaattttcaggatcattggtgtctccttctccttcaacatccaccctaaaagttgcctattcttcttctcgaccttttgggtcaggagcttgtggacgtgaagtattccttgttaacaccattataccacaagactttatacgactttcttgttgatgtaggtgtaattagtggtgggggcggtctgactttagagtagtagtttgggatggcaatagaaatttgagttatgcagctgctactttgctgcagcaggtttttaagctaattactgctgaattgtatgcctgagcaagtctagagattgaaagtcaaagaacattaccaagcttcaatatagaatcaaattgtaaagaagccatcaaattaattcaacaaaaagaagctgcctgtcatgaggaagatggattactccaacatattagataattgataggtaatggtagagtaggtgggttgaactttatatattgtgaagccaatgttgtggctcacaatttagctaattatgttttaaatactaaaactagtactatgtggattggggttacgcccctttgtgttaatcaagttacgatgcatcttgattattctaatattgtgtaatgttattgtttaatgaatgattcctttttcaaaaaaaataataataataataattcgctagat

SEQ ID NO: 184946 - DNA, 830 bp, Cannabis indica
tgcatccaactttagtccacttgtaaacttactactttaaacctaaaagaaattaggtagtttagtttaagcatcttgggtcgaatgtctatatatatatatactatatatatatttcatggtttttaatttgtttatttctttatggaatagctattgcggaataaacttgtatcaacagcgcgaacaagcattcgtaaaaatttaaatctgagtcaattctaccaaagtatgcaagaggcttataatgacatgcagactccactagcctaccaaactccaccagccctggtaaatttaatagtaatctaatatttaattttgattcaactagctctttcattcccttccatgttatcttaattccgactttcaacaggggcttaaagaacttaaggagtcaacaatccaattggcgtcaagtgctggctacattgatgctcctgttgatgaaacagtctttgatgtagacaaggatgttgacgatcttttgcctgtcgaagtaaaagaacagcgtctcagcaatttgctccagtcagtcatggttggttgttgtgttgctgctatgcctattctgaagaagattccaacttcagttctttggggttattttgctttcatggcaattgaaagtttacctggaaaccaattttgggagagaatattgttgatgttcaccgctccaagtcgaagatacaagtaagttatgcacacatgctttaatcagatttatttgaacttcttcattccatgttgcaagtttgtagatttgaatattctcattatgttctggctggagaatgacaggattgtctttagtaaaagtttct

SEQ ID NO: 184947 - DNA, 805 bp, Cannabis indica
ctaaggccaactaatatgcactcttactaattattttatatcttaaaagtatttatttaagtacaacaaatatttttaaaatatactagtataatgcttttcaattaaattttcatcataaattattttaaatcagttattggttaggaaataatttactgaaaggaattacgattccactttatttatttaatttttttaaaataattaatattcttcataaagcttttgaaattatattttatctcaaagaaaatgcttccatttaaataatttatttttcaactggaatattaaaataaaaacaactaagtatatgagggataaattaattttttattgatatgtaaaacaacagggaatataattttaaatccattttgtattgatttgtaacaaaacataagatgtaaaatgttatatatccataaataaaactaaaaaggacataagatatatgaagatgaggcattaacttttcaacaatggaatatacctaataattaggactttttagtctagaaatttttatttatgttttaagagaggtatattagatttagtccaaacaacacatgcttggtgatatatattttgtgcgtgtgtatgtgagagtgcatgtgagaaatgctaaaggtactagtggtgcctagcaccatcctacatgtcaatattgttattggtccagttaaatatcgggtcccatataatttaatataataacttttaagaagtatcgctagccaatcgcaacgcgatatgtcgagaaagtgctaatcacgactgatgcctaataacaatgctc

SEQ ID NO: 184948 - DNA, 2837 bp, Cannabis indica
taagaaaattatcagtattcagtttcctaacatttatgcttatagagtcaacatattaaatcaggtcccgatgaacttcaagtttactagatatgttacttttaggaaagaaaaaaagtcaaacctcgtggtcgcaatccacaagctgttgctcactcaagctaacaagctctccggtggccagaaaatgagctccctccagtgcccccgtggtactaaacgaccagcacgatccgcaagaaccctagttttcaatccgatcataaaaacagcatgagataaaaatgatattcaaattatcttcagctaagatcaaatacaaaagcagattctcacctggttcttaacctccgtgacggcaccatgatctcgccagtcaaagtcgtctggaagatcgttagtaggaaggatcggagccttttgagcgtcggtaggtaggcggagaggtttgaggccgagaaacgtccggtggaattcacctggagtcagatcggaaaacttagtgactccatgaacggcggtagggtcaagcttctggtgcctccttgcgcggcgaagattagccttaaagacgtcgaagcggtagtcgtgttcctccggggtagcataggtcttcccaaagttgtgcttgaagctggtgaagtggtggtcggcgttgagaatatgatcatctccttccgaaacaacctgacggatcagaagatcttcgtcttcgacctccttcgatttcacggcggagggcagcaccgtagatgagataagagagagaacgaagatagtgagaagagtgggtcggtccatcttggaaagagatgttgggttggggctactgcctttgcagagcaggaatatgggaatgggatatttaatcacgacgacccaccttcctcgaaggtggtcagtagttagacgctataccaatggttttttgacacgtggcatccttctatttgtttcccgttcctgccaattgtattttgaaagcgaatggtaaatcgacaaattaaaaattaaaaattaaacaaaatatcttttggctgtgctttcgtgcacctgctgaccgccttatctgccttatccattagttgtcgttagtaaccatatattttacctacaaagagttgaacttaatataaataaaaataattatttaaaaataatgatggtataattaatcatattttttaaagggctaaatattatttacgaccttgtacagcttagaaatcaagaaatcatttaagaaaattttgtacagttgagaaattatttttgtggctgtctctaaggttgttatattctataaataggacctagagagcaaccaaacgttattatctcttctagtctcatattgtcatatctttctttgtgagaagagtgtttcatttgtaaaaatatagagtgttcaactaagttttagttttcttattatgatctcatactattcataaaataggttgaagagaagctatgaacaagtgtgtgtcttcgggaaaagacttttccaactctcattttgggagaaagtgggcatatatcttcagaaagatttgttttaagccttattttgggaggaagtaagaacccatcaatagctgaagggagttcactacttggtgtgttttaaatatcagattagcaaggtggattacaaaggattgtgcccaatcattagagggagtataaatttgcttaagtcaattgcttttgtaatctttgatactttactaattgatttcattttctgggcgtggccccatggactagtagcgtttggagaaacactgataccacatacaaatctcttgtgtcaagttttaaattctgcactattatttctatttttttttactgatattaaagaaaattataggcatttgcaagaacacaaattttcatattaactaaagtagagagtatgattagagcaacaataataaaaatgactctctattttaacttttttgttattttaactacaaaatagagagtaccagctcctaagtggatatcaaaagaaaatttaaatctttatattagttttactaatataaatttagatttacatgtttaaatgtgccttctataacaaaataattcctttcatttttaacatctcaaacttaagttcatctttcaccctatactaaaaatactctaattcatttaaacctcccctctctctatatctctctctacagaggttacttagccacacacaacatcatgtcgaccaaccaccataacaacacatcggaccaccctaacctccactataacatcacgtcgaacctccctattcgcccactacagctgcctagatccatacctcaacctaaattaatgggtgattcttcttctctataaaatgatcttgagtttacttgtatgtggttgtttgtgttgaatagatctacacattttagcttgggttttgttgattttctatcaaaaaacttgagtattgttgcagtttttgtattttttttctaagtttctcatatttttgcgatatttatcgatatatggcaattagttttgcgataattagctaaattaaaggttaggaatgatgtgatatttaccgatgtctagcaatatttaaggtagaaaatgagttaaagggcgttttctagatgcttagcgatttagtgcgatatactttgcaatatataactgaaaatgtgataattttgagaattagagatgtttgtcgatattttttgcgatgtttaacaatgcactattaaaaaggaggattttagagaaatttacgatattctacgatgtttagcaataattttgcagtataaacctaatcgttgttttttttt

SEQ ID NO: 184949 - DNA, 2723 bp, Cannabis indica
gtaagctttttcgtaattgttatattttctgataatttgcttgatcctttctagatatacacacacttgcacaaatacataaattaagtttgttttgtaaattctttttctttttccagttagtgacatttgatgttttctttaaccacatgaagcgacattatcctgaatatctttagtcttcgttttttttctccatttggttatttgaatgtcaactgttactgggtagcttataatcttaacaagtcatttgtgcatgtgactattcctaaaaaatacacccattgatactgaattgtttatttatttttattaggaaatagacaatgattattcatatattatgatgtacaatcagaatctttaagcaaaccagcaaacaaaaatgttttataaccttacgtagattctcaccctcaaaggtaccttaaacttatttacacactattggtagccaaaatcttcatgcatatcttagaaaatcctcttttttacctctaaccaaattgtctaacagctagccatatgctaatgctgactatttttactacaaagtgatgcatttaacattttctttcttagcctcgctttttatatcagtttcaatcttatgacagtttaacgacattgggtctcatggcacaaaagttattgtctacaacttatggtttaatgatgatggagttactgagctagacttcaataaagatcctcaagtaacttgttctgattgcctctttcattctttttttctctcttacaaaatgtatccttacttatttagtagcctttatgtcttaattgttgcattgcaggatatttgtattagtggggatactagaaaaattgaaacacttccttctttgaagtcaataaatgaacaacatataggcaaccggttccaatattctcttcgtgtaagtagatggtagaaaaaattctaagagaagacaaatcaaaaattatatttttgaactgtaatgcaatggcaatagtaatagtaatagtaatagtaataatgaattgtaggaataataatgggaatgatattatgatgtttgattcatttttggaagggtgatgggaacaaatggtgtattgacaaagatacactttaaattctttcggtaatggaagggtaaaaggttaatttaattttatataaatgatgtaaagatgattaaagggcattacagagttttcaaaaccaaaccaaacaattaatggtgattccattagattacgccacaccaaacatgggctaatattcttgtgtctttaggtgtacttgtctatcttatacttgcgaataccagaaagtttcaaattaatacttaggggtgaaattgtggaacaccacaacattgccaatgatctcaaatttccagaatttatcttgtatgaacctcatagctcaggaattatggaggttagttttactgtgttgtttcaattgttttcatcaagtttcaaggatacatgaacacttatttccaagatgcaattagttaagctatgttggtatagattaagtggtgttgaactagcagctctctaacttgaactgtttgcccattatccagggtcaagttattacaactattgggtttcttaaagaggctccagatgtcagcatccatggcttctgtgtctaccatagaaatcgtctaattcttgtaagtatttttcttactttggaagttaagacaccatgcttttgatatatgtatgaatatgttccatttgacatttatgggatgtgagcatgctccacagaggctaggcatttcattatcttgattttttccttcttgtaaattccaatttgagaatcaaattctctgtattcctccatctatttctatgtagactatgtgttttaaatttacaaagtttctatagaagcatatattttgacttcaattgttgttgtacagtttatagtactctgtacaatatacatgtatttacactttcttggcctttgtcttgttgctgttttaatatattagtacttttaggtttctttgtttcaatgtaatgttctttaaaaggtttattgtctaatttgttgtattcactgagtaaatgtacagtctaatgtgaaacattttacactatcatttctcgagagcaatttgcacatttaagagatcttttacagttttgtctttcctacagcctttttggcaggtcctaagctataaacatagtaaaggaaggggagttgttggtaagaatccgctacatgtatcagatttctttgttttcaagattgcagaaaatgtgttactaatttatttatttattttttgtttcaggagtgttggaagcaaattttattgaaccaactcataataaacaagattttgagaaaagttctctttttcagaaacttgaaaatcgtctgaaggacatgaccttagaatactggtgagcttttctatcacttttgtactgttattacatgtgaatattttgattttccttccagtactttgagataggcttcccacttagactatcaatgcttacactatgtttggtagaggggagagaaggatggagggagaggggtggagggagagggattgatgagttcctttgtttggcaagagggaaagatgaagggagaggagagatggagggagagaggggagatagactctctccctccaaatacacatattttaattccttaaaaaatgggagaatctaag

SEQ ID NO: 184950 - DNA, 5495 bp, Cannabis indica
tggatcgtttctgggcatctggcatattgccaagtcctactctccgttggtttttagtagatggaacattgttgcgtccaaagtgtgttgcattgatcaatacataattgaattttggagtaactagtttaggttgttctcatgaggttttggtcccgattcatgggaacgtacatagcaatttgttagttgttattgctgccacagattgctgggttttgcgtgaagacctaatgaaaaataagtagcggatgttaaggttaagttatttatttctaacacttcacgtatagcacaaaaatcatcttcttagttttcttcattcctttattgcaactttttcttggaataggggagttggctttgttaattgaaacattaggaagttaaactaacagacgggttctgggctgaacccaattctaatatttcagtttaaattgcagctgaattttttattttttttttcacaaatgttaaaactttgccttcttttgactcattttcaggccatgcaaacacctttcaggacctaccttcaagaaatgcttgctttggtaaacacttttctttttgtgaattatttaataatgttctgtctgctgcattcacatattttatatgttttccgattgctgatgaatattgatgtttcacttatatttcgcagtccctgtttttaccccctttatgtatctctaagttgatccttagcatgacatttcgtctctgtgctgcttgttcacttgtgaaataattacactttgtattggtaggaaaatatttgtttatatggaaatatagagtggtcgcccaaaggctcaggcatgcgatttgcttatgtaagtttgaggttgacttcctccttctcaagtaacgattgagttgaatcctattatcaaagaatatatatataaatagaatgtgtgtgtgtgtgagagagagtttctaaggtgggcattgttttaaaaatcggtcgaggcgcgtctcaaggcaaggtggtgaaaaaacgattctgaggcgactcctcatctgccggacttgaggtggttcgtgttgaggtgtatgaggtgcttcaccaatagggtttaatttctgtgtttttagggtttgttttgggctgacttgggcttttttatgttttatagcttctattgatttttaattgactttatggggtttagttggggtcatttctaacataattttaatggagtagatagatttaaaaaataaactctgagcagctcccttcttctcggactcctccctccactctcccccaatctcacgcagctctctctctcctccctcctccctcctccctctttcattcagagaaagatgataattatgaaaacaatgcatgatcattatgacttctttgacatttgaattggaatggggaatatgttcctactttctatatatgtttagaacttttactatttttataagtttctactttctatatatgtttctaccttgaatttagttcatcatttggagatctaattagtacttttcatgaattttacgacttttttatggactatgtgttgtttgttatgaattttataaaggttttcttcttatttttgatgtgtaaacctattttataaagtttttcttcttattgttgaggcgtacgccttgcacgactgaaggaaaatgcctcagtacccgattccggtttttaaaaccttgaaggtggggcatcattttgctcctaccgtaagagttctttttgttgacattacgatatatcctaattttttttatatgacgtgtagcaaacatctcattagtataatttattgtctaaaataaagcttaaaatagttagtaaataagcatgtgttgtgtgcaactaattgtttaaactctatttttggtacaataaattttttagaattatccaaagcctgacaagatgtgtgctataattataatctagtaaattaaatataatgatttagttatagatatatatgttcatttaatgcatggggttaccctgcaatgaaatggaattaattgaaaccaaactatgctttagtccacattgagaagtatctatcagaaaaactactgctttgattttttactgtgaattggacagaatatgctgaaatttgtaagcaatggatgttgaaattagttagattttggtaatctatcttaagctgacctagacgccgaaatttgtcaataacacatggcttattttttgctgtttgtatccaggtgaagagggagagagcagagcgtgaggctttgggagccttgccactctatcagcgcaccattccataagcatgttgttgcgtcgtgtagctatttttaagagcggatctccgaacatagttacatttgcctttgtgatagatgtgtttcaatactggaagtggagattgttcctcttctagagcttatttccaattattttgcctttaggtatctgaaaagaattttccgacagttgccatataaggctttgtccttattttcgataatgatgaaggattcaagtttttctgttctatatacttcaataaaataaagctagttattggcttacaattttaactgtctttgcccctttcttttcaattcaattttataattaactattgaaaacttaaacaaaaggtgttatttttgtattctgaatgtataactgtttctataataaaccggttgattagaatatttaaatggcatggattaacacatctttgttcaacattttactatgaatttatcgtagcagcaaaatttacacacgaaattgcatagtttttgtttactttattctgctttcaagtttcaaactctttattttttgtaggaggacgttagtttggtaattaattgtacaagattttgtaatgaaatagaaaatggcaaagagcttatgttgtaagaatattaccgagcagatgatatagcagaatctattactatacacaagaatatgatcattttatctaaaatagaaaagaaaagaaaaaatggttgggcataagttggcaacaatagacactgacatctcgatctaaagctgtcagaggagacaaatgtgtggccattttaagatatggtagctcaaagtatttgcctgtcttattgtgaatgtcgatcatgatttttttcatacccattggaaccaaatttcacaatttacatccacataatatttccttctcatctcaattatggaatatggtacgtctctatcactatgtccatatgccgacgttttcaactgttcctgtggtagtatgtatgtacctacctttaggtgtagtccgaaagatatgttccctgctattgttatctttcaaaactaaacaattaaattatattatggatggatggatcattgatcgagtaatgcagatttttcttattttctgtggtcaaaacatgttaacaaactctgcatatttctcttgcatgttaacaaacgtgtggtcattcattttaactctgttgggaaagatgtatataattttacttggagttaaaacgttaaatcaaagctgtcagcttccataagttttatgagacgattttggaataaatattgcctcgtgggaaacctatctactgttggacattccatgtgataccatgagccccatgccttaatggttcactatacaccatctccctctttgtctctattgacttgggttgccctcactagaaaattcccatatcttagtcatttaattaactatatttatctctgcagtacactatcccatattcctacgaatctggtctctatcaatttcaaactcattgtcttcctcttcttcttgtttttctttttattgatggtagttttttcccatgataaatttccaccttctttttttactttttttcaagtcatgaacatgtgagacagaatagccaataatagttatttgtcttcagttcatattaagacaaacaatagatatatataatcgaagctacataatttgatctaatctgaagcactagagcaaatatataatcacgtactcaaagcatattatttactcaaaattgaaggtgtccaatttaattaggttcaatatatatctccaccaaagctttcacaaccttttctctacctacatatttagttttcattttaaggaaccacaacacaaccttcattttttttttggaaaggaaccttctaccgattcattttattataataatcaaagtccagtagtgagaatggccttatctgttattaagtgttatgtgctctaatcattatctcacattaatattattatatttatatatataaatttagaaacaacttcattaaatgagtaacgtggacagttgagtcatttgatttgatagtgtcgtaaacaagttcactcggctgggttgtcttttcctatcaaacatgcatacgtcggattaaactcaaatggttcatcgctagccaacgccattccgaaatccaatgcttggatatggaatgctggtggatcctagttgagagtactgagaaggaaataaaaaacaaattcccagatattcttcgtttccacagaaaataattttttttttaaaaagggaaattcgtcataattcacaaacatatcaatagataaataggtgtgcctcttcgttgtttgtattaggaagaagggcatgtgaacctataaactcgagagtattatttatctcatgttttactgtataatttaatgaggaatagggtgctatttgattgtataatattattataaaataatattatgttttgtattatatatttttagttatatcatatgtgaaactaaactcgattctctctttatttttattttaaacttgaactttggatttcagactttaaattcaggccccgatcttgatccagaccccgatactacaacctcaatcaacctttacctaaacttcagaccgcaatccaaaccttgaaccagactcaaatcccagaccacaatttgaacctcgacttagactcgacccgaccccaactcgaacttgaacttcatcccctcgtgaagatcccataccttggaccttgaactccaaatcttggaccctagaccttggaccaagaaccctagctcggagttggaccttggacacgatctagactagacactgactccaaccttagacttaattagaccttgaactttagacatggctcaaactttggaccttcagtccctaaccccaaaccggacctggacctcgatccctgacataacctggacttgaattagacctaaccctgcccttgcccccacctcgaccctaaaccactgcccctacacgaaccccaacctttacccaaacctcgatgtcaaaccctagcccgaacttggacccaagccccaccccgtacttcaaacccagcctaaactcgcgcctcgaccgacctagccctaaatcggacttggaccttaagccccagtgcaactctaatccccaaacct

SEQ ID NO: 184951 - DNA, 3759 bp, Cannabis indica
aataaactcttgtgctatgaatttggcataagcgaaagtgtgttttgtattcattttaatattctactttaaaattttcgcttaacatgtgtcaattaaatattagtttatatcgacgcaaagtagcatcagtcccaaactgaattaaaaaaaatttaatttgttatttgttattttgtgatggttttaggcattaaccgattctaaaagttcatttagtagtgactagtgagactatcattagattagtgttatgtcaatgaatttttcaaagaaaccaccacaattaatatacttgatatttgtaataatttttatagttgaggagaattttggcaacttaaaaaaatctgggagcaaactctacaaagatcgggaaagataattcgtatatattgtttaaattatcaaaaaaaaattggattaaggtaaaagagttggttgtagtatagtgataactagctagctactcaaactccattctttagagagttcttatatattatgatgaaacgttatatatatgggatcttcatgatacatatcacccggctaactaagatatttataaagttatataataatatataatatttatttggaaaccattaaagagtccttgtcattaattcctcaaaataataacaaatataaaaagaaaagatagaaaaaggaagaataaataaccatttatctccttctccatcgatgcacggtccctcccaacaagttgggatttgtcatattagagacagaatattgttcgaataaaatgagaaacgggattgattgaatttatgattctattgggtcatgagaatagacgacccagtcaacgctatttattcagtaattatattttaaattaatatgaaggcaccagtggtatacctagccccttctcaacatttggcgttccgaatggctagcaatattacctaaaagttattatattaaattatatatatggaacccgatacttagttggataaatagcgaaattaacacataaaatagtgttaggcatcatattggtaccttttagtatttctctttaaatatatatatacgtgaaatatgatataagtatatgtttccagtataatattctctcttatacttgttcaacaccagaaaacaattatgcatgagccatgaatcccacacttactatttatggaaagtaaaaattagtccattatagaaacttgacttatatatatatatgcatgtaagaaagaagctggaatactcatgttttatatttatttaattttttcgtgcgtttctatatacaaaaccaataaggaaattggacaaataaagtcatatacatatgcacacataaatttatgaatatatatatttaagcatatcgaacgttgacaatgatagattacataaatatatatatatttatatgtatatatatgtataaaaattcttatactcacgtcgatttttagataaatgagcaattcaccccaactttcaacttttgatggagtactagatgaacctcatcagcaaaaattctctatctccaaaggatcatatcttgtagtacagactgtataagatgtgtatatatcattataatatttagatatggattctctgcactttataccacttttatatatcaacctcatcaacccaacaatcaattttcgcctccgatacatcttataaagcatggtatattatatatcaaaacaaaactgatatatatatatatatatgtatgtatacatacatgtgtgtgtgtgtgtgcgtgtgtgttgtgttgatgaggttattaaataatattagatatcggaataatatacaatgtgctcataataataaaactgacttgatcgcatatatttcatgattaggagggatggctgcgttagggtccagattacagtttgatgtggtctagtcaacaagcaaaattctaaaagttaaagttcttttttgtactgtgataataagtattgtttattagacacttttaaggctcaacatatatactacagaggtgtgactttattaatgatttcagccatatatatatttgaacaatagggtagtaacatattattaatattgatcaacattttaaataattaatgattatttagtatatatataccattaacataaatgtaatgaaaattcttcatagttggttaaatatataatctcatatacaagagatcataattaataaattaaaataaccagcttaattaggccttaagacatataattatagaaacaaattaaacatcacccatatattaattatataattaaaagtactcttcagcagcatatactgtatcattaattcatatataagttacacacacattattatatatgaacatgatgaaatgagaaaagatgcgagggacactccagccgacttccaacattaataatcttcccttatatgtatatgtgtgctggacttgaaaataatcaataataataataataatttataagcaaatctttctctcgattgaaaaagctagcctagctagcttgcttgaattgagaggatcgatatataatctttaatacaatatcgagagtaattaaaatcatcatcagcagatcttcattgcatttttagatttttcaacctgctacattaaccaaaaacaaaaagaagtatattcatatatatcattaattaataaataaaagaaagccaaagtatatagtagtagtaggaggaggaggagtacctttgttcttcatccatatatgggatatagggaactgatgatttgttgttattgatctttttataatttggtaaagggacttgaccagtctcaattttgttgagatcttcgacaagtgtctcgtaatgcttcttcacttcttccactgtttttccaccaattgctttggccatgttgtgccaacgatctggtgtgtctttgtcatagatggctagagcattctcaaacagcttgttctgtttagctgtccatgaacctgatgaccccattatatatataatatatgtgtatatatatattcagagaagaagaatgtatatatatatgtatatttgtgagtagaatgagagtaccaaacctctcattttatactttgaaaaatatgatacaacctgcaaaaagacgaaataggagaaagaaggaaaatattagccatgatgggtatatgtggctgtagaacgttacttatattgtgtaataaaaattaaacgacttgacaactaagattcctagtttttttttttcgagttggggtaaaatctatttttatatttcaaaataacaaagcacccaaattattcattttttatatactgtacaacaaaataaattaaatgtttacaaaattttaaaagataatatgtgaatatatatatatatatcactatttaaaggctaattagtttacagtttttttcttaaaaaaaaatgataggatatttatagttctgatgatccatgtgcggtgataaaataattaaagaaaattaaaatcttatactttgtataattatttgaagggtagtattgaattaatttccttgttaaagaaattacagttattttatttctactgtactagcagtacagctcacagaactagcgagttgttaattaatggaggtgcaataataacaagtgcctttgacaatatatatgatatacgttagcagaatttcatgaattaaattcttattgcttatatggattgataatgtgagcacagtacttaaaa

SEQ ID NO: 184952 - DNA, 2472 bp, Cannabis indica
ttttgcatatttcttctcttggtatcagagcaaatctaggctatcgccatggcagatccaacctcagctccagttcagcaacaagatgatggctcagggactgcaacttctgaagcatcccaccagaaccaacctcgagcggctgcctctattcagaccgtatcgatgaatcccgcaccagtgactacgccatttagtagtacactcagtcagccatttaccatgaagcttgacagacacaacttccctgtgtggaagacaatggttttcaccatcatccgcggccaccgactcgaaggattcattaatggcaaaagagtttgcccagaagaatttataacctcaggtacccctgaaactactgattataatgtgattgttaaccctgactatgaaaactggcttgtgcatgaccagttgttaatggggtggctttacggatccatgacggagggtattgcgtctgaagtaatgggctgccagtcggcctactctctctggacagctctcgaaaacctctttggtgcctactcgagggctcatactgatgatctccgaaccaaacttcagacaacaaggaaaggttcgacatccatgacggattacttaaagcaaaagcgaatgtgggctgactctttggctcttgctggagagccatatccagagaggcatcttgtctccaatgttctctcgggcttggagattgaatacttgtctattgtctctctaatagaggctagatctgaaacttcttggcaggaactgcaaagtattctgctgagcttcgacaatcgacttgaaagacttacagcaactccccccagccacaaaaatcttaactcaccgtcagctaatatcgctcataaaccaactggtgcaggaggcactcggtactcaaaccagtattctcagcaaggacgaggctcaaatccaaactttggatctcgggggagaataggaaatcgtggcagaggtcgaggaggcagatttggcggctcgaagccaacttgccaagtctgtggcaagtatggccactcggctgcagtgtgttacaaccggtatgatgagagttacatggggcatcaaccaccaggagaaccacagcaggacaaacaatttaatgctcttgttgccacaccacaaatcctcaacgatgatagttggtatgtggacagtggggcaagtaaccatctcactgctgaagaaggacaaatgagcaacaaatcagtgtatggtggtaaggagaagatcacagttggtaatggtaatcaattacccatctctcacattggatctggcctattaaaaacctgctcatctactcctttaattcttaaaaatattctacatgttcctgatatttctaagaatttaataagtgtctcacaactcacttctgacaacaatgtgtcaattgaattctttccctctgtttgttgtgtgaaggatcaggtgacagggaaggtggttctgcaaggagctcttagagatggcttgtatcgactcgacacctctcttctgcaagattctcgtcaaacatgtcctcggtctagaaagtcccaacttgagtcctttgctggtgttgttacagcaacatctaagtcgaataaaatcaatgttcatgagtctgttttagatctttggcatagaaggcttggtcacccttctaatgttgtgttaagtcaagtgttgaaaacttctaatgtaatacctgctatcaatgaaaaattactgttttgtgatgcttgtcaatatggcaaatcccattgtttaccttttaaaaactcatccagtcgtgcatctcaggtcttagagcttgtccataccgatctatggggtccagctcccattaattctcataccaattctcggttctatatacacttcgtagacgatcatagtcgatacacttggctatttcccttgaagcacaaatctgatgcactttcagcgtttgtgcaatttaaggccttggttgagaatcaatttaataggaaaatcaaggctcttagaactgattggggaggtgagtttcagtcctttactgacattgttactcagaatgggattgtttttcaacattcctgtccccatacttctgaacaaaatggtagagcggagcgtaaacatcgccatatagtggaaatgggcctcactctattagctcaagcctccatgcctttaaaatattggactgatgctttccacacagctgtacacctcataaaccggctgcccactactgttcttggtggtaagtcgccttacgaggttctcttctccaaaacaccagattatcacactctcaaagtgtttggggcagcttgctttccttgcctaaggtcatatcagacacataaattccagtatcattctgttaagtgtgtcaaccttggctatagccaagctcacaaaggttttagatgtgtcagtcctcatggtcgaatatacatcactcgacatatcattttt

SEQ ID NO: 184953 - DNA, 1734 bp, Cannabis indica
tttttttttctattttaacgaatgcttcttgttcaggcggggtagaatggccaaggagattgcaaggctaaaggaagaagcggagatgctgaaacaagctaattcaaggtgaagattgccaccgaacgttgagtggatgttttatattttattttctgtacaagctaatatgttgagtggctcactgcagagattgtcctgaaacgatgtctcctggtgcaagaaactcacggatttatgcacttgaaaatatgctttcttcttcatctagcacccttgtttctatggcatcacaattatcagaagcagaggagcgcgagcggggttttagcggcagaggtcgttggagtcaagttcggtctcttgctgatgcaaagaatttgatgaattatctattcaatttagcatcttcatccaggtaatatatgtatcccagtgttaagtttttcatagctgagctagaacattccacttaacattctaaactactttttttggtctgtttttcaaggtgcttggtgcgcgatacggaagttgtatgcagagagaaggatctacaaattagagatttgaaggaaaaaattgtgagtttaagtagtttgcttagaaaatcagagatgcaaaaggctgagcttattcatcaggtgaaaactcaggttagttttcatggctcactatgatacaacaatgcatactcttggttttagccatcgtgttaaattccgatgtatttttattaaaaaaaatccaattatagtaaattaatagaatcccttgatggtgtgtgtctattcttttatttgtatttgttagggaaggaaaattgatttttattattagcgcaatatatagtttgatatctcaacatatgttttgacagctggacctatatattgctaacaagaagcaatagaacgattcctgggaactttttacttttatctttgttattcgtgatcaactttgtggaattttgttagcatttattcatttttctttatcttcttcattgtgctaactatcggttggttcattcttttaaaactttgaacagagtgtagctctgaagcattatgccaagggaggacataattatgacttacgcaagctggtatgctatcactacctttgcattgtcttatttttttaggttttccactagtcattccttattctagtatgtttcaaactacatgctatatatatatatatatttatatgaattcatcaatcaatgtatgctttaataggatcaccggagctcattcattgtcctagaagacatggatacatctgtctcagaaaaatccgatatggaaaattcagatacggaaaaatcagatgtggattatgtaagtgaagaggagattcctaagaggcaacgagttaagaaaagaaactctaaaaacagaaaccactctaaccccggatctcattcatcaaataatagcgatcacgagagcataaagttagacagttcaggggagggaatagttgctgctggtggtgataagaactatgcttcagggtcaggagtatgctgttcttgcaccaagagctcatcatgcaaaacaaataaatgtcaatgccggtcttctggtgggctttgtgggactgcatgtggttgtatggccagtaaatgtgtcaatagagaagtcgacaaattgcagcagtcaaattttactgaaaggattataaatggtatagggcctgatgaaccagagaaggatagac

SEQ ID NO: 184954 - DNA, 1911 bp, Cannabis indica
gtagtgaccaaaaccacaaccatgacacaagcacaaaccaactgagcccccaccaacccaacccacaacccaatcaacccctttcccatcttaaaccccacaaacatagcaaccggaaaccccacaccataaaaactcccaacatttatacaagcacccatactcgccctaccactccccctcagaactccgcaaacagtagtttgcggacaattcccaacctcacacagccccaccacgggcaataccgccgcactcagcgataaaatcgctctgtccttggtgaaaatcttcccccatgtgtccttcaccgcaaccatgaaaaccaaagatacaatgcctgttacaaagccacacgacaaggcaacgaaagccgcagttttcgccttctttggctggttagcccccaactcaatgcctactctcgtagaagcagcttggtttaaggcgaacgggaactggtaaaccagcattgtagcctgcatgagaattcccatgcaggccactgcatctccggagttgactaacaacccagagagcattatcatgagctcataccaccaccactcgagacataccgagatgcaactgggaatggcttggctgagaattggtttccattccaagaagcagttgcggaatgaccattccggccaagaccatgtcacggcgccgaagaagtatagatagaaagctaaggatacaaaaatgttaaggtcagttaaggaagcggagagagcgacagctccaatgttgttgaaaccaagatggttgatgaagtagtagttaataggagcgtgagaagcaagcgctaaggctgcacttaacatgagaggttttgtgagtttctgagtccttaagtggattcgaagcgggtttatgaatgattgtaagattagagaaggaattgagtatttgaggtaagttgtggcgattgtggagagagtttggttgttgttgaaccaataaaggaataagggtttggagttgaaccatgagaatgagatagggaatgtggcgagtgtgagtatcatgaggattgttcggtttagtgtttggcccatgagtgaccatttgttggcaccgtaggcttgggaggaaatgccttccatgcccgcggctagccccgacacgacagagtagccggtgatgttggcaacgcaaatggcgaggctgccaccggttaaggcgtcttttcctatcatgcccatgaagaacattgagattagtgattttccgtacactaaaagaccggccatgatcatgggaatggctattacgtatagctctttcatctcttcaagtacctaattataacaataatgagattaattagaatggaaaatgataaaatgatcatcaattatatatatatatatataataattatgaataaaaacctttgaaagagtatcttggatgcgcttcgaatgttgatcaccaatgattccataaccctcttttcgataaaggggtgataacaaaggatgagttgaaataacatgcattgtgtatatatcagtgtggtcttttacttaattttctttagataatggagaagaatgagactctctctttttgctgttttataataacaattagaatctttttcttgtaataaaacaattaatgtgttatgtaggggtgagagaggacgagaggaatgggcatgcggggaagtttgtcgtttagtggactattttggaaggaagcctttacatttcatacagttgttggatttcaatgcataattatcgagacctggcaaaactacctctaccattttctaacgtaagtttttaatgttatgttagatgaaataaaactatggaatcaacaatccaatacgtatatgtatttgacaaatataaaagctccatttatggattttatagtttgatatattaacgt

SEQ ID NO: 184955 - DNA, 5568 bp, Cannabis indica
tttttttttttttgtataattctccttttttggctttagaatatttgggttagattattagtagccaataatagtattaaagaacggaatgggaaatgttaatggaagagaagatggggttagtagcccgtctgcgcttgaggaagaaggcgatggcaacggcggcggcggtagcgtgcaagaaggcatggctgaacagagtcccaccgtgcctgatggggcaccggagatgatgggccagtctcctcctcaaaccccaaggacccactcacctttgttgttcactccccaagtaagtagttcttttgattttgctttttcaggctaatcgctttcctatttgataataattcagtctcgaagatttgatcccttgtagaagaaagatttttgtttaccgacattttttttcggggtttcctaaaattgattagactgttgttgcgaacgcccgagatcttgtgtcttacaatattgcaggttgtgaattgctcataattatttttgttattgtaaatatgttttagttgatttgttctctctgcacagtacttatcacttaactgtttcttcatcatctttttgggttgtttggttttacacactttaggtgtttgttaaaagtcccgaaagaatatatgggttttcgatctctgattttatgtcttttttggttgaattcttgtttgccacttcgtctgcaagttagtcgaggtgacatagcttcaatttcatgcaatgtggttacattttcttttggtgaattgtggtttggcagttctttctgatgtgacggttgtgtttttggaagaagtgaggaagaattagatagtaaattattcaaaaataattatttgatgaggttttaactttaagttttcatactaggctggtgtatttgcagctttaactcattaacttttgctgtatattgtaatgtactaatcagttagttttattttttttaatgagttatggtttccttttattatgtatattcaatttcggatttgtaaggatcttcatcagttagttttcattcccacctttttttctcaggtccctgttgtaccactacaaagacctgatgagattcacatcccaagcccttcgtggatgcaaagtggttcaggggttgatgaaatgtcttgtgaacaagctattccaacaatgattacatgggcatacggtggcaatgatgtagctgttgagggttcatgggacaattggaagacaaggtttgttgtgctgattcttttgttgagtttgagctatgtgaattgtgactaatatattgctgactgcgtaagacattttcttggtcagactgcctcttcagagatcagggaaagacttcaccattatgaaagtgctgccatctggtgtttatcaatatagatttatcgttgatggtcagtggaagtacaccccagacttgccctgcgctcaagatgatgccggaaatttctacaacatcttagacttgcaggtaaattctctcattttggttttaatgttttgcagctgacatgtgtgtcatggtatggagcacttgcatgaatggtctttaacatgagcctaaattttctagtgtctcaaatggttttagcatctgttgtggttaatctttgtccctcagtttagattcttgaattgaacagacactcctctgcatggaatttcatactactttgtttggctaaaagtgaccatcttggttgacatctaattttgtcccaggattatgttccggaagacattgaaagcatatctggttttgaaccaccccagtccccagattcaagttacaacaacctgcaacttgcagccgatgatttttcaaaggagccaccaatggttcctccccacctacaaatgacattgcttaatttgcctgcaccgtcatcatacacggagattccaccgcctatgtcacgtcctcaacatgtggtcctcaaccatctttacatgcaaaaagggaggattggcggcccatccgtggttgcactaggtacaacacatcggtttctcgccaagtatgtgacggtggtgctctacaagtccttgcagaggtgaatcttgactacatccgtgaggactaaagtagatttatttatctagctaattaatacaattttaagctttcaatgatgctgtaatggcttataaagctcggaaggagtataagttgaaacttggagatagtgtttcacataatgcaattgcttcttgaccattcatcctgcgaacatttttatcctaattggttgtttggtgactacatagtacacacgttgtcttcagctgtactagacttgatggtaaaggacacttgtggtgaaggcaatagttagtcttgtagtgaaaggaataacataaagagagttgaaattattttgggcaacctcgctgatgcttatcgttgttcttggatttatttattttatgaaagacttgaacaggatactcacgggagcattaaatttgtttgaactctacgatacccaagattagattggacatgacttagggttaattagcagtaagattagacatagttgcactgaaatcctagtaacaaatttcattttccccaaaagtcaacatgcatagttgaaataggtgtacttttttgggggaaaaagagaggtttagtttgaaatagatgcaccttctggaataagaaagtggttactagtctaatatctctgtagatgatagagagtgatgactactaattattaactatctatgcaatcgttacaatatagtattattattatcaacagcatagatttcactccaacaactactaaactatactattagtttcttcttccaccaaagcatcaatgagaactctattctttaatattaaacaaataccgtatcataagatctctctctctctcaccctcagtggctacaccatttcccacttttctctttctcagcactgtgacaatgtcaatggagatgattactcagaaaactgggcacccatcaactttaataccaggtgcagtcgggcatgtggccaaagggcagtggtccagggaggtgccccaccacttgagttctactttctcattttgcaaagcaaagaaaagcaggacagccatgaaagcagtgccagcatccaatgctgctgatagcacatagttatatttctgccaccagcgtttgtggtatctgaaaacgaagaagttaaagatagttcccgtgaccagccaactagctatgttggtgggagttgcaggaggcattccagcgaacccgtaggatatgactggaatatttatcaagggaatccatttcgtttctgggaaaattttgctcagcgcccaaataggaattggtaagacagccccaatgaggaataaccacaccaagttgcggtacagtccccccggtccaaataacctctttggaccaattaggccccaaatgacagaggcatcaaaggtcactcgatatttaggacaagtccatggactgtcaggatggagagagtcgacgtcgcatatgttttcaatgctctcaagcatccaccatgccactgaaaggttgactgttccagcaactagagttcccacaagctggttatacaagaagaattgagtcagagagagtaatgcaagcaattaaagttggaactgagtttctgaaatgaaagtacctgagctgtgtacatgcagcgaggtggaatcttcatgtagtgtccaagtttaaggtcagataagaaagagagggcatgaacagtactaattcgtccataaattttgaatagcaagtttgcaatgggttttcctggtagaatgtaaccaatgatgaactgtgctataatatcatatccgggttgctgcagcataaccacaagaatcataggttcaaaaacaatacctcataaaattaccaatataattgaaaaaaaaaagtacgaagatgaaaaaggattcttcaaaatcagaaaattgcttttataacctggttggtggttgcttgaatgaccccaatggggagagtgacaatccaagctaaggcaaaagcaaacaacattccccaccaaggcaactgaacatcatctttccacacaaaagacatcaccaatgatagaacaatgcttcctgctaacaagatttggaaccaccattcaggcacttgtttatagcttttcattagctttgcatggatgtccaattttgcattcttcattgctgatctgctctgctttattatatctctaataaaaaggaagccaaaacataaaaaaaaacatctagtgagtgatgaagaatttacacctatcccaaagagctgtagtctgaatggtaggaagctagcagcttacctgccatgaaagagtgccacatgagtgagagttgctgtaaatctagcaaatcccgaaccaatcgatagagcaaaaagggggctaaggtagagtttgccataactattataagcattcacattaagatcaaactgtggtgtcaagaccttggtggtatcatatttatgaccagtggtagtaaacagttgattagaaaaaataggaaatttctgagcatcaaatgtgttatacttccagtaacaaagtggaacaattatgtagataaacatgataaaaccaactccgacgttgagaatggaagagaaaggagtgacaagagggcttccatgataagcagaaatccctgcccaatcaagggtgaaggcacctatcccaagtccatgataacctgaaccaatctgttgagcagtgatactatgtggccaaacccagcaaacccatgagaagaatgtcaatattgggaagatatacccagggagggcatagtaggcaaaacttgctgccatggcgatgaggaaaaatttcattcttgaaatgcctttatttctagactcattttcatggagtgctctgtaataaaaataaaatttttatgttgtcagccaaaattgtatgactagaatactgattcgcatgcctaaaaagtttaggatcatgtacatttcaactccaaagataaaaatgactcagattcattcaaacacaaaggctcaaagatattggagaacaagcaaaaaagaaaagctaacagtgaaacaatacagtactttattttaaaaacaatatatttttattttgtgctgatttattaaaacttttagcttagatttttcacttttcaccttatgcaaattctccatccaatccattaataatcattttacagttgaccttaaatttagagaaaagaaataaaagtgaagggaataatattgcagtaactggccaaacactaaatggaacaaattctgaaccagtgaacatgcacttggttttgtgacatcatgtaaggaatgaactttttcataaaagatttcaaacttgtatgggacaatccagcttatatcttaggcttagctactacaaatggttccacacttttgtaccatacttttcaaatgatgatgtttatacttttcttttcaaaagcaccctatgcatctaggttattataataataatcaaagctagctttcacctatgcttgtttttttttt

SEQ ID NO: 184956 - DNA, 1618 bp, Cannabis indica
ttatatatatactgctatatgcatgaaaacgaaatttataattttactgaggcttcaaatggattatgtcatgtgagatcatataattgttatgacattgattcaatgaattatacactgtcaaatcaaaaagaagaaaagttcaaagaagtctcataactttgggcaagattttaaactaaaattagaaaaaaaaggagtggcttcctataagaacactgtaaagcctttgagtgttttaagcctacactctttttggtgtgcttatcaaatcgataattgtcaatatacttttatatatattatactagattgtagttacgtataattgcacataatatttaattatatgcttaattttttttaattatattaaatttaaattattatagaatttgatatatgattgaattaaatatacaaaaaagtaatatttaatataaaacattaaacaaaaaattgccactaacttttccttaatatataagagaattcagtttaatatgagaatccaaaaatgtcactaacaatcacataatatcaatgacattaatacacaaatcattttctgaattttcgaatataaaatctaacttcaaattcaaatagataaaaaagaaagaaaaaatgtatgcatataactatctgatatgagggaattgtcaaaagatttccctattatatctttgtattaattatgcctaacacttggtattcctctaattcagcctagggatcaatcatattaaagaaaataatcattagaacatactcaaaaaaaaaaaattataagacaacactacaaatatgtaaatgaaatcacatattcagaccatatcaaaattggtaaaaacccaaatcatgaatgaaagtcaagcaagtactctttcaatcataaactacatataaaaactgaaagaaataaagaaggaatttaaaaatcaaatgaaagacgcattgctcgtctcatcaaaatcaaatcggattccacctctaactggttttggaagtttaaattaagattgcctagctataatagttgaaatcaataatttgctcattcaaattctaaaaacattggtattgaaggattcaaattttaaaatacagaaataaatttttcattggtattaataagttcatggacggaggtacatctaagccaaaggtgaccttggctccccaactccatcccttttatatatataaaaaataaaaaaaagagtgttatgggatttgaacaataactttggactttatgccattcaccttaaccaactaaactatcaatatttattgcttataatatacttaaattttacttaaataaaagtctaataattttttttattttttatttcaggctcccggaaaatgtgggctcttggcatgggcctagtccgcctatgcctagggccgaccctgaatatgattcaaataatatatagaggaaattatattctatacccttttatattgtcctcttttatttttaccttcttttttaaaatctatcatttttacctcttttttaaatattgtaccaattttgccactgtcacttcaagatactctccatgtgattctcttatgtaagggtattttgggtacaatacat

SEQ ID NO: 184957 - DNA, 6322 bp, Cannabis indica
atataaataataaaaaaaaaaagcatttttctttacagaaaaatcatatttagaaatattttcacatttactatcactgcccaatttattatttaattcacttttattaaatttccaagacggacgcgaaccattttcttaaccaaattttatactttgaattttgcaattaaatattaattgttaatttaattcccctatatttaattatatatttttaatgatttattttattttattttatttttccttttatttttctactttatttatttctcttctttacctgcaaaaccctaaattcacatcactaggaagtatttcagaaatcacatcctaaatttgttatataattatttttttcttttaattcttttacgttttctgtaatttttttttgggtgaaaaattcagagtttaccactgaagctgagttctatgtctaaaatggtggatgcacaagtcagaaaagtgcagaaattgtagctttgaaagcttgatcttacattgaggatgaggtgttggctctctggggtttctgtatatttttttctataatttattggaaccttttgagcttcattttgcccatattgtaagcttctttttcattttgcaattagcttaattttttttttgtccggatttatataaatatatttcttccccaggaactcaaatccttgatgggtcaatttctaaagttttaggggtttaagtgtttctgtaattagttttcttgggtttttggtgggtttttcttgtcttggattttgtatacattagaatggaggaaaaagaaagttcggcttctggggtcgcagtgagtggtgaaggagtcccagatagctatagggtcgccccgagaaacgaaaactcgacccaatttagtggtccgacagtgacagttgcaccagcgccggcctcggcctcagcttcgccggcactgcatagtacggaagggaagaagaagagaggtaggcctaggaagtatggtcctgacggtagtgtggttgctactgcattatctcccatgcccatttcgtcctctattccactcacaggagagttctcagcttggaaaaagggtaaaacaaaacctgttgactcaataaaaaagtcacacaagtacgagactcatgaaagttcaggtacccaaatatatgtgtttctaacattgtgaaagttcaaaacttatatttttgttttcttttggaactgttacatttttcaaaacgttttttttattagccaagtttttcggtttgcttctaatagttgttggggtctagtttgatagtttcgtggtgtacgtttaggattctgcttgtttttgtagttttacattaagaatttttttttttcttttgataaccgggttaagaatgtttgttggttttggtgtggtcgtggacccgtacgattagattccttatcagatctggaatttaatgtcaatcatctgtgagaaaaaaaaaaacaaccaaaaaaataaaaaagaagaaaagattactgggttaactgtaatatgtcggaatctttatgtctctgttcagactagactagaaatgttattctcctaaggtcctaggttgggtaacaagaccgaagctttaaaatttatgaacagagtgagtgattgatttttggtgtgaggtttatatataggtggagtcagccaagtgggtgggtgacaccgactgggattaatatggtttttaattaattgactgttttgttaaaacatgtcttaaaatttgctgactgtgtgtcttgatttttggaactctagttaaaatgggcacgagttaaaggaggactaaaaaaatgacgtggggttatcttgtaaaaattgatacttgattaggcacgtttgtcgttccaaggcattttaatccccttaatagggtttcttcatgacttttctgaccgatgtagtgactagattctgtctgaatggctccataaaaatttgtgtaaccttactatatttcattttaacagtttgacgggaatgttctaagaaatttatggtatgactttgcttctatcttagttaaattaaactggattagagcagaatgactgtcttatattatgataatgtagagctgggtttctaactgtatcagttaccccaaatttttcattttctatcaacttcttgcgtttataatttaaaagtacaacatgccgtaaatttataatgttttgacttgtttatttgatctacagttttgtaagaaatttattaagccacttatatagaattttactgtgtatgcgcttaatgagtttccttttcatttttacatttataggagacaaaatagcatactcagttggtgcaaatttcacacctcatgtgcttactgtaaatgctggagaggtatgccctttacatttaatttatttgaaacaattagttcacattacatgtgattaatacttaatactgttaattaaatatctctcgtgtaactactaattatgttgttctatttctgttagttataatttggatgtttttttggcatcaagcttgtctgaatatctattttatcaccatgttctgtatatgtattatgttgtaactaccaaagcttctgactttttgggcatgggaatcagttgtcattgttcttgtgtgtgtgaaagcaatccctttgtatattgcgttttgtaggatattcttatagggcctttatatatgataagcacaagtttgcatattgtcaagttatgtgtttatatcctaatagtatactgatttatgctatgccttcttgttgtggtaggatgttacaatgaaggttatgtcattctcccaacaaggagctcgagctatttgcatactatcagctaatggtaccatttcaaatgttacacttcggcagccatcttcgtcgggcggtactttaacatatgaggtttggcttttcatcttcagattgtgttatggtcgaattctatatctctctttaaaatttataagaaagcaaaagtatgaaatgtttccagtcatgcatttctggttgttttatacagggtcggttcgagatactttccttgtgcggatcatatatgcctactgaaaatgcaggaacgaagagcagatctggtgggatgagcgtgtctttggccggtccagatggtagagtagtgggaggaggacttgctggtctgttggttgctgctggtcctgtccaggtaccattcatcatttcgtttgaagataaaagtcatcacaacacagcatatttgtaacctctcaatgtttgacaaatattttaatacaaagttgtagcccaatattataaattacatgaccttcgtactagctaacattggatatgcgcacacttaattgcctttctaactgttttgagtgtttcaggtcgtggtcggtagttttttaaccggttcaccagcaggaacagaagcccaagaagcagagacttgagccaatatcagcagcagttataccaagtccagttatcaactccatttctggtgaagaaacaagagtgtcatatggagtaaagccggtggtgacatctgctgccttcagtgtagacaattctccatctctcaatcccattcaaggctatagaaacttgggagctgagattaaatcatcgctagccgaaaacgaatcgaaaagcctaagccaatcgaactgtgaggtttcttgctgatccctttttaatccagtgtgcttgtattgtagtatctttgattatgtctagcagactcgaagacacaattaggctcacacaaaatattgtctgacacccaatattagacttgttggctactgaaggaggacaaaaacaaactacggcttaacttcgtcatgttggtttaacccaaatttgtactcttattattgttataattattattattaggttttaggtaggactttttaatcataaggcttattttctggctgttgtcgccttgtatttctaatgttgatgtgctgtaacatttagatgtatgtgtaccaaacaaagacacttaattgtctgattaagagctttgtatctttacgaacgattgatttgagtgagtgttattctggttatgagtttttttttcttttttgatgaaggattatgaatgaattgaagagttaacatttttctttttgctgaatgatttgaagattaacgttacaacaatcagattcatccatttctctgttcatgattcctcctattagtaaaaatagaaaaaaaaaagtcatccaattaaaaacattatattagaaaaatattgccatattgtaatagaattattttgaatacataacatacaatttaatatgtggaataaaatttttgattctacttaaataatttatatataatgtaattactttgatgtagagctatattttcttaatatataccttgaaaatgtagttatatatatttttttataataaatttagagattattgtttgaatagagtattgttaattggagaggattcaagtcaaaactgatatcatttgattacaagcaatagcaaaagcaatcccattaacttaacaagtggggagtttagatggtccagagtccagatattctggagacattaattaacccattccttctgagtactctgacatttctgttagagaaaaatcaaaaagctaaaaaaggaaaaacatttttcctagattacatgttgaaaggctcatttaagtctcgtatgacccaccctacccttggactatacacatgatcatgttctcaacatctctgtcttccattctttgttcacttttttaatgaactcttccactcttttcctcagttcatcctcatccttactttttcctttttcctttttgtcgttttccccatcattggttctgtcgttttcatcctcttctttctgagcatatatcatcccttcactgattcccacactagtcttgctctccttgtaccttctaatttcatttccatttctaccttgtttcttgaccactgatttggagcacctctctctttctcctctagttttatttgagcccataaggatgatcactatgatcaagttgcaaaaacagaagatgaatagagagtttgaaacaacataccgaatcaagtccagtgtggaaccgtattcaaacatggtttctttggacactgattaacaaaagttgatagaaagagaagaaatgaagaagaaaagacttagaagagttgaggcgtttgttatgatatataagcggcctggtgtgaaagctaatactttcttttttcttctaaagaaaagaaaattatacatgtgatgttatatgttagcatatgaaaggttattctcgactgtacagtgtgatttgtttaattaatacattaaactaatggaaagtcaattacaccatcaacagagagaacctcacatggaaccttctcagcttttcttgcattctcatcatctccacgtaagtatactgacatcaccaaagccttaaaacttttgccgtcttgtccttttgtcctgtacctcttaacaatataaaaatatggtgggagttgttagtagtagtgagtatgaaactttcaccttacgaaaaagatattagtctttaatcacataaaataaacttttatagaagcctagagttttctacctacaatgaaaagaaataaaaaagaactaagaaagtgctatttgtggatagtacgtactcaaatattgccactaaaatctggagatatcagatattattttaaagctaaactatttccactagtatttcagatcttttggagtggaagatatttcaagatattttaagtttcacctgcaacttttgtcaattaaggcctctccaaattattatagcaagagttcatttaatcttaaaattgcaagtaggggggaattttggttttggaaagtgaggataattttgtaattttgttacttttaagctcatgtgtactaaggaataaaaacaaaaggagaaaaaatattgacgacggtgcattatgcgtagttgtttgacaagtaggaatgaagaaaatgacactaccatacatggagggaagcagttagttagaatagaaataaggaacagtctcgtttggtcagtggtcaatatcgtggccactcttatgtgtgccaatagagaatattgttttgcatattttctatctattttattttactgttgcaacacacacaatgcaacaagaaacaaaagcattatattcctttggttttcaagtctttattccttcgaaagttggaaaggaaaagagaaaagagaaaagagaaaaagttgaaaatggcatg

SEQ ID NO: 184958 - DNA, 5060 bp, Cannabis indica
gaaagtagatggatttttagggtttcatatatatcctattatgtaactcattctatcatttattttttaataggtggggattattcacttactgtgtaaattaataaccacctcatcatgtgccaccaagcaagaaaatagccatatcattcaacatttaaaaatatataaaggaatggaattaaaagagcaacttttataataaaaaaaagtttagggaagatttttaacgaaagaaaaaattcagagagcaagaattatatctggtaataattggggagtatatatcctatttattctacaaaatatatttaagcacacatatattgaaagatcaattaaattatgctatttaaataatcaatacattaaagattatccatacagagttttttagtataatttattttacaacatttatgtttcaaaaatatttttaaaaaatattatttatgtatgtttgcataatttttatattttaaaacttctaccatttatttattttgttcataggagagaagatccattttttttttgacacgagaagatccaaacttagaatcttttctttgtgagaagaagtgtaagtggaactaataatctacttctatcatttacttattaaattgtgtcatattataaatttattttactaacatatcaaaattaatttttaatttaattacatttatgctctctaattaagaaatttttggtttttaagattttattacattttattgtaaatgatttaataatttatttttgtttgattttactctttagagtgatcatatcatatatcatggaatagactttatttattttatttattgatgaatatttccgttttatttagaaaaaagtacaaacaattattataaagtaatacatttatgttttatcctatgttttttaattatcataaataaaaataataaatgttaggtcaaacgtgcacgtgctatttttcttaatatatatatttgaaaaatcagtctcaaatatagcaaactaaaagaatacaatataaatctatcaagcaaaaaaaaaaaaaaaaaacaaatatataaatcaatgcaaatattgtaaattaaatgtggcaagtgaaaattataattaagatgtaaaaaatagtgccaaatataaatattgtaaaaacaaaataaaaaattgcaaatatgccccacatctttgtgtagggagtgaccctttctgttatgtaacagacttttttggtaatatacactttcatatacatatgttagccggacaaacaagattatttgtataccgtaaccggagtattaatttcctaattagagccacataaaaccgaaaaccttaaaaggattaattgtaggtttaaaaaaaaaaaatacttaattttgtcaaactatctatattaaacaccggcgacacaaaagtactcgtaaacttatagaagaaaaataaacacaagtatcacctaaaatgaaaatttaaaagcaaccttttcactctcattatatacaaacaaataaatgaatttataacctttaaaataaataaataaatgaattcataaaatggaaattgtactacactcactagtaaaaatcgctttcatatattttttcatcttaacaaaaagtcatgaatagattattgccacgttaattgttgaccaataatcattttcgcttaaagtattaaagagttaacaaaagctcatgatgaaaagtggtaaaaacatctgcacaaccaaccaaacattggttgaatttttgtgacatggatccaaccatttatctattttttttttttcgagggcaactatttttatgacatggatccaaccatttaccaaaattactatagcccatatttacaacttgcataacaactaattaaaaaacatttttttgatggtaacttaatcaaaaaaattcatacaaaacaaactattattattattattatggaatcaattttgtcccttttatcgtcaaagtggtagttgcatggttaaacagcaagctatagtcatcatcaaatgaaaaatgagattcatattttcgcaataaataaataatattatttttgttatatttgggagattgaggtggtaccaaaagaaaaggggccatagagttagttaaagttgtgacaaagaagcaaacaagaaaagatttaaacaataattaagaaccttacttcaaatatagaacacctagaaaaagcatgcttttaattccaaataacagaaataataataatagtaatttttttctttaagtaaaaataaataaaataagaaatcttgaaacgaaagaagaagcagattggcattttctttatcatcgccaccagcacctcaccacatacttccataccacgccaaacattccttggcaagcaccaccaccaacccacctctctctctctctctctaactgctttactctatttacatatatacccctctcttcattccctacccttcaagctattcctcactcactcactaacacacatacacacacgcacgctctcctgctctttgagatttctcgtttctaaacaagaagtggagcgcgtcggtacacgcgttccgttatgcccgtaactgtttgatatcgaattttcatggttcccttggagggaaaccgacttagctattccggagtataatcggatgcttgtctaacatttctgtatcttttatgtactccaattaatataacccacgtcatcactttagacaaattgtggctttgattcgtactgttgtatgcgatcccacgatccttcaccgtgcttgattattacccacctccgctcaatttgcgaagtgtaacagatttaatagctgtctgtagctcctccttctcactttcgcactctttctttcccgcactctctttctctctctctctctccaactccttcgtctctggtttcaagagcaaagtaaggtttcagagctatttctcggttctccagagttgcgtaagttttcttcttgcagctgttctcaattatcaatcgataaacaatgtaatttgcttctgctaatataatttatcgatagatatcgtagttgttgatcttattattcctctaaaactttcgttgaaaatgttggagaaaacacaaggcgttcgattgatttaggtttttttaactgtaatttaggttttgttgttttctatatcgtgatatagatacatttgtgtatatatatgtccatggcgagatcgatgtttttgttttcttgtatgctttcttgatttttatgctgcttgatcagctgcatttcagtataacatggagaatgattcatttcctccttcatcggagaccaataccgcggctccgaactcaccacggttcgccatggcggttggctcagctagtaaccagactttcaccgatatatcgccagataccagagacttcggcacacatttcttctcaatgtaccgcgcaactgttcagccgcagtctccacagatcccgagttccctgtccctcactccatctaccaggtcctcttccatcggcgccgatggcgaggagaacgccactgagcgtcgcctaaatctagctcgactcatccttgaaagcaaagaaaacaattatgacctcatccaaaagcacctccaggaccttaacaaggaggtcgacttcctccgtcatgaaaacgccgagttacgatcgattaacagcgaacttctcgagctcatctcttcacgggcagctttccggagtttgctactctcgtctaccaatcaatccctaatcgaaaccttttgcagccttgatattggcggtctttgtagtaatactactactactaccaataataatactaatgatagctctggcttggatgatttctctgacatcagtccaaccagcgtgatggagaccaacagattcgaaaggcgaaatccagatcagcgagtcactctccctaaaagcatttctgttcgttccacaggctaccagaaggtcaatcctggttcgagcagagaaggtccaagtcgcgcttcaaccaaaccacgaacagtcccgactcaatcagtctctggaacggtgagtgagttacattcttccgagttatatatcatcattttttttagctaaatgactcacacacgtgaacatacacgcccaaggacgatttcgttttcaattgattaaacatattcttgtcggccttaattcgcttataaatcttgattttgtgatagtataattacaattgattaaatcttgattttgtgatagtataattacaatatattgcgtgtgcagcaaagggtgtatgtgcctggagtaaacggtactaatggtagcagcagcagtggtgggatccagaaggaggagcaagagaatctgtctgggttggaaatggaggtgtacaaccaagggatgttcaagacagagctctgcaacaagtggcagcagactggggcatgtccgtacggggagcattgccagtttgcccatggcttggacgagctccgacctgtgatcagacatcctcgttacaagactgagatttgcagaatggttctggctggcgatccctgcccttacggccacaggtgccatttccgtcactccctcactgagcaggagaagttgatgctgcctcattgatcaccatggaagtgaaattataccctttagcaggcagattaaggctctcattaatctcatcgtcatccctcccttttagtcttaatatcgaatgataaattgggttataattcattcaataatgctggtcaatctaatgaactgtgatgattggggaatatgtatatagaaacttaatgatcaaactgtgattaaaacaaacgtaagtacagacaatatgatgtggaaggataaaattgtaataaattgataagagagaacaaattaggatgataatatttttgttgaagtggggattctagatatatggagtgcgaacgaaaaagctgaatgttgtttttacatttctaggacatgatggagaaattaatcagaaatattattttgtttttctttctttattttttttt

SEQ ID NO: 184959 - DNA, 4196 bp, Cannabis indica
aaaaacaaaaaacaaaaaataccatgtggtagtcatgtgaatcaatcacgtgagctcactaaaaatgtatatataaaaaagtacacgatctaataaattatttcatgactacaaagtacaaacacaaattcaaaaaccaaaaaaataccttgccatcggccaccctctacgctcaaaataaaatgcatataatgcattaatacaatttatttatttatttttatgagaaactgatctccaagttcagtagataaaaatgtttaaagttacaagatcagaaatacaacggttggaactacttgaattccaaacacattctttatctgttcctaatgttctttttgttaactatgagctaaaacattttggtctctaggaataaaacagataccagtattaggaaaatttgataaaaagaatacaatattgtgaatcaaatctgaaagagaagatctgtttttcacttatgcttaattttgttgactaagacttagcaatctgacatgattaaagctaaataaaacttcactgcaacacaccgattaagagcattggaaagagcttgtgcttctgcataaatggagagaagagcacttggaatagaggaataataaccagccacaacaccccccttactgttttgaaccttagcaccaaaaccaaatctcaatgtatccttgcaagtggctgcatcagtgctaagtttgtaccagccttaaggaggccatggggaagaattagataaagctgaagtagagcttgcagtaggaccagcagcgatacttgcgttttggtgagcatgtgcttttgagtaatcctgcagcaaagagtagaccaacttttccaatggtatgtataatgtatactgtattcctgccaattagtcctgttttgagttcttgaatcttaaatgattggcaacattaagtctgctagggttttcttttgacccattgtagcagccgccgattgttattccggccaattgtcatctgttttgcaattcttatttatttgtgaaatattctctcggtctaatttacataaaattaacaatcattttgttacttgaatgaagtttacttgttaattgaattggtaagttgtatttagtattatttgacaacggattcatactctctctctcactcgccaaaggaaatgaaaggaagggtaagtaagtgagttgagatttggtttccaacaattacaaacaacactcttaactaatttaataaataatcatcatcatcatcataataatgcatatagcataattagaagttgtaataatataaaaatgtattcctaaaatcaaatgtataacataaaagttataataaaaatatagtgattaattctatgttcaagcacacaaatacataaaaatagctaataagtgcacataataataataataattaagtgattaatagaccattggatagtggcgagcatacctacagaagtgaagtgttttagtgggaacacaacgaccaggagaaatgattttactgccacgtgaaattttagcttcataataacgatgccacgctcctaacacacccatcgttacatagtacttatgactacgacattgaaagatttcattcactctcacaatcctctgaaattctagcttctcaccctgcattccattccattcattcattttttaatattaatgtttatatatctacacatacatacataaataaataaataaatttgatgttaatatgtattattgtatttataattcaaacaaagaatgaatgaaaccttgtcgttctcagcgttatattgttggattgcccattttgcaagctcttggatttgggaatcatctaccgaggctggtttgagaagatgacgcttcatatttagtagttcttctggacaaggctctatgtaaaatccctaccattaaacaaaaaaaaaaaaatagcacacaattattagttacttcttcatctcataaattgttgtaaagctagaatttttaagaaatagattgaatgtttccaaccgagatagagctactgtatatatatatatagctcacttaaagcagattgaatgtatagcctacaaacttcaatcaatagaaaatatctattaccttatacattttactactctcctcccatattttatatttaaaaaactattttgagttgtccatccactaattaataaatcccacatcaaactaattcatttgttgaacactacaacacgtgaagaacataattattttattgttttaaaaataattacaccaaaacttaaacactttaacttgacaatacaaaccaaatactctctttttatttactagacactacacttaagattacttgcacactcatgtcaaaaaaaaggttacttgcacactattttgactaattttatgggacactcttagaatttttgttgggacttaattaaaattattacgacaaacttcacttgtacactcaagttatcactaactcaccacataccactaaaggaccaattctcctatttatactactcaaaggtggtggggtggtggattattgtggtagaattttctagcaaattgtcaagttattatagactaaagcttttttgaaacttgttatgaatattaactttatatgattttagatggttttataatattatcaaaatgatgaaaaattatagatacttgtagagaagaaggtgttaaccttttaacatcatcacatacatatcaatcattcattatataaatatatgtactgttctattttataattaactcaaaccatcataagtctatagttttggtggtgatgagtgaatgaatgaatgaaagaagacattatgcatattagattagaatagattactatatatctacctcataaaacttctcttggcggtagtgtttctccagtgcatcctcaagatgagggggcgtgtaatttctaacatacataatcagacatgtacaactaattaataattaaagaaagaaacatacatacatacatataatgatgagtagtagtagaatagatcaaaaaacatagatatagatatagatgtacagaagattgatggatgaattataattagtagtacattacatacccgcagtcaatgaatttgacttctatatttggtgtaggagtaggagtaggattaggatatctagcgtgcataataatcactggacttagtgatctcttcttcttcttcttctttttcttcttctcctcctcatgtgttgttgtttcactagaagacttgttagtagttgcagtagtggaagtctcattgttggtgatcatcaaatcatcaccatcatcattatcattatcatgatgaggaggcttagtaatagtactagttgagatactaatcctcttgttcttcttgtctttcttcttaatcttagtcttagcagctaattgtgattgtgaacaaactcgtaatgaaggaggcgtgagtagttcttgtgttgctccaactctacatctattcttaacctgagacttaataatacttgttctattcatacttttcttgctattattactattactattcatacctgcactgtatacataacaacaattattaaacataaatacacaaacacagatcaaagaatacacaaaaagaaaacctttttttaaacaaacaatataatagtaactaaagggatgagaacgagaaaacaactgtacagaaaacagagctgggtgggggtgggtcggagagtacataatataatttaaatataaacactgtcattgaaatttagattacaaaccgaatcatattcctgaaacattattatatatcttaaaaaactattttaacttttctcctagaagtttgggagaagcaataaacatctttagcttatacagatatctaaaaaaaaaaatcattgtgtaaaaacccaatcaatcaaacagagagagtaaaaagaggaaatactgtgtttgaaatttagaatacaaacttaagcaatattatattcatatcatggcattgggatccaacgataaaccagaccattactattcaacaaaaaagaaatttgtgtatacagcgaaagataaatagaccagacgttgcgaattcatacctgtactgtgagtgaagtttcagacacatcaccaaccccagccctaaacgaaattcctctgaga

SEQ ID NO: 184960 - DNA, 5818 bp, Cannabis indica
aagaagaagaagaagaaagggttggcaatggcttcttcgtcatgatgggttgaggtggttgggaattgggtaatggaagatttatacataaattatgatgagggttgaattgaagctgaaagctaactcaccattatcatcttcctccaatccacacttgggatcaccttccccttcacctcttctcttctctacatttcttcttttccgcgtttcttcttcttcttcttctctgccaatgtcaatagtcaaaggtcaactaaattacaatgggctcttagtgagacatgaagcccatcctacccccttaaaatgggccaagcccactacccttcacctcttatctcatctcatcaaatttacaaaaatacattcaattaaaacaaaattgatatataactaaattaaagaattagaacttctcgttcctaaatttatagttacgggaggttatcatttttctctggttagacccatcaggcttccttaggcattagtgcagcttggtcgagattgtattttgctatttcgattcgatttttactgattcgattaatcttgtctctgtggcatgattttaattgttttagtcttgttgtctttgtaacatgtttttgttttgtttcgttattgattcttctttgttcttcgatgactcgccattaaatcgctgttagtggtcagacggctgattatttaacttgtttttttaattctaatcctaatcgtgttccatcaagagagatatctcaattgaattgcaagctattattttaactgattgcttacataattcatgaaaaaaaacaacaacaattgatatttactacctcataacaattatttttatagtcctaatgtaagatcagtcaaaaatacattttaattatcatgttctttaaagttatttcgtatttcaagcactgatcaagtcaaaatctcatttcaatcgacttgtaagagttatttaggaatgtttgatcaaattagcatttttaatattgttgttcaaagtatattagttcaagattttaggggtctatgctatgaaatgccaaactcaataaatattattccaatcacagcaatatcaccacatgacattaatcttaatggacaaaaaaacaaacaaacaaagcaaattaattgtttattatgtagtcaatcaacttatttacatgaaatatgtgggtgtgtcttgatgatataaacaaagaagcaatgaattccattcaaaaaaccaggaacaattccattttcaatcatttgtgttaaaacttttgaagccatgtcaacatctccctctctgcaaatggcaaccatcacagcattgtaactgcctgcgtcgagcctgcatcctcgtccaaccatgtcttccatcagcctcactgcactatcacttttgccttgcctgcaaaacccgagcacaagcgcattcaatgttgaagaagtgggagaggagcagcagccgcagctaatcatctcgttcatcaactcaaatgcttcccgaacacacccttcttcgcaaaagccatgaatcaactggctgtaaacaacagcacttggagctccaccttcttcaaccatctcatcataaatgatctttgcatcctctactttcttctccttgcacaagtctaaaatcctcaaactcttctcaacaactctaggaaataatttccccatgttggtcaggaactcaagtgcttcatctgtttgattctgtaaatacagaccatatacaatactgttataaggactgattcgaccacactctctgctctcctccattagttgcaggatccgaaatccatcttctgtcctccctaccgagcacaaacctcttatcaatgtatcataagtaacaaaattcctattgaccccatctgtcaccatttcattaaacaagtccagagctgaatccaacatacttatactcacacaaaccagatattaacaaattgtatgtctccacattgggaaggcagcctttagtttcccatctccttaaaaactctatgcccaactctcacttttccaaaggcaacaaacctttaaaacctttaattaaggtgttataagcaacaacatcaactatgcctcccttactcccccatgtctctaaaatctcaacagcctcggatacacggcccgagctgcagagaagttccatcaccttggttacaggaacaatgtccggtacaagtcctgaagagtagcacttgtgcagtagcaccatagcttgtatcaaattttcttcagcacaataagcacaaatgaggacattaaaggtgacatcactaggcttttctatctcattcatcaaactccttgccctgcccactttcccattcttgcatagagcatgaagcaatgtgttgtagatgatggcattgggagtgactcccttggtggatttgatcagttgcagaagcttaaaagcatcagcaattcgattagtggagcagagtcctttcatcaaaatcccaaaggtgtaatcatccccaacaactccagtagccatcatcttcttcctgtaaaactctctagctatgtctatgttgtccttgactagaacattgagaatggagttgtaaatcttgagagaaggctttccatgaaacctggaaacaaagttaaggactttgatgataatttgtggggttgttcgagctctagcaagtcctcgaatgagagtgaggaagatatcttcatcagggggtgagccaatggatgtgggcatttcgtcgagcaggtggtggacagtgtcgaaacggcgaaaagtacagagcttgtgaatcaaagctcggtaagtggattgagaatgggtgaagttggggagtttggatgcccatcggaaggtttggagagcttgggaaggagatggttggtctaggatgaggtgagcaatgtggtggtgggttgggggtggaatggaagatgaagagaaagattgaagacaaagattgagacttttgagggaaagatttggtgggttggggttagatttggatagtatgttctgtatgggcatcgaatgcttagttcttcaaacacaatatctcaacaactgaactctgctcttctcttctcttctctttgtcatttgtttttaaagaatgaaactacaaattactaataaggaaccaattataatgtgccacatgctttgcaaccatgtatgactaccctaatgaattaaccattgacgttttctgtcctaatttgtggacaaatttacggtcctaataaaggacactcaatattgtattttcctttgaaacagtagaaatagcaatgtagtaatgatgtgaagtttattcaaattctgtagatgtaatgatgtgagccttatttagtgcttaactttccttgtttattataatgtgcaggaataatgatggaacacaattctcacatcacacattgatggaaataggagggtgtctttgtctggtttcttaatgatatttatgataatattagctatcattatgcttgtatttatcacaaatggaaattggtcaacaataataacaactcaagtactagttgtaattgctgttctcagtggtaccacctaattatgagattgattattaccatttggtcccacttacatactacaagacaagtgatgaggttctattattggtaaacaactacacatttgttttgtatgatttgaagatttgacaattttgggtgttgcagaaaaattcaagagatgcttgtgtgtcagcagcagccttttgtacgacccaattagttttagtccaagactagttaaatattagtatttgttctgcttggaatttagtattagctagtaataaatttatatatgttcttaactacaacaacttatatataataacacataacatatatgtataatgtgtgatttagtgatgtgacaaaatggaaatgtaaatggtggaccaaatggtgagagcaggagctgccagcaaataggtccagaggaagaggagtgagcattcttcttgggcaacattgaagagttgtgtcatggtactaatattcatggctggaggaagtgtgaactgcagcattaacaggtacagaaacaaagggtctgagggcaacaatccaagttggtttgctcctttaactatcaaaatcccaatcccaggaagtagtatgtaccggctgcaaatcactcctatcaatacctttgcttttatacttgttttgttaccatgaatgaggttccctcctagtaaaagggtgatgcatggttgtgttccatccctgcacatcccacacatgtacacattcacatccaaactaagtcaagtcttaagtcataaacataaaccagattatcagattaccccagcaattgagccgagccttggatcacacgcagcggtgcatttgggccaattatcagatttttgagccacttggttgccccaaacaatagtcccacaaactgaggcagaggcagagacaccccaccattactcaacatacattatcaatttcaacaacattacatatatgtatggcaatgaagaaatgactgaccactgcaatggttgggggtgccaataactcctctcttatcatgtgaagaatttgaccaactctactccctgatgataatgatgatatgtgctctagttcctgtagtgacttaagcaattacaaataaggaaaagaggaaaccaagaaaggggtgacatgacttacagtagttgttgtagtagtgttgatttctgatactataaaatcaagatgatgatgatgatgatcattattatccttgttggtattggtaagaaggtgagtttggtgatctccatctagatctgcattgggtgtctttgtgatctcctcctgttggggctgagcttgagattgggatgcttctagtgctttaaattttatagatgatgttctaataaggtgataagtgtaagtccagatgtaaaacccacctagctgcagagaacttataaatcattatgaattcagatagtaactagtaactagtaactagtaattacatactgccatagagaaggatgcataggagagagcagcagaacggcatttgttggtgtcaccaaatggggttccagtttcgttgcagatagcaggcacaattatgatcaccaggttacccaagttacctattcattcattcattcattcatttggatattatagatattatagatataagagagtttgatttaggtacctgcagagcaagtggctatgatgagaccttcaagatgaggtttaggccttgtaatcttcaccactatccatccaagtatccctcctattacaaaggtaagcaagatattgagtggcataaaccacctgcaccacaccacaccactcttacttttagtctcttactatatatgaacaaacatatttaataacaaaaaacatatgttattatgtatgtctaccatgaaataagatcttcaagagtaatggtctgaactagactggcgaaaatgtaacaaggagagaaaaccacgaacacaagctgcatatccattcacatgatacatatcaaattaatatatgataagtaacatagattgattgattgattgattgattattattacataaaataaaacacagagatatgggctttaataccttgttcaaggaagataacatatgaagaggaagaagattagaatagtgagaagccaagaaagctccaatcaaactcactatcagaacttctaagatgggcatagaggccacttctaacatattccagaaccccatttcctccaacttaaccactaaactctctctctct

SEQ ID NO: 184961 - DNA, 4046 bp, Cannabis indica
gacctggtagtgcgtctaagaagttggcagaggttaacaggtacgtacgtttctttataggtcaatttttattatagtttatcagtttagaatctattgaaggaaaaatacagaaaaggagaagaagagaagagaaatgaatctgaaccaatgaatctcttattcatcaaatgaaacagtacactcgagtagccttttatagctactaaagttagttacagtaccaactaactttaactaccaatgacagttaccaatgacaactaacaatgacagctaagacacaatcaactaacttacttctaactgaaaaacctaaccaattacaactcaacactccccctcaagatgggctatatcctttaagcccaatcttgtctttgaacagattgaattggttagaaaacaatggcttggttaaaatgtcagctaaacaaactaaaataatactgaaaagaattcaaaggaaagctaaaattttcttaatcattggtttaaattcatttctcttttcttcttttcttttttttttatttttcctttaatggattctaaactgatatggtatcagagccacaattgatgtgtgctccttcattgtttttcttcgttgtctattgttcatcttgttattcatggcttaaggagaaagaatgcaaactcaaagttctcgtgaagatggagactcgaatcagttctctattccaacatttagagtctatggtttcctgaggtgttaagtgttaaccgaatagcaagaaaatcccaaattgcaatctcataatattccagattggttaatctgaccaccttggtgacacataaaacagaactaagatgatgtggcaagttttaaagtcaaactgcacaatcttgtataatccaggtttaatgggacacttattatctggtaatccatctaaacgtgccaaatttatcatcattgatttatttttatagctttgctcttgtttccacaatagaaaatttataaatattttcattaagagtgaaataatagagtataacaatctgattaattttgatattaatgattcatgaacgtttgatactaagaaaatattattccatacatgccatagaatttctccatataacatcataataataaatatgggaaaaaggacttatttgacttctagaggcttcatcattgagagaaaaaagaaggagaaaaatggataggccgtacaattacagggtctagtctggaacataacattaacatatgagctttacaaatgtttaagcataaaaatatttcacacgtctactacaatacaagtacctaaaataaccaacaaaactggttgcatggtgtgctcaaaacagcacgcgtagaagtaaccagattttgctgatcttctcactgtgaactgtgaatgaacactttttgttactacagcaactttcttacacaagagagggtattaacaccaatattggatctaaagccgaagaactaatatgacttgtactatttctttggtgagaagcacaagaaccagtaattgatgatgacacaccccttatgctgaaacaacacattatgtgaacatttcatctaatttctgtctgtaaagggccaaagtctgcaacaaaattcaagtagcataaccatcagttgaggaacaaatcgccccgtcttgcagagacacaagagaatgagacaatacgaaaaaaatacacctgacaccaggtagacactagcgaaaaaatagaagaaagtgcagagaaaatgtgaaacaagttgcataccctggtataggcatagacaccggcctcagaaggtgcaactggacttccccttctgatgaatcttccctctttgaaaatgtaaagcattggtattccggttgatagttctaaactaataacctgccaagggatatacagaaaaatgtgttaattatcacggtaatccttgttgctaagacgatcaagagtgttaagaactctggattatcacctcttgggaagttagtttgtcaaggtacataatgatggacctcaatgagttcccatgagcagcaatcatcacattttttccagttagaagttgcggttcaatctgcattaaggtatatcagcaaagcaatcagaaatctataaatttcagaaaatggatttaacacaaatagataggagaaacagatcataggcaattaagttcaagcatacttcttctttgaaataagcaactgctctttcagcacacatttccaagctctcgccatttggaggtggtatgtcgtaactcctacgccactcatgaacttgttccttcccatatctatcagccgtttcctgtttattaagcccctgtaagtccccatacctaagaagaagaagaattattagtatgcagaatttttcaaataataggggcaatgtataaaacgaataatcagaaagataaaggttaacttagtacattctttcattcaattgccaagcttgcacgactggaattgactgctttttggtatcttcactaaaaatttcactccactttcttgcttgctcactctcattatgtataactataggcacctgtagcaaagtaaataataataggtttgaggttagtcttggactaatgacaaagaataaaaagcttcctcaattaacggtggagtcaaagactatgtgttcaactacatatgtagctatgaaattacctttttacgacgatgttgggtcatagcaagcatagcagtcatctgagctcgaattagtgcagatgtatagatcatgtcaataggtatgttactgattcttttgccagcttcaatggcctcttccacaccctttttggtcagtggtacatcgacacaacccgtgaacaagttcttttcgttccacaaggactcgccatgtcgaatcagaatcaaagctgcctcctctggaattttgcattcagacaataaatattactttatggtattttaacacacaaacatgtattatgcatatactatacataaacaaaatgagccaatttaaaatgtgtacaaaaacttatgcagcctaagcaaactcactagatttcttccgaggttcactggtgtttttgtttgaaggagacaaaacttgatcagccacagaagattgagaagcagaggatttaatgaccccaaggtttcttgagaaacatgctcttttcgacagtccaagttcgagcttgaaactctttaggggtaatctcatagcaacatcaccaatctctttacgaatcccaggcttattaatgtgtccatgagattggaaggtcccaatggtttgatgaaatgctgtggtagccattctgagaactgcacaaatgaagttaagcacaataagtttccactactttctttcctttgcaccaaagttattgtgttatgcttcaatttaacataacaattatcatgtcagaaaagaaaaaaaaaacacataacacaattattgattaccattaaccatatcataaaatggatatgagatttaaagtatgaaataattaggttactgggtctactatatcattgtctaaattattttatttataataataataattataataataataataaatagaaagagctacaataaaacaaaaaagggaaaagaaaatgaatttgttttgccaatatcttcaattttaaggcttctaatgcaccttagatcaatacccatattagattacatggagttaaaaacaataaaaaaaaaccaaatagctaattagaaatactgcttattttcatctagatcataggttcattagctctcagaaaaatacaacgcgacgaatgtgtcaggtcaattaactaaaaaaaaaaaaaaagaggaaaaaaataataaagaaaggaaaagttttaagattgtgcaacacataatttgcagatctgcagagaaagaacttctccataatcagaaacccctaaaggctaaaggggtcttgcattttagtttgaagggggtgatcaaaaccatattgaatcaataaaatgaaatcacttatttttattaatttaatg

SEQ ID NO: 184962 - DNA, 1344 bp, Cannabis indica
cttatgatcaatccagaaattatcatagggggttgcgagaaatatttttactgcctttattattttattttattttttttgaagtaacaatacacgaaagctacagagaaagagaattaaattctccaaaccgaatccaaatctagccttaatgcttcccttacataaagagcacatcttggtttccactacgggaaatatgctaaagggtagcattagagaaaagagataaggactcccgaatctgttggacgagactggaaagtgcagagttgtccttccaagaactttagactttagaaactagctgcagacaatctgattcaatgttgccaagagggacacagattgctgaacaacattcaagagtagaaaagagggcctgcgcttaagcaaaaattgaagttgaggctccccatttgcaacttgacagacatgttatcctctagttatgaccgttgataattgaagcaccaaaaccagattttaaaagtttggagttaaaggttgcatctacttttaacttgaaacaggtttgttgttgagaagaaaatcattggatcactacaggggctgaaatacttattttggtcgagttttcacgggtggttgattgggaagtaagcagctgggcttcttgataatcctgtaaaagattcctcacaaaactttctgcatcaagaagattgttagatatgcaattgaaaagcttattatttctcatgttccaaatatatcaggctaaacccaatagtaaccaaaattgatctttgctaagtgtctcccagcctataaggtaaaaattctttatatcatatatgtaatttgcagagaactctttgagtgaagatttcttacaaacagacttagcaagggggcattgaagcagggtatgggaaatggtctcaatttaggatttgcacagagggcagtaggggtgagggagggtttttttatggtggaggttaggagagcatgggaggatatggttgtaggctttctaagtgaagtgcttcatttttggtaaaattttgccattccaaacagatttccaccaagaggtttgacccacggggttagaagaggtggccagagaaaggagtggggtggagttagcaaggtgataggctgaattgactgtgaaaatccctgagtgctgatgaccccaaatgaggctgtcactctaagtaggatcgataggaactttaagaatttcctagacctgggaaaaaggaaggtattgcttgagggtagggatatgccaattgccactgctatccagaaagaagggaactctcaggtttgagggatcaatgttgttaaggaaagagagggaatggagcc

SEQ ID NO: 184963 - DNA, 2163 bp, Cannabis indica
aaaaaaaaaaaaaaagtgtttatgagagattatactaatgattcattgctctcattggtcaagtctttataattgattaatgttgataagattttcaagacgtggttataaaatgtgtaataagaatcctttttgtttaaggatagattcctagaaagagagagagccgttagatgtaggcaccatttgtagctacagattgggtcaaagtcctatgtctacacattgtgctagatagtgctttctagtttatacagtaagatcttagtaatcacattaccaaacaaagacctttgaaaagggtatagtcaaattagagccccaaaaaaatgatgctatcgtgatcaatgagaaagctaatgcaatcttatgtgatttgagaaaacagtctagtcattctcccaaaaagatatgattccccccatgatatatacttcgaaatataaaatcaatatatttttaaacagcgatagctctttctagatagattatatatatatttatagatattgttcaaaggctgaaagtacgctataatagaagttgatcatatatattaagcattgacttattacatgtgattatacaactactatctgtacatagctaacttgaagcctttgatataatattaggagaatattaaatatgtattagtagtagtttttttaatttgcttgtgcatggacaggcggtggatcaaatatgaattctagtgataagagttcatatttgttgcgctgcctgttgttgctcaagtggcttattttaggttaatatgtgtatccataagaaaaatttaccaaataaatttaacccaaaatttttaaagtgaaaaaccttgatatattatatagcatttgaatttaaatctatattgttatataatatatgctgatgaatatgattgtcaacatttctttgttcccctccaaaaatacaaatctttgcctcagatattttggatagaaaaatcaacaaataagaaatgcattatgctgagtgcaagggagctctctataacatgggcaagtcatcctttatattggacttggaaaccaattcctgaatcaaggtctattctcttctcaaatttcttgatcactagaaacatggatctaatctaattaaataataaattagctataaccttttcctttcttttttctacatgaaaataataaaacaaatggaattaacaagaaaaactcaggtttgcagaagtagctgagctcataacaatgtggtggctagaaatttgtggcactgtgaacaccaaaatgctctccccaaacacactttacacagcctatatggttgtgaggttcgcggaccgcgcatacggattagattttctaccttctgaggtttcagttgaagttggtgatttcaaagcagttggcaaagtgaacttgagtcctcaagaaggaagaaggaaacattattttcaacgtgtgcattttctaaaggaaatgggggctttgaggtcaagcttgcttaaagatgaagaaagtatagtctttggtgagggagataatggttggatcaagattgaattgggaagctttttcaatgactgtaatggtgaggagctaaagatcagcctcagggaagtgaagggtcagcaccttagaggaggtttaattgttgagggaattgaaataaggcctaaacatcattgaatgtctccaaaatgttaatttttcgtttttatttttagtgattggcaatttagcttaccagggatgtttgatacattaagctttgaagtattttttggcgatcaaaattgagaaacactatgcatgcctatgtttggaaattggaattttgtagaaaaaaaaaaaaaaaaaagattgggaaggaaactgtgaaaaagaaccaattttcttatgttcggtaaagaggaaaattgcatagtaaaaaaattgattttaaatatttaagtaatttccactataaatattaaaaaaaaaatacaataattatgttgaagttttgccacgtggtagttgttaattggtttaagttattaaatttttaatttttatttaaaaataatttaaatatactaataagaaaatgatcacagggataatgacttgacacttaatggctaggcatttacataaatttaataaacataaccttgatattattatt

SEQ ID NO: 184964 - DNA, 4094 bp, Cannabis indica
aaagttttttatggcattcctcatgactttttcccatatttgtaagttttttttaaaaaatgacatatttagggtaattaagtttttatgccatatatatcaaaacttatccttattttcccatatttttgtaaatagctcttataatttagtgtcgcttttttagttttgggccgtttctatactattatggcttttttaagaaaagaagaaatattgtcagtggtatatttttacgttatttcagtttgttgttgttttctctctttttcattttgtaatgatctcgttcggaataaaaaaaaagaaaaaaaaggtgttttactgtgtttagctttagacaataaagatttttcttttctttttaatgaaaataagtttcctaaattctcaaaaagaccattttttttctaataagttaataaacaaaaactgtacatgttaaacatggtaaatgtatcatgtatagtttttgagttaataagattctgttatgaaaattgcttgtcatattgctacttttctatgctcgcgtccttttatttatttatttatttttgaaaggtatccattttatgattttagatgactagaaaaattactccttatgtataggcataattgtttactattgaagcaacacgcatatatgccaaagtggaccccatgataccaaattgacgtagaaattgtactaatattatacctaatttttcatttttggcaacttggaatacagctttagcactatctttttcgaattgaattaatgcatcagccatattaacgaacagtaacactcaacagacttatcgatcaaggcagaaaacatttaaatctgcagtttatttgccaattttgtgcaaatttatagatgtgccacacgtgctagatagagtacttctagagctaacataaaaatttcaattcaagttggaaaattgagtttaatcaaacttttgtatgtcatgaaaattgagtctttattattgaactgtttaaggcgaccatttcgtctaatcaaagttttgtccgaacacacaatcatgcatgcatggctacattaagctaattaagattacacactttataaatgaatgaatcttatattatattagtaataattacaaggtcaatgcaatattaataattacatacatatagctacaaaagagaacatctggcaatttaaaattattaaagaactatagctcaaattagacatcttgtcaccttaatttaaatcaagcaattagagctagggaaagaaaaaaaaatatgctaaaaaaattggaaaactttcatgaaagcaactattgtcaaaaagatgaaaagtaccatttttttttcttataagaaccatttattattgggtctaaaaagacctttgatgagcaaactaatagcgtgatattctctttaacttttgcttgtcaaatctatttccaccattgttcattgaatccctatagcaagcacaacacacaaaaatggcttgagtggaaattctgaatttgaacgttgaaccaataacgacacacgtaatcttttcactacccactatcgatagaaggataacatcttcttaccatgataagggtattttagtcatatttcttaatattcaaaccttttggatttagtgcttaatcttaattaaacattggttaaatacaacggttatacgaaaacatccaaaactaaaacccgacaacccaaaattcctattttaataactactattcactattttatttttttgcggtaatgctttttgtattaaaagaaaaaaaagattaattagacattaattgaatctgactcgcctgaagatgaggaggaacgtcgtcgtttctggcttgaaatccgtcgtttgatctggtttgataaatatctatctctatcaaattatcttcgtcaacgacgtgaaaatctaagcctctgtgtctcttatcaatgtcgtcgtcccccaaagctatctcaattaaaccatctctgtcttcctcttcccacctgaagcacatatttaccggcgaatcccaaaacccagaggccggatagtctccgtcggacgagtcatcagaatctgaatctggatgataataacgcgaaaacgtatgctccttttcagtacccagaattcgattattctcatccttttggctctcaccttcatcttcttcgtctccttcgtactcttcgtaaatgacctctaatggtcccctcaggttccattgaacgaaagatacttcaaaacatggattcggatcaaaacccatttcggtttcggagtccgtttcggatttgtaatcgacccagttggaatcttcatcttgagaagctgaaaattgaccagggtaatcagacgaatcgctgtctttgttatcgttggtaacaacatcatcatcatcagcaggagtagtaggagtaggagtaggagtaggagtaattgttgtatcattatcatctaattctctttgggtttggaaatggagtttggtttcgtccctcttgtgctcatcttcaaatctctgaacagcaccaagtcgaagaagagtgagaagcaaaaccccagtcaaaatcagaaccggagagaaaacaattctcatgaattggtaaggaacgtagaggaaaatcaaagcgtagagagtaacgatgctcgaaattaaaggatttgaaaacatggtcgatatgtgagcggcccaaaagttcatcattatcatatttaactaaacccggaagccaactaactcaaatcctactaataaggaatcccatagagctaaagtaaaagtgaaggtggagctatagaaagagaagaaaaagtcaataatggaatgaggagacttaaaaaggttggatataaagagagaaggagaggggtttaggcttttaagtagaagtattgatttgcgtgggtgggtttatggggctttggggacttttggggtgcgtaaagaaaagggcataggcaaggcatcaaatattttagggtagagtagtaaatagtgatattattgaaaagaggagaatgtggggcttgaatttgattagttcactacaagtgtggtgatggggcaatggtggtgttgttatggtggtccgttactatacatatatataatgcttttaccaaggtcatcttgttttgtttttgtccccattaaatcaacaatttatccttaaaagatgttttacgttttacccattatattcattcatgaatttaatctctctttatctcagtttattcaagaccctgtcctgattcgaggttcttagctaaatttttataactacacacatttttagatgaagaattttattaagaaggaaaaaaaaagaagacccttctaatctaatgaagaagtatttttgtttcatcaatttcaattttattaacaacactcgagttctcttattgggagcgggaaagttgattattaaactctgtgatcttttgaatagaatagaatttggtaaagacaaacgacacaacacatttccctaaacatatatttaatgagaataattaaattaaaccctttcttcttctgttttacaaagacagccaatttttattatttttcttaaattaaatttaaagataattatataaggcacgtttttttttttaaaaaaaaaaattacatttttacatttattttttatatatatatatattttttacagtttttttataaaaataacactaaaataacaacaaaattatataaaattaacatgaaaataacatttaaataacatcaaagtaacaacaaaaaataacataccgataacaaaaaatcaacaacaaattaacaagagtacaacataaaaaaatcgtattttttataaataaaataaaaaaaaaatacataaaaatatttaaaattccgtaaaattttatttttataattttttttgttatttgtatgtatttgtgaaataatcccttcaattgtgtcaacccaattctagtatagttagtcatgtgaaacagagatgcaaatttagataatatattattaaaatgatatatacaaatattggtgtgttgttgtggataaataagtaaaaattcaaaagattac

SEQ ID NO: 184965 - DNA, 1238 bp, Cannabis indica
aagcttgtgttttggctaaataaatatgagaatttcaacgcttaaaatatgatatttttcgagttgtgtggtttttttacggggagaaagagaatcttggtggcaactattttcttaatattattgtctcctccctttcccttcctccttttatatgtagtcacacccatgtgtaaatcctatttatattatcctatgtataggataatgattaattactaatatagttaaaggtgaatacttgtttaccctttgttgcaacttcaattggataatttgtagtctagaaaatgaattatcttaacattaactatcaaacgattgatgatttccatttgatgttgatttgaggtttcgagcaccacagatttttaggtccagcaatcagggaaatggttttctaacttttctttttcttttgggtggtctccagttcaagtcgtcatcatggggactgaactaactaatgtgaattcagtctgaggacaattaaaataaattgacttgtgcattattatgtctactttgcatatatgtctgtttttttgttacagcttgagatattcacaatagactcatttatgtgtaattcatttggtgtttgagtgtattagagagaaattattgtgcttgagagattagtctctttataaaacttgggtggtgttttcttttttggttaacagggtctccaaggagaatagggccgccggtgttttggacaacttttctgagggagagaagtactctgagcattttctgagaaagtatgttcggaacaagactcctgagatcatgccatccatcaacagcttcttcactgatccaaaccggagctaaatatgacttgaataaaaagcttttatgaggttccttgaaacttaatgtgggttgcaaacaatatgttactatggatgaatatgttaaataatatggtgatgtcctagtgggttcaatagtgtttgtgtaagccaaacttgaattgaaacttgttctttatgctttgaatttgacttgtgttttggtgtttacatctttataaacgttttaagttccattctcatgcctcaactgactggttaaggtcactaacaatgatgacaacgataaccaaaatgacaataaagcatataatattgctttaatattaatatggttcattaacaaggaaatgccaatttggtttgaagtatgagcactttcaagttgatcccaaatttgaattgtttatttaattt

SEQ ID NO: 184966 - DNA, 5372 bp, Cannabis indica
tatatatatatatattttcctgttctgatattataaatagcttgtattgcagcttgatactgatcttttgttttaacagaaacatagaaatagctcgaagttctctttacagggttgggttggagggttttcggagaaaaatgcttctcacccttcaggcagtcagccttcattgaatggaaacaatgtaaattcccgtgacaagagcagatatcatcatcccaaagcagggggaaattttgctttacatagtcggagtactacagattccgttgctgtgttaaataaagacaaacaaaatgcggggcatgttaaggacactgttgttaagcaaaacactgaatgtcccaagtcataccctcacaatgttgcaaattctactggagttaaatatatcgagaaactgcctcaaacagataaacctgatttggttgatgacactaacagtttacgcccagacaatagtggaaagctgcatactgaaaatgcttttggtgttggaatcaagtttggtgctatagaagaagacaatttaatgctttgtatggagcatgaaagtgatcataatttggtctcttgtataaattctcaagaaaacaaattggcatctgcacctgcacctgaagatgccgttgttgaccaaatgcttcctgtagctcctaaagacgaacacctcgaagatgatattaataacttaaaccgaagtatctgctgaaaatgttgaaggatttaccatcaatgaaaatatagatggtctagaaactggtgtttcagattgcaaggatatggatgttacgcttgtcaatgaagctgctagtagttccactggtgtagagatgaaagttcaggatcctatagttacagctgaggtagaggtgaaacttatggatcctattcctaaagatacagctgaggttagtgatggagaaaataccgagacttctaagacagacggtgatttaattaatgcagttatggttgagggccatcctgagttagtcacccctggcaacgatagagctgaactttctgaaaaacaactatcctctacagcatctattgaagacgctggagttgtttgtggtgctacggtacatgaaaacacgtcaaactctcataacatgaatatccttggagaatgtgacacagttgaaagcaaggaaaggtttaggcagcggctttggtgctttttgtttgagaatcttaacagggctgtagatgaactttatctcctctgtgaattagaatgtgatgtggagcagatgaaagaagctgttcttgttcttgaagaggctgcatctgattttaaagatctaaccactagagtggaagagtttgaaaaaatgaagaggtcgtcttctcagttcaataatggagtgccactcaatttaaaaagtgaccatcgtagaccacatgctttgtcgtgggaggtaagcatgttttaccattttattttctgttccatttttctagtctatgaataacaatatggtcactgtcattagaatgaaggcctctctttacaccctaagccatagtgtccaaggattcttttaagagtataccttgttcaattcatcaatctgtctgtggattgaaatattacatatattattattattatttttgttcatttaccttgctctctaatatgaaaaatgttagtctattattattgagtgcaggtaagaagaatgacgacttcagcacaaaaagcagagatactttcttcatctcttgaagcttttaagaaaattcagcgagaaagagctaccttacgtcaaggtagtgatgtaaaatcctccttgcatctccaatctgatgacaaacttaacgagttgtctacatcaagtgatagaatttccaatacgaagaatttgataggggacctgagtacagtacaacagcatactaagttagtctgttccaacaaatcaaactctgtactgaatgggcgtttgtcttctcaggtttcttcttctaacatcattacatcaaaattgccacctagggatagttctgctgcttctggaaagagtaaaagagaacattctgctggatttgaagcagagaaactgcttcctaggaaaactaagataatagcagaaggggtatctgagaaaaattccaaattgacagataattacaagcgacatgtgtctctatctgaacaggacaaggaaaaagaaaggagaaactcagctccttggagatccatggatgcatggaaggagaagaggaactgggaggacatactttcatctccttatcgagtctcttcccgtgtttctcactcaccaggaatgagcaggagaagtgctgagcgcacacgtatgttgcatgataaactaatgtctcctgaaaagaaaaagaaaactgccaaggatctaaagagggaagccgaagaaaagcatgcaagggctttgaagattagaagtgagcttgagaatgagagagttcagaaacttcaacgaacctcagaaaagttaaaccgagtaagtgaatggcaagctgttcgaagcttgaagttacgtgaaggaatgcatgctcgacaacaacgcagtgtatctcggcatgaagcttttctagctcaagttgtgaagagagctggtgatgagagcagcaaagttaatgaagttcggtttattacttctttaaatgaagagaataagaagcttatgttgagacaaaaactacacgattctgagttgaggagagctgagaagcttcaagttatgaaatcaaaacagaaagaggatgtggcaagagaagaggctgttttagaacgtaggaaactaattgaagctgaaaagttacagcgtcttgctgagacacaaaggagaaaggaagaggctcaatttagaagggaagaagaacgtaaggcatcaagtgcagcaagagaggcacgggccttggaacaacttcgtcggagggaagaaagagccaaggctcaacaagaagaagctgagcttcttgcccaaaaattggctgagaaacttagcgaaagtgagcaacgtcgaaagttctacctggagcaaataagagagagagcttcaatggatttcagggatcattctccattattacgccgttctttgaataaggagggtcagggtaaatctacaattactaaccctggtgaagaaaatcagggaagctgtttgtcagggttagtaggttctgcttttgcaacaaataatgtcaccttgcagcattcgatgaagcgaaggattaaaaaaattagacaaagacttatggctctaaagtatgaatttcctgaacctcttgttggtggagaaaatactagtatcgggtatagaacaacagtgggaactgcaagggtgaaaattggaaggtggcttcaagagcttcaaaggcttcgtcaggcaagaaaagaaggagctgcgagtattggattaataacagctgagataattaaggtattcctgtctctcttcaaagactatgtatcagcttctttccagatatctgaaaccccttaattcaagagctgttgtaagctagtgcatgaaattgtagggaagacttatcctaaatattgtttgtctggctgtgttgtattatctgtgtgggagctataaatttgttgcttaattaattaattagtattcacattcacaagtttaagaagtcgcaattcctattttattctcccgagctaaaatcaacttgtttattattaaattttgtttcccccctatttattatgtatttgtgataattgtgtaatatgataagagttatttcttaacctatttctcttttgggaatcagtttgtagagggaaaggatgctgagctacaggcttctcgccaagctggtcttcttgattttgtagcttcggccttgcctgcttctcatacatcaaaacctgaagcctggcaagtgacaatacatctgctaaagcttttgaaggttgttttgttcatggctgcaaacaggagctattttcttgctcagaatctcttacctccaatcatcccaatgctgtcagctgcccttgagaactatataaagattgcagcatctctaaatgttcctggtaatactagcttgccttcaagcaaaacttcagctgaacaatttgaatcaatatctgaagtattggaaggtttcttatggactgtgacaacaataatcggtcacataaattgcgaagaacaacagctgcaaatgcgggatggtttgctagagctattgactgcctaccaagttattcacagactacgtgatctttttgctctttatgatcgaccccaagtggaaggatctcccttcccttcttctattctcttaagcatatatttgttggtggttttgacatccagacctgaaacaaattctgtgattgattgggaatatttaaatactgagacgttattactgaatagaagtcaggagaccaaatttgcagaatctgtggatgctggatttctggtagataactctgagtatcttaggactccattgtctacactgaatgcaagtaaagttgtacatctaccagatgtaccagaagatatgacattagatgaatcatataggataaataaaaatgtgttagaatctactacacgggatactgacaaagagcatactatttcttctgctgaagaaaataaggccatcactgacaacccagattccccagatgaatctgagaaaattcaagttgaagacactattaaatcttttccagtccacagggatgagagaaacttggttgatgttagagtagaacaaaagcttgataatgttctgaacctggagcaacctgtgcagtttcttctttctgccatctcagaaactgggcttgtcagtcttctttctgtcttgacagcggcgttactgcaggcaaacaataggttgtcttctgaacaggtaactacgctaccaggtggaaatacactgcatgcaaataaatgttgaaatctgtggtttgtttaatttttgtggtatctgaaacacttatccacattttgtgtagttgtaggttgtagaaattagagtgtaatgacaattaatcaggaattacctacaaatacaattcacttcactaatggtgtgagtggggaacttggtggataactggatattttaagagatcataaagaacatgaatgcacgtgcgcatagaatcgcacccatcatgtgccactgttgattgtaatttttatgttttatatattattgtcaagtcatttttatgatagcatctttagttttctacatgttaacttgaattttgtgggaggtgaggttgcatcttttacacttatgtcctgtttactcaattttcttattatattgatatttgaagaaacttggtgaggttcttgacctgtcatgtc

SEQ ID NO: 184967 - DNA, 2267 bp, Cannabis indica
tttgatatgcacttgtacactacgttgcacaaagcgatggggcggtagtcgtttacagtagatgggttctccttcttaggaatcagcacaagatttgtatcatttatgaaaggagggactttggacgtctgaaaaaaatgtgtgatcatcttcaagaagtccattcgaatggcctcccaatgcgagcgaaagaaagccacaggaaaaccgtcaggcccaggtgccttgtcaattcccattgaacaaagggcattgaaaatttcttcttccattgggattgaatttagatcactagcactatcaatacagcaatctgatttgagatgaagccactcctcaaactttagcatagtccgcggcttagatatagagaaggtgttggaaaatttctcagtaaagtgttttgcaatatcaggtattggtccagcacattacccgactcatccctcaggatttggatgtaattcctcctccttcgcgttaccgtggacgccataaagaattttgtcgctctgtctccatctttcagccaagtaattctcgatttctgccgccaaaaaatttcctccctcgccagagcttcgtttagtgttttcctggcctccgagtgtgcttcctcattgggggtatgagcctcctcaacatcttttaagtttgcacgggcttcctctatttggacagaaagctttcggaattggagcttattccatttagagagttgatcttttgtatgtttcagctttcggtacatgttcaccattgggtctgagtggttttgtccattccatgcgtttctcaccacccagaaaactctaggatctctttcccacataacctcgtatttgaacttcggtttcgtgcatttcctccctccattcgtatcaagcaagattgggttatgatctgataccgccgcttgcaaatgttgaacaatggcattgggccaattaactctccattcggctgatcccatagctctatcaagcctggctcttttgagggaggtggttgtcgtggttagcgttccttctaaaccaggtgaatcttgtgcctataaaccccaaatcaatgagacccgatcgaagaaccattctccgaagatcgaatgagtatcttgcgatgttattatctttggagtagtttaggcactcattatctttcagcgttccattaagatctcccataatgagcataggcagcgtacattggcatatgaaatcgcccaattcatcccagaaagcttccttctctatagccgtaggtggcccataggtcccaataagaagccaaggtcgatcgggggggtcagagttaatccgagcaacgattttgtttttattcgcttgttcaacagagcacaacacaccaactttccaacaaagagcaagtccccctgctgatcccatcggaggtacataatagaattccttgaaatgaagcttggacattagacttttgaatttttcctgagataatctaacttctgataagattataatttcgggatccgacttccggattaaatccttcagttgtcgaactgtcgctacattcccgagtccgcgacagttccaagccaaagccttcattgggattccggggacttttccgggcaagtccccatagccccaaactgaaaaacctgcttgggtgcaacattatgttcttcatgaatttccacaatggagcatgatacctttggtttgtgagttttttcaacgatgacgaagtgattgtccaaatcgacttttaaatcaatcgccttggtatcccagtgggtgcgaatagtagtctgtctttgcttcaatttgctctttgccttcttcttcgttgaatacgacgctacattttggttaagggcggacttagatggtctgccccttcgtcttgggtgttgagtttgtccctcaatgatacaattattcactcccttactcgttggagaggctgccggtctgcctcttcttcttctcgatattcctggttcagaggatcctggagaataggcttgggttgatggagtggataaggcctcatggttctgtatagcagtagattcacttaaggtctttggaaagctatgaacttctgtcactattactttgccctttcctttgtctcctacagttggacttgtgaattcattgggccttggatgaatgattatcccatcaagagccttgcgttttttaggcccattctcatactccattgacctgaaatcctctatatcaattaaaggattgaatatagaaggttccctcatg

SEQ ID NO: 184968 - DNA, 6100 bp, Cannabis indica
tatgacaaaactgattatgttttctatatctgttcggactaggaattatcttcaaactagtaatattaaaaaaagttatcgaatattgagttagcgttctattttgtactattttgcaacatacagagcctcttttattattgtttaataaaataaaagatcttcttgtaaaacacaaactctaaaatagtattgatcctattatatatgagaattgctattacacattagacactgatagtgtccaatattgatactttacaagtggttagcagttttttataataccgatctttgtcttgtacatacacatgaatatataatgatatatatatatatgatataatgagagttgtctatttgtataaggacaaagtaagtgattaatgagagttttggcttgttgcaatattaccccatcttgtgaactttcaacagtgttatatatgtattcctattaccctatgcattgtatatatatacatcactctattattaaataatgaccaaaagcaggctctacatgtttctttctttctaacttttgtacccttttctttctttgtttttatttataattatttctaagtcaatagcttgtgtgtaaggaaagattcctaattattgagtattaattggtcatcacaaatggccaatagctagaattttctttgaatattttcttttgggaaagggttatgaatggggccatctcttttttgttatgtccaaggaatgaaatatccatattttctatcgatatttctaaactattgacaccagattcatttggtttggtttcaaataatttgatctaattgtggtttatatgaaccgcccctttcgaaatatccatgatattttttaaatatcattggatatttcttatttttaaggctcaatattattgagattaagattgtttaattaataattttgaacttgttagaagttgtaacactttattcatttgtgaaatatgttaataaaaagttaaattagtatgatctcatgtaattatttcaactaattttctatgttaaattatgaaaataagcaagttttcatattaatttacacagaaagttaattggagcaagatattacctcaaaggtttcgagcaatattatggccgtcttaacacatcagaagactaccgttcgcctcgtgacaaagatggtcacggtactcacactgcttccaccgtggcaggccgaactgtacacggtgcctctgctctcggtggctttgccaatggcacagcctctgggggtgcaccattagctcggttagccatctacaaggtatgttgggcgatacccgggaaacaaaaggctgtaggcaacacatgttttatggaagacatgcttgcagctatggacgacgccattgcagatggcgtccacttgatgagtatctcaatagggacgacgaaacctgttaactatagcgatgatggcattgctattggagcattgcatgctgccaagaaaaacattactgtggtttgtagcgctgggaatagtggccctggaccgggcactctgtctaaccctgcgccgtggatactcactgttggggcgagcagcgttgatagggagtttcgcgcacctgttgtgcttggaaatggacagagaattatggtgagcataatgaaaaataacaatagcctacatagtgatgcaaatacatatcatgttatttgactagtttattataatcttgatcatgattagggagaaactgttacaccaagtaagttgagaaggaagttgtaccctttggcatatgctgcagatttggccaaaccgggtgtctcaagaacgaatgcatcgtaagaaacatgactattgctttccaattggttgtttttgcgttagttgctacttcatcaatcttactgattagttaactcgttgtatttgtttccccttatggttgcgttaatctttctggttggtatccttaattctcttatctctagaacctggttcccgaaatggaaaaataaaagaatgcatcataagattatgacaaacctgataaattgtgttgcagactttgtcttgagaactctctttcacctgaaaaggctaaaggaaagatcatattatgcaatagaggaaacaactcaagagttggaaaaggcaaagtagtgaagcaagccggtggagttggttacatattgggaaatgataaggcgagtggaggcgaggtaccttgcgatgctcacttccttccggcgacagcattgacttacaacaatgccatgaaagttctcaagtacatcatgtcaacaaagaatccaagagcatatatcatgccagcaaggactgtgttacataccaaaccagcaccttctgttgccggcttctctagcaggggtccaaatgttatagagccgaatattctcaaggtactctaaacttcttctctatttatcgcctttgtgagaatttcgggttctaattgtttgtttttgatctttggcagccggacataacagctccgggattgaatatcttggcagcatggagtggtggagattctccttctaagttttcgagcgatatagatccccgaattgtcaagtataacatactttcgggaacttcaatgtcttgtcctcatgttgcagcagctgtagcacttcttaaggccattcatccaacttggagcagtgcagccataagatctgctctcatgaccacaggtgatttttaacccagcttgtaaaaatccatattaggagagaatcaacatactaaattagcatatatcttagatgggcatttcagataattaccaagaaaatacttgtaccaattgaaagtatgttagtcttagaactaaactagtccttatagtagtgttttgagaagctatttttaaaattaaaataatttattaatagttatccaaacagcaaagtaagtcgatacttctaactataagcaaaagtagaagtttaaccaaacagggtcttaatctaacctcgttttgttccatgtcaacatttcagctggcctgacgaacaacatgggcgaagggttaagcgacgagactggtggtttagcaaactccttctcctatggcgctggttatttccgtccagccaaggcagcagatcccggccttgtctacgatgcttcttacgtagactatcttctccacttctgcaattctggactccaaggtgctgacaaatcattcaagtgcccaccaaacgcgccctcagcaatggaactcaactatccttccttgtctatctctaaacttgttaaaacaatcactgtcaaaagaactgtcaccaatgtgggcaatgccaagagcgtttacttcttcgaatcgaaacctccattgggtatctcggttgaagcttccccgagtctcttgtcctttactcacgtcggtcagaagaagagcttcacattgacagttaaagcaaggagtgagttacttgaaaacaaaaacagcactaaagagtacagtttcgggtggtattcttggctcgacggaaaccatgttgttcgaagtccaattgcagtctctttagcttagttgctttctctctttcaagtttcctcaacttagttagataatagggacatagtgaaacaataccaaactaaatttccctgtacaaattgtcagggaatattgattatcatccttgccattatactggacaaaaaacacaataagttagtctaccaaatataagtttatcagaaaagcattgatcagcagcaaagcagttttaagatttagtataaggaatgaaaataaagtaatcttattgatcacaatggaaaaaatcctattataaaatcaattacataagagttctattactatttgtacatggctcaagtgtgttgagaggcctatatgtcaaaactagtgtgtgatcgcaattaggggtggcaattcaggtaacgacacacaggtttgacacgaacatgactcgagattttatgttaactattattcaaaataaatttaagaactccacatgaaacaataacactataaacaacaatgtagtgtaaaacctcatgagccatgttcaatttaagatctcaacacaatacaatacgctaaacacgaattaccactcttaatctcaattactagtgttgagcttataaaagagatcaaactgaaaattggaaagaaccacaagtttttcctaagcaatccctcaactttcatcgtcttcttcttcagaagatgcgtcccttcgcaccctaattcgttcgcccttgaagtgaatgtacttccatttgcatccatattttcttacaagaaggtttttcttctcttcttggcctaattcctgaaaagcataagccactcttctcacagtatcatcatccggtcttacacgcagttcctccatgtctgcgaatacctgattttcttgaaaatgaaaacataagattgagaactatcgctgtctaattatctacaaataatttatcttacctctattatcttatctttcatgccatgatgatcatacaaagaaatcattctagaaaacaattgcttcgagatagaacgtttatgagtatgcaaaatcatgttccatagtgcttcagcttcatcaactctctgatccatatcgaacgctagtagaagagcgtcgtatgtccccattgtcgctccttgacctttgctcaacatccattttgctacctaagaaacacaaacattagcaaccaccaaaatgttgtaataattggatcacacaaagatgtcatacttggattacgcgtttccattgactcctctttcgtaaaattctcaaagccttagctgctgcaatcacaggaaactcagtttcccaagctatccatttgtttaatgctccatacacagcctctttctcattaggaagatcagatatctgccattttcgggtttcccaacattgtaaaaacaatcaagaaaagaagaaatctagagcttcatttttttgttcaaacaatacacaatcttatacaaagagaagatgcttgaaaactcactattctaataagattgagtgccttctgccccgaaccagcggaatctcttttcttccataagtgatgctctctcttccctgctttcttgactgttttcctcctataatcatgtcaaaacttttacaatcttcaaaccattatcacaaattaacacagaacaatatgcctcaagagaaataaccgacttttcaattgtgtttgagctggtttgtggctctccactaagcttgctagacctctttcgataggaagagttcatcaccaactttccatgagaagggtttgcctaaaagggatgaaaaaaccaaaattagttttactctctaccaagttcaacatttttcgtgtaataaaactcattgtttggtttttactcacctttgcagcaaagataagaaacccgattttcttctgggacttagaaattttgcagcttgatgagtaaagatgacacccaattgagtaaccagaacttaaaagcattgcattctccattgtttctcagatttcataagcaaatcggaacaagaaaaaacaacaacctagcattataaaacaagtatttagtttgaatttaaacactaaaaacatgtcttcgaaaatcaagcataccaaatcactgtctatgcatgttgtgtgtgatcagcaatcgaagtccttagtacctatgacattttgggttgctcgaatcacaacgagaccatacagccttgaccagtcctaattcaaaaacagggaagaagaaggtgaataatagcaaagtaagcattccatatatcattgtaaaagtcgaatatctacagtccttcctaataagtacttaatttatgaacaacattaatactactagtactaccaacatcattttcaaagttcttgcatgattgttctctcccacatcgctttatcgctcgtctgagtgattttgtgggatttatattacacttcatcgctcatgtgagtgatttaatcaattaaaaataagttttagaaaatgtttactggaaaatagctctaaattcaaaaaggtgaatcaaaacccactataagttcatccagaaagaaa

SEQ ID NO: 184969 - DNA, 7666 bp, Cannabis indica
ctttcagtttaagatttcattatcccttcccttcagctaaaaatactttctttctttctttttctcaattaacaacacaattgtgttacttcttccaaatcttgataaggaaaaagttttatagtcagtcaagaatggcatctaccaagaagttttcttcttcttcttcttcttcttcttcttgttcatcgaattggacagctgagaagaacaagttgtttgaaaatgctctggcaatttatgataaggaaacacctgatcgttggaataagatagctaagattgttggagggacaactgaagaggaagtaaagagacaatatgagatccttaaagaagacataaaccgcattgagtcaggcaaatttcccatacctcagtataggaaatgtagaagaagtagcaacattagcaatgaagaacaaaggttagtattattattatatcttcatctcatcttcaaatgtatatatatatataacttacacttcacttcattttgttttaaaccatctaatcacctaagacaaactaagaaaatcatactataaaaagctgtaatcacaatgccatatggccaacacccagataaaccttttaactttgctcagttcagtccctgaaccaaaccagtagaatctaaaaacactggcaggcaattttgttctacatggtctagaatgtgtaaaagattgcttatctcatctttatatctttctctttcaacatagttctcagattcattcagatcattccaaaaattagataaacactcaatttaacaatgcatatatgtgtgtatactgacttttcaaatggtgttctactctacaggctgaagaacttaaagctctaaatcccaatgaagaatggcattcactaagcagtagagacaactcaagaaccccacactttctctgaaagcagcagatctagcaattaacaactgaaccagtaactgtcaacgattcacttttgtattcctccatatatttatctatttcttaattcaacaaactctcttcagtaattgcacaaatatgaagcaagaaaaataatcatctagtgttctttctttctttctcttttcttttttaatttccttgtcatattgtatgtcatattcactctgttacttcttaatctattaaaactaagaccatgataccataaagacctccccaaaagatatttttaagaaaaaaggtgaaaccttcaaaattgatagaaaatggtcatcttccatctgtgtaatgcataataactttatatgacaatttattgtgttatcttatcatggtccctacagtcttatgagacagaaaactcagttaaatcgaatatctgacctcattgtaatagttacctaaaagtttacaaacagaacaacattgctacaagacacaagatttttatgttaatttttttttgtcaagtgctggaaattaccctttagcattttccattttcagatatagtttaatagatgatttttaaagtaaaatctcaaatggtaataatagaaaagatataaaaagagtacatgaaaaaagtttggtgtttttttctgctttaagaatctaaatttgatctctgtccaaaaaaaaaagaagaaaaaaaaggactaaatttgatcacatgaatacctaatcctcaaccaaggttgtctgaagaggcagtgaaacttcaccttcttcaatccgaccaccattgttgtttcctttcacaacctttgaagttttaaacaactgtttttccatgtgtaaagtaacagaatcaattccaagaatacaaaacccacaaaaaatgattactgataaagattccagtggcactactactaaccttccgaatcgtgtctttgaagcaagttctgtgttcattagccgaagcttgaataaactcatgaaaatgatcccttaaatcagaaacaaagcttccacttccgaaattcttcttccttcgacaagaactatgttcaccatcgtccttttgagacgccattttcgttaaacttcaaattcagaaaagggacaaaggcaaaggaggcagtgataagaaccctaaaaacgtcgtcgtttttaggtaattacataattcatttattatttattaatttactttaaagggtcgacatttaaatacctctctggccaaaagatttgattttttttcccttcttcctgttatttgggcaataacgaaaggtggtccaaatcgaaagctttcatatctttatcttctcatctctgagacagagtagaataacgtgaaacgacggtgaagaaagatgtcgttccaggttcgttgcataatactattataactctctctgaagctgcattacccatttaagctctattttgtaaaagcccagatcgtaattctaaaaaaaatggtgccccagttttaaagttttgatttttggtgatagataatactgggttcggcttcaatggctcggcgacgacttcttactgaaatgggatatgagtttactatactggtacagtgtttgtatagaatagtaattgtataatgatttctttttcttgtttggtgtgttagattgaattcatggctatatttatatatatttatttatatatatatatatatatatatttggttttgttgtggtttagactgcagacatagatgagaggagtataaggaaagaaacgccagaagaattggtagtggctttggctgaggcaaaagtaggtcttgttctttgttctgttgttcttcaaagctatatattttgtacaactttcttggattagagaaatgcattgtgaattagtggttggttcaattggtcattagttttgttcattattattttctctagttaaagtattgtgaaacctataaacttcattcattcatggctacttgttttatttttctcaggcagatgccataatatcaagactcaaaagtacaggtcaattggaagaagtttctcaggaaagactcttaattactgcagacacagtatgcatcaattcatgtttgcccttagctttccttttagctattcttaactccctaattttaacattttagtgagctactgtgtccctaagcatgaaaatcatgttgttttaatttaagaaaaaaatagcatacgagtgccataatttctgctacattatcctcatacgactctgctcttagacaaagtattcttggatataaaagttgtcaatagagcactcctagccccagtttttattaatagaaatagttatcaatccaacctctttttgtcctctcagttatcacttactgtatttagcctaatccatcaagtttggtatgcttgtcacttcttaaatgtattagtgttaaaatgccgtcaatggtgaaaagttaccaatgcctgttgttttctagtgatatgtttcttgtttcacttgtagatctttttaaaagatgtgtttcttactgcatcgtctaattgattttgaggtggtggtatcttatggacaaattagagaaaaaccgtccagcaaggaagaagcacggagcttcatcaaaggttttttttttaccaaattaaaattcttacctttcttttgcaagaattagcttatgtagcgagtgaatccatctgaaattgcaggctattctggtagtcaagcagcagttgtaggatctgttcttgtaaccaaccttaaaactggaaaaagaagaggaggatgggagcgagcagaggtactgcttttattactctctcgctaactcgtagttttagccttgccaaaaagtgagagcaatggctaaattgagtatttgcaacaggtcaaaatcatgtatgttgtcttactctgcatactaacttgtctgatgcaatctaaatcgtttttatagtatagaaatatttgacatgaaagataattgattaggattatagttatagagattgagtattcaaattcttaacggctgaaatggactgttttaagtgagctatgctaatagtcctaaggtgttagttaaaggaagagtttaggggtgagttagtttaaatgtctagttaattgtaagggataggaattaatttgtactggttagtgttaaatttactcagggaggtatccaagtatcatgaaaagcttagaaaatttgtaattctttctttgatatcaataaatgcctattctttaattctttcaacaactaaattggatcaatagtgtatcaatctactaacatattacttattagtttaatgcctgattagactaaagattgtgctaagcttaattcttgtcaagctcaaaaataccttatcttgctttcttggttgattcttagtgtaaatgggagaaattatacaagttgatgtatgtatacacaggtttatttccatgacataccagaggacattattgacagcctggtaaatttcctaaacattacaatctcttgagatgttctttctcttttcttctcaaaaagcggtttgtttttgagttgttggtcaggttgaagaggcagtcacactcaatgttgctgggggcttgacactggaaaatcccctgatactgcgttttgtagatgcagtggttagctcgccatcactttccgtgctcgctatgagagtttagtctttcaacttagtaattaatcttataaacagtgattttatctgtaacaggttggaacaagtgatgcagttatgggactacctaaagctcttacagaaaagctcattcacgaagcactctagtgtggttacaggtacgagttacggaattcgtattagaactgaacttaaattggattattgtttcgactgaaggttatatgataatgtgaagttgtacttgaaagtttggacattggctaacttgttactgttacccccaacaatgtcatcatatttttttttgacaattataatgattgtgattgtgattgtttggctaacttcaaagaacgtgattacaactatacacacaccaaatcatacctaatgtccttaaaaatgaaaaactttccaaattatcaacaaccttaaagaagctgaaagcaactggtgatctcttctaactctaagtctcaatggtaaaagtgtaactaaattatcagtatcgaattttttgaccatctatttaatagtgttaccttatcatttattagttgctcgaccaacttggtaaattttccgtgatactttctactgagtgtttttttttttgcggtggtgttcagttcatcaattcttggaagattattatgaacaaaagaacatattttgctgtgaagattatcttattaatatgtatgagtgttcccacttttattagaattccaacataaaacttatggcagtaagagagtaaaaaatgtgttaaagtactgaaagtgtaacatttttattcaaccgtcttttagtattaatatttagcggcttgtttggtatataagagtcgtattttatcaaataataaaaaatattatgtttggataaaattttgtattgtattaattattacgactataaattttaatacaatgagaatatattatttaatacataacaaataattagtattagtttgtattataatatttagaaagggtttggggttggagatagaaattccttacccagaccctagacccagattctggacgcggacttgcactgaaattggactcgaaccccaaccataaacctggactttggacccagaccaggccttagacctagatttcggactcgcactcacactcgggcattggaaccggcccctggctgttgacacaatcatgtactcggacttcagtcctagtcccaaaccacgactcagacaccaaccctgaacctcagccttgaccctagaccacggacccgaccttagggttcgaggtcagaatctaggaatggggtccgggtctaggatcaagattgatgtttgggttgagtttatagattgtataattttacataaattattaatacatgtaccaaacatattattgtggtaaacaatactcatacaattcaatataatactatgcaatacaatacaacaaagtgtaccaaaagagtacagtaattttagatttcttttcataaatagcaggtcccaagttcgaatcctttagaagcattaaaatccaagtaggctttgttggcaacctatttcttcattagaaatcaattaaagaagaggtgagatttgattgtcttggttttcaaatctcatagaacatccaagagaagctgattggtacttctataacatttcaaaggaagagcatattcaaaataggtaggagtacgtccacaacaatgaccactagtctctacccaaaatattaaactccaatcacaatctttattcttaacccaaatgtcaaaaagacaaggaagttaccaagctttgatgagtacacgactaaccacataaacactggacagccttggaattccacatccacaggtccaaacacataagttgttagttgtgtcctcaaatggcaaagcagaagtgtgtttttctgtctgaagatcataacagaaaataaagcttttatggccatgaataaggtccaatcttgggcttactttccaaatttccaatacaaacgattctcaacaaagacgtgtcctacaacataaagaacatgtcatgtcaatctcatcacgaatctttattgtgtaagttaatagcatatagtcatctgttagaggatcctaaccaaatccaatgacagtttggtgttgatttattataagataatttggtgtattttttggtacatgggttccaaattgaaggaccattattattagttacaatgaggcatattacaacaacccaacatttgtgagccaacaatagagagattagttaagtgattcgagattgagccagaacaagtgtttttggttattaatgaagagtccttgcttatttgacttgagttgcatcttatcttgatgaaatatggaccgtcggtttgtttgggccattaacggagcaagtcaataacagttagggtagactcgccaatggtggtcttgttatcttcattgattcatttatacatgttctcgggttagaaattattttatgttgcacaccaaaaaaaatagagtatagaatttttttttagtaagatgttctatcaaattttgagaaatttaaaagattttttttaaaaaaaaagatttgaacatgcttctcttttatatgtgtgaaataatctttgaacattgccttataataaattatttcgaatttgtcgaaaaaaatagaatatcttaaataattaaaggatatatatacacaaattaaactatttttttaataccaaaatagtatagttactgaattttattcctatgttatatttagagtgttttttctcatggtaacatttatatatagaataggaatatcctaatttatagtgtttttgaatttaaatttttatttttcaaggaaagattttataaaaaaaaaaaggaaagattttatatttaaatatcgatgagtgtttatctttttattattattacttttttttttaacataggacggcttcgttagtactcctatttaaatggtaaaaatatctattgatttaattaaacagtttctttatacttttataagaaatatattaattttttttttta

SEQ ID NO: 184970 - DNA, 586 bp, Cannabis indica
ttttgttttgttatatatctaaaaaaaaatgtcaacaagtgaagccaaagctcctattagtacttttcaaagatcatcatcagttagaccacttgataatgatggtgattattctaacaaactcgatgttaagggtttggttaagatatacgagattacaccaagtactgtacaaatggaacctaaccatatttcgcaatgtgataagagtttaatacaatccgagttgaaaagtttgaacaaagctcatgactctatgccctcatcatcatcatcatcatcatcatttataatagcctcgttacttccattccacacaatcccagtgtgtggtaggtattcatcaactgatcagacaatgtctacaatccatccaccagaaactcattcgacggtggagaaagcatcaagacaattcattcattgtaagaaaatttattgtggtgtcgaacattatgatcatattaaaaataatggatcttacatattttatttttgattaaagtaggtgatattgttactaatggtctttaacaattttttttagaattaatttttcactttaatatgaaatttttcttttttt

SEQ ID NO: 184971 - DNA, 2103 bp, Cannabis indica
atcccatctgttcttctttttgtaaccttctcctactctaaagacaacagtacgaggtgaagttatgagacagtatattttccatttgaatcaaaaagtctacataatttaagtaagccttattaacatctgcattactagttttgacttttgatggaccaaactcttatttacaagtgatgaaaattattttctgttctgttttttgcttctgaaaatgaaaacctgaatacttcacaataatgccaaagatgctatgaatgatctttcacaaaacaaagtgaattcctttttcttgttctatctgtatgacatccgacgtgttgggatcacatacaaacgggatatcactgattccaccaaagaagaacccgccatactcatcatcatcactgctgcagccaccctgcagctggttcttcggctcatctccatctgtttcgtactctgagacatttgagttcttctccaccaattctctaaacatcgaagattgaagaaggaggccaagagcagaaggagaagacttgctgcgagtcatactactgccaattagagggcttttggtttggcaaactagttgctgtttcggtggagttagagagtacttattcaagtaatcattattagacttcatgtaatcttgatctgttggtgtattgtagttggctgtggattggagtgtttgaggttctgttataacctcgggtaaagattcacaaccgctaaccgggttggtggctgcttcgggcttcaaccatcttatgtaagtgctcaaatcgaagtttgtcactgcattgattcctctgtactctatggctgctatgtcataagcgcgagcagcttcttcttgggtacctatgatcagcaagagctaaggcacttaacaaaatatttcatattagatagtatgatatacagtatgaagatttgtacaacaacttactgtatgtgccaagatacaggtacttgtttccaaaaactcttcctattcttgcttcccatctaccattatgatggtgcctgcatacaacaattatcaaaaatatatttgagaatttgttttattatatggttgatactattttaaatcccgtgttttataaaagttatcaatttgactttctgttttattacatggcaattcagactttgtatttttcaaaattgtataaaatagtacctgagcaaaaactaattacattttttgaatttgttcatagaagaatctgactttagcttggttatattaaaacaaatatcaaaattgagcttagagtattttttgtactatttttgaaaatacaatatttaatgtcatttaacaaaacagagtttgatcgataatttttacaaaacagacaatccaaaataatatttatcatttattaaatagcatcgagtcgtgataatcaccttgcgactcccctgtacttggatacacctcttgaaaaaccactgctctttctgcaacaccagaaagaagtaactttttagtaagaaaaatggccaaaactatttgagttatttgagtaacaagataacctttatacaaacaagtaccttcttaaagtggctaaatactcctctttggtcacagttaccattatctcaatctccttttcataatctgatatctgtaaaaacagcatcaccaccaaccaaagaattctcattatattactatgttcataaatttagataacacataatgaacataaaaaaaaaaaaaccatttccatacagggaaattggtgaaagtagatgtcccccagtacttaagtgcagctaaatcatatgctcttgctgcagattcttcttcatcataagctcctgaagtataaacaagaacacttagtatcatcaggtcggtcctaaagtatataagaattaaaataaaattaaattttaaggccctatataaatttcaataaatgtttggaattgatcctttaatctctttatttgtcgtattttcttattatttaatattttataattattttttttttttcacaatttcgagaccctgagtgtgaggaggtgcacaccagactcgcttcacctcaaagctggcctaggctggccttgagtatctgataa

SEQ ID NO: 184972 - DNA, 6020 bp, Cannabis indica
tttttattaaaatactttctaatataatccttatgtatagaaatcaatatgtataacaatgaaatttactcttttattgtactatatatataatcacatctaaagagcacatcaatataaccgcaatggctaaaaaaaattctcaaagattaaactttcaaatcctatttcaaaaattaaaagataaaaatgcattaactaattaaaaaaaaaattaaacatgcatatattgcacttaattaaatttaattaaaaaaattaattatgtgtgtattgcactaacatcaccctaacagccaaaagccaaaaaccgatcagaaacgaaattgattaaatagttttaccttattcagttttaatcaaatatatccaatacccacaagtataatgtacactgcaaagagagtccaaaatcaagggaaatctcaatcgaattaaaccctgttgtataggaaacgaatgcatagaaattttcataaaatatggtcctctaaaagtctggtgaaagaaaaaatatatttctctctgaagcaatagtagaaatgaactttcctttttcctttttctaaatttaaattaatgtgaaataatctgattctgtaacaaaaccgtaagacctagtaacagataaattatatgaacaagatcacttcacttgtatactcaaaaccaccgaaatccgacccaacttcatggagattatcaccaacaccgaaaaatctccagtacattagagggtcttgtattgattctttcttaatgtctcaccatccagaatgaatcaagcggtactctttttatcacccaccaccgctaacaagttttctctgccatttattgtaacaattacatgtacaatatcagaacatgacaccaacttttattcgcctccttaaatatctagctgatgagcaccaatcatgttcgcagaattctgtataagttccttccggtaatcgacctagcaaaagaaataaacaatatagcattcgtcgtcatcaccgtacaagttaagaaaccagatttattcttgaatgcataaacagccttctagcagaaccgatggactcaatttttctcatgtagcataatttgtggtaacttgacattaaagttgcaatggctcaaaccacattctaatactctaataaacctattggcctatggcacaagaaaagagaaattatatacagatgatcgccaccagtcgagtaaaaagtgagctgctacatttataatttataaacaatttgagcgagttcaagggcatcagaaaacttacccgagcacccatgagagaagagaaaaccatatttgcttctgcagcatcctcaatcatcaactgcttaagcatcctacgctctggatccatagtagtctcccatagttgaagaggcatcatttcacccagtcctggattgaaccaagaaattaaacatatcattagatgaaaggctgtactgtacagtgaaaatatattctaagcccactcaatacatggattcattataactgagatatactttgaaaaggcttacctttgaacctctgaatattgtatgatgcatttgatgggaaggagcgctgaacctttttaagctcagcatcatcatagcaatagtacacttgtttgcccctctcaacctgatgatttcagaaaatgcaaaaatttaattcgactaaatacacaagatgctctctttgatttcatcatagctatgggcaaaccttgaataggggtggtacaccaacatatatacaaccttcgtcaaacaacgctttctgtaagcaaaaacagtatcaaatcaaaactggattaatctaatttactttctccagtttgtctgtatatgttacaataaaaccaaaatttcacaaaaagctgatcaactcctacctgatatctgaagaaaaatgtcaatagcagagtccgaatgtgagcaccatcaacatcagcatctgttaagatgataatcttatgatatcgtagagcctcctttttaaaatcctctccctgaagcaaggagaagcatatcatacctgaataatcatttagagagttccttgcagaaggaaaaaaaacaagctttcagaaattagagaaatgtaatctttgacagaccttcactccaagtccaagaccaagaattagattttgaatctcttcatttttgtacattgccgcttcatcttttctttcaatattcaatattttacccctgagagggagaatcgcctgccagcaaagattttatgatcaatagtttacaatcatattaaggaataactttttccatcatatttttgcttccaaattaaaatattttcacagcataaacagctagaacacagtacaaatatctaattggtcgataatagagagaagaaaaatcacaactagttgaattcacctgaaagcgcctatcacgaccttgttttgcacttccgccagctgagtccccttcaactataaagatttctgggaaaatgggaatgtgaagaaattgtagatgcatagatcaattaattccagaacttcccaaaatgactcataagatcctattatggtgaaacatggtccatgactcttacaacggagcggaaatagcatactgtgaaaaaactacacaaaccataggaatagccttatctcttaaagcttagtacaaccaacaatatgtatacataaaatgctagctttagttctctttaggaagtgatttttttaaaaaaaagatgtgatttttgtaaaaaagatgtacaacttaccagcttcttcaggatttgttgatgaacaatcagctaattttcctggaagagatgatgatcgtaacacacttttttgtctcactagttctctagctctctttgctgccaaagcagcctaaaaaaagagagtggaggtgcaacattagagaaacaaaactaacatgaaaaaatatattataacttctaagattgtttatatttctctatttggattcttttctcaaaattcacatttctgattgtaagatgtcagacatacatagtatttgaagtagaaagcttaagttatgtatcaatcaaggaatagattgcatagcgtaagccagaaaagaataccttgagagcatttagagacttggaaagaattgaatcaagcacatcaggatgcaactccaagaactcagtaagatactcctgaacagcttgatcaaccaccctcctcacttctggatttcccaatcttgtcttttttcgacaaatataagtataaaagtaaataacaaaagtaccacaaaaaaaataccatcaataagaattagaggaacagcaaaaagaaaagtagaagcaccttggtttggccttcaaactctgggtttggaaccttgactgagataacgcatgtcaatccctctcttacatgctcaccgctcaaagtaatatctttttcctgattaaaatgaataacatcaacatggaatatgattcttttctatgtgatttacagttcagtctcaatgctccataccatgtaaatgctaggaatttgtaaccaaaatacatggtgaactagaaaggacacaccttaatgatttttgatttcttgcctaggttattgagagttcttgttaatgaagccttcataccatctatatgtgtgccaccatcaaccgtgcgtatgctattagcatatcccagcattgtatctgaataggcatctgaacacctgataagagcaaaagagatagatttgttgttatctataatttctttctttcattagatcttcccaatgcacactgtaattttcagatagacccatgaacaatcaaccccacacctcttgaaaaaaaatcgttggcctgactactctatgtactcctttaggaaacttacacctaatatatcccatgcaaactttgtacgataatgacaaggtcgtgaatcgtgataaaccataagactaaaagaaatttaaagtattcaataagtgttgatgaaaatgctttgacatcaattttctaaacggatgattaggaattactgaagaaatggcttaccattggagagcagcatctattgagattccatcaacttcttttctaaaacccacaatgtcatgaagtggtttctggatcagagaacttttagtcagctacagatatatgaaaaagccaatccaaaaatgctaagtaggacactattcatatagagccataaaaagaatgccaactctatactacatgcatatatgtcgcacctttctttctttgtgagaaacgttaatggtattagaaaggggaaaggattacaaaagaattacaagagatgataaggcatcatctacaaaagaagttgacatgtgatcattagcttaacaaggtcaccaatgcctagaaaggctttttcgcctcaaactatggcattcaataatgtccttagggaagagaagagaggcttacacctctttgtgtgaggcacccaaacaaggagcctcatttattttgggcttattagaagtgtcgtgcccaacaaaactagcttaatcacaattgcataattgaatatggtgcgctaaaagtgacttttctaagtattgtgcctaacaatagtgcctagagagtaatttattcgtacaacctagcattagttagaaaataccacatgaaatcacatgcaactagttcaaatcaaacatataattgatttctagtgtcatggtttattagttttagaaatttacaatttaaaaaatagatttttatatgcaagatttgaggcttatcatgaacaatcaccttgaggcttaaactaacctttataaacattgctaattactaggaacaactatttaaagaaggagaaacaaaacaagatgtagaaattgaagctcatccaaatgcagtctgaacttcaggtaaagcaatttgaaaaataaaaactcccaactatgcattcataatacaacaacacagtacacccatttacaaaaaaagaaactcgacgttgatattggagctcatccaaatctggaatgaaattcaggtcaagacaaaaattaaattaaaatagaaaggcaccaacaagaggggaagagggggaaatattagccgtaccttatcagtattaagccatttcacatattcaactaaccccccagcataaaagtattcattagactgaactttatccggatcactatcttcttttctgagattgatagtaagctgccaaaattcaggcccaaggataagcacaaaacttttaacagtggtcccatggaaagaaaagcactgtggtacataaaaactaaggcgcactgaaaaattctcactctatgcaagggcaaaaaattaatgagaataagtttggcagaaacaaaggcataaccataccatagggttcagaaaagctagttctcttattcttccaccaattgtgttgtaatcaaattcaattgcagttgtaaatactgcagggaaattcaataatttagtgaaaaaaccattaaaaaattttgattcaaatttaccataattttatctatttcaatttatgtttttgatacagtgggggattaaaactccttccccctcccacaaacacccaaccacttaagttagcctcgagtagaatataataatttttaattgtacaacagttgagggtaacaagaccttcattatcgggccaaaatttaatgcgcgttccttgctgattcttcaattcagctggaaggacttgagatataagagtggtcacaggtttaccacgagagtaactttgacgatattccattccgtcacgccaaattgtaacgtccaatgcctaccaaggtatcaatcataaaggatttcaaataataaatgtcacaaacaaaggcttacaaaaatctgaattagaaacttaaataccaaaaaaggaaaaaattcaagcaagctgaatctacaggcaaaaaacacacctcggataaggcattaacaactgataaacctacaccatgtagtccaccagatacactgtatccactacta

SEQ ID NO: 184973 - DNA, 2974 bp, Cannabis indica
tttttttttaaaaaatagatattaaaactctgaaaaattagaaaaccacaataactgagtaactaaatcattttggttattggaagaggagcaccattccactcgtccaaacaagcaagaataggatcgatcaactgtccttggcacatggctgtgaaaactttatcagcttcttctccaggtgatcgaactttctcaccagtcaataatccagtacccagttcttccctcaagaattgataaattgggaacgatctacagttcttgactcggttcggaattgttgatttcccattttcgatctcgattctggtgttttccacctccttaggcaaaagattcttcaattctgcttcaaacattgcgatcttttgaaagatggaggtgtttgcgttcttctcttgctcaccattattgttctccatagcatgctcaaccaggacctgcctcagcttctgcatgagtggatatgtggctaagcaagggtcgtcaatgtaggcaaagacgtattcacgatcgacgaccttgagaagatccttctcacaaaatcttgaaggatgaagctcgccgttggagccagttgtcaagactcgctttgccacttgactcactgtgttcttcactgtgttcctcagattctcctccatgtgcctcagatcgatggcttggcaaagtgctatcaagaatgtggatgacatcagcttcagaatctcaactgcctcttgggtcttcctcgatgagatcagacccaaggaattcacatcctgattgtgttgttcagcactctggacatggttggtcactgggtttgccaaaaattggagctcagagcagtaagaagccatggcaatctcagaacccttgaatccataatctaagctagggtttcttcccccagaaaggttagaaggtaagccattattgtagaaatcgttgacaagctctgagaattgagcaaagatgagtttcccaatcgaagctaaagccaaacgagtgttgtccatggagacaccaatcggcgtaccctggaagtttccaccgtggagagccttgttcctcgaaacatcaatcaatggattgtcgttcacagagttgatctctcgctcgatcatctttgtcgcagttctaatcacctcaatttgtggacctaaccactggggggaagttctgagagcatatcgatcttgtttgggtttctgaagaggatccatttcttgaacctttgcagctgctttaagtattgagcttccttccaaaatgtgttccattattgctgccgcttcaatctgaccagggtgatgtttcaacttatgggtcaaatggtctgtgaattcaggctttccaagcatggcttcagcaaaaatggcggacatgatctctgaaagtacagccaagatattggcctcaaagagaacgacagaggccaaaccagaaccaacggcggtgccattcaccaaggcaagaccttctttgggctggaggtcaaagaaatcactttcaatctgggccttttggaaggcttcagttggggtgagtatctccccatcgggcccaacagctttggaattgggcctacctattagaagcccagcaatgtaggagagtgggaccaaatctcccgaggcagtaatggtgccgcggagtggtagacaaggggtaatgttgtggttaagaagcttagttatagcttccaagatctcaaatctaatacccgaatagccttgcaacagggtattgatcctcaccaacattgctgccctcgttgcagagtgcggcagtgtgtggcatgattctgtcccaacaccaaatattccagcgttcaagaatctgttacaccacaaaatttgtttccgttaattataaattcttaactatactattatataaataatatacattatgctacaattcattaaatggctactgaatgattattatatatatttttattttatcagtattaattttccacttggcaccaataatactaactttagagtatgtggtgtatagttttaatttgttatttcagtatgtttcgtaccacaaatttctagttagagtttcggaccaaaaaggaaaaagaagaaagaaaacttcaatctctacgactgtacatgttattgtctctccttttcagttcttttctttttttatgaaaaaaaatcatattaagtgattatatacgtgacaccaagcttgcacaaaattagcatttcaaacaactcacacaagtcaaaattggacgaaaaatgaaacacttgattcaaaagaaaaattagagtggaaaaataaataatatgtataaaaaaaaaagacagaatttcgtaataacttataatgaggaagaagtcgtgtcaatggaataggtcaatacttaattttcactcaatttttaattatgaataagtacatctccttacaaaattaataaataaatatcatttaatacaagagcatcaaactgattcaaacaccataaaacactatttcatatttatttatttatttataagctaagatatttattcccaaaatttgatatgtattaaataatacttttaaattttcaaggttgttaaaaatgcttttgaactattaagattgttatatttaataattttttgtctaattttaataaaaaaagtctaacatagatgaaagttcaaaagacatgatttagtatatgtcaagttcgaagagcatgatttgatagatatcaaagtgtggggagcatagtttagtacataaccaatcactgaaatagtaaaattgaatgaaattaaataaaagttcttaaatctaacaattttaatagttcataaaaaaaatttaacggtaaaaaaagttcaaaaatataattttatacatgttaaaatttaaggagtaaaaagtatatatgactttgctgcaaaccgtattaaattcctcctcacaatcttgtcacgagaagcagcacacatttaattcatga

SEQ ID NO: 184974 - DNA, 1726 bp, Cannabis indica
cgctgtgactacaaaccatgctagtcttctcgtcatcttccacgtcatggaagactgaaccagtgctagcaacatatccggcttctgccattaatccttctagcctctttagctccttgtatactgcatcggaattaggatgtgaagtatctccagaaaggaaagcatggactttgtttttcacttcaatccagctacaagcagtgcttttcttaattccattatcaatcattaactttctcagtctcgcaactccttcccaatttcctgcttgagcatacatgtttgataagatcacgtaatttccggcatcattaggttcaagctccaccaatttctcaactgccagctcagcaagctcaatatttccatgaattttacaagaattcaacagagcaccccacacaccagaatctggtaccactttcatttccattatgagattataagcctggtcgaattgcccacaatgcccaaggagatcaaccatacaagtgtaatgctgaactgttggttcaatatggtattctcttaccattaaattaaaaaacctccatccttcatcgagcaaacccccatggctacaagctccaaggactccaacaaaggttatatgatcaggcacaacttctcttctcatcttctcaaacaaatccaaagattcagctgcataaccatgcattgcatacccagtaatcatagcattccacgagacaactctttttttctccccaagttgctcaaacaaagtcctggcaaccttcactaaaccactcttggcatacatatctaccaatgaagtcttcaccttgtcatttgattcgaatccatgtctccaaccaaacccgtgaagctcttttcctacaagaagatctgcaatatcagccgaagctgatacaacagtcacaagagttgcctcagtcggctttaagccggtcagagccatttgactgcatagagcaagtgcttcatctggctgcccattttgcgagtaagccgcaagcatagaattccacagcacaacatctcttgcttcaatcatgtcaaacacttgccgagcatttcccggacaaccacacttagcgtacatatcaattaatgccgcgccaacaaacacatccttttcacaatttgaatgtattacacgttcatggattttcctcccttcttcaatagcagaaagcgcagaacaagctttaagtacgaatgggaaagtgtatctatccggaattagcccatactcaaacatttgatgatataatgaaacagtcatctcataagggccattccaagcgtaacccctaataagaacattccatagaaataagttattccttttgggaattttatcaaacagttggtgggcgtcgcgtacagattcgcaaacgcagtagaggttgaccagtttagtagctaaataagtattaaatccaatacccatttggaataatcgagcgtggagctgttttccggggttgattgcttttctggcgacgcaagattggaggagagaggcgtagtaggaagcaggtgagcgatggaactgttgtccttcatggagtttgacattgtcgttttgatgatgatgatgcacagcagagatagtgggagtgaggtagataagagaagaatcagcaaactgagattcagaagataaagatgctctccttaactttgatatggaggaaagtggcatttgggatttcaaagaaggcgaggaaaaaaa

SEQ ID NO: 184975 - DNA, 5523 bp, Cannabis indica
taaaggcatgctagcttgtgctaggagggttaaaccattctctactatgtgcctatgtttcattaggtgtaagatgatttgtggcacctgaatcaaggtaccaatctagatcattaaccacttcttgtgaagaataataggcttggacttcagcaatgttggtgttgttattgccttgagtggtctgaaaagattcaggtccataaaggtcttatcgaacttgtagaaacactgctgcactatatgtccaagcttgtggcatagttggcattgtggtttctgaccccagatagtgttaacgccacgacctcgagataatcctccccaaaaatttccaaattggcctcgattggaaggtgcaccagatcttgaaccaggaggaaagtacctaggatttggagcattgttcatagagaagggtggggcagagcctctttgagattaaccagatccataacctgttggatttgctgagtaaggaaaagaccacgaccagcttaagattttgtgtgagcaagattggcttcagtcttggcaacatcaagatctttggcagccttatccagatgaacttcttgagccattaacagtgcttcaatctcagcaacattgtaggcttcagttcttgtgttgacagaagtgatgaaaacattgtaatcagcaggaaaaccattgaaaatagcttcaatgtgatcctgagatgaagtagggtgaccaattgatgctagagtgtcgcttatattctttattttgagtagatagtcatttaagaatgcttgcatttttgtattgcaaagcagagtcttgtattgtccaatattggctcaattgaggaatgtgtaatattcatgaagattggtccagatctgagcagctgaattagatccaaccatcttggtgagtactttctcggacgtagacaaaaggagccaagaaacaagaatgttgtcctactgtacccagtcttcaagatatttttccaggctactacctttgattcactacaagaaatgtcacttttgtcagcacatttttgtgctgacaaaagtttggtgttgcgcgggtgaaatggaatttacttctgatgtgttggcaaaagggattggcaaatcaatgttggtattaaaacttttgccattacaaaatgaaaagcgctggtaaaactgacttttcccagcgtgtaaatgcgctgataaaagttagattttagccactataaatgtgcactgtaaaactttgacttttttgccagcgtagtttacgaaatgcactggtaaaagtaacttttaccagcgctgtagtgaactgtgttggtaaaagtgacattgcttgtagtgattgctgtcaagacttgatgcttccatggaaggtagttgaactcgtccaatcgaacagagagagagtgagagaaagaaacgagattagttttgaataaagtaatttgttgagacgaacttaaggggatcgacaaaccaccattgttgacagctgaagaatgctccattgatgaacgattattgctctgatatcacgttattgttcaaagaaagaagcagaacgaagagaaaagaaagagagaaagaattgtttcattgattgatgaaaaacgaagaaaacaagcttcttatatacagtacaatatactatgtgcaaagaacaaaagtaacaaaaagttgttacaatcaactaaacctaccgctaacagaaataactaactccaactaattaattgtagcttaggttcccttaccaggcatgattcaagaatacattttacttaaattttacatcctagctaaaaagatgaaagtaaagaaactaatcaacacaaattattaatttatataaggtaaaacccattctcctcataaaaatatataatatgtaatgcaatttaataattcaattctccctgagaattaataaaaacaaaaagcactacagattataaagttggctccctccatccatgaattattataattttgttacgaatgttccattatgaaaaatattagtagatgtgacatgaattatattacaagagattcatattgtgagccatgagtcggcaaaataaagttcacttcacatgcaccaaggccttttatttccaatatttaaataactaattaaaggaataaaatgaggagtgtacgtatatattgataaccacagtcaatcacttattttaaataaaataataaaaataatgaggcttcacacaacgatcataaatatatattgatttcctatccaagtccctatgtgcaagctttaagaatgtattttttgttgtaatgttttggtgtatatccatttaaattcccagttggaaagcttattcttttgtttgatagtgatggcctatatagagaaatctcctgaaaggaaaatgtttaacatgaggaaatataaatgttattaactgttgtctatttaaatagttataaattaaataaattgatgaatataatatgataatgtgtaaatccatggccaataaaaagatcgagagaatattggattccagtaacgctaagaatgaaatccaacgactgagatcaaacatttaaaaaagtatttgaaatcagccatccacgagtacaaaaaaaaaacactaattattattaaataatttttaaaattcctcaaaatacatttggtctctgaaagttcgacaagggccactttagtaatataggcagtcatatacaattgttatatacacaaatgaaaatccaactataaaaacgactgttggagcaacaaaaagataaaacataaaaataatgaaatatataggttgggagatgagctggcggccacatcatccactccaaaataacaaacgtgttaaaattgtatggaaaaggcgacacgtggatagggtgggcccgacaagtatggatagctgggacacacttaaagctctgaagtagtagaagagtagtagagagtagagagtcaaaattaaaaaacaaaacaaaaaagtcaaaaacaattaacaaaacttactaattaaggatatatgatatcattggttgagggcttagtttgtctttttccaaaacaaaacaatcacaagtgggaaccgtgggatattcgagcataactggcataataaacccttttcacacttcttcaaaggcgtgtcgaattcgcacgtgcctcccctttatctattaggccaacctataaatacccccaaatactctcactcactcacacaaactcaactcaaacaaacttatttccaaaacaaaaactcagagacagaactcaaaagataatctcactaagacagtaactacttcagcttcttcttcttcttccgaaactcgaactcaacttataatggacacgtatcactacgtcgtagaaagcagtaactcagagggttacaagcaaccggaaaactcattatcccctctttcatcagatgaagcttctcgacgagcttctctctccgacgaggaagtgattctggcctcgagcaggcccaagaagcgagctggtagaaggattttttaagagaccaggcaccctgtttatcgaggagtgaggagaaggaacaacgacaaatgggtttgcgagcttcgcgagccaaataagaagaccagaatttggctagggacttatccaacggctgagatggcagcccgggctcatgacgtggcagccatagctttgcgtggtaagtccgcttgtcttaacttcgctgattcggcttggcggcttcccaggccggtctcgcttgatgccaaggacatacgcgccgctgcgactgagggagccgagtcgtttaggccggttgaatacggcggcgtttcgatggagatgaaacagatggaatcggttgatgagagtcatggtggtggtgaggaagaaaaaatggtgaaagagcgttttatgtggatgaggatgccacgctggacatgccaggcttttttgctgacttggcagaaggtctgcttcttcctccgccaagcaattatttcagcgcggatgacgtggaaagattcgaggatgacgtgtcgttgtggaattattcgttctgatactcttcgagagtgtagtattagctttttccctttcttttttatttatttattattgcttgaaggactttttttttctctgtttcttccttgcttcgtcttttagcataaaacctttattcattttttcaaatctaagtctaatgagtatgacatagatttggaatgaatttaatatgtaaaaataatttttattattatatcactttgatcaatgtatatatagaaattttatattatcttccttctaataatttctgttatcttcttctactataataagttatttatgatcaataattaactattaaaaaacgatattatatatatatatatcttaaaatgaaattcattcacagcaaacattacaaagaattaattataagaatatatacataatgattattttgtttgcgtaaggaaatctgttaaaataaaagaaatataatttgtatatattttattattagggtgtgtttagaaataattaacggggattttttatttttacggaattttatattgaaactcttattgtaactagcgctgcaatattttagaaacctaatccataaatttaaaaatagaaaattaaaaaaacagtatatagagtaattcctatatatgtaataattattagactctaatttaaaataaaatatggatttggttatgttgtaataattatatataaatttctaatatcttgacaaataattattaatacacagcttaattaatactattaattatataaaaatgataatattatttatagtgtattttttaactataactataaaaattagaaagtataattaaaattcttcattacttctaattatatagttactatataattatttaattgaagtcaaaccctattattacttataattagactcaattttaattgaataataattttttcaaatacgaccataaaaccaatcaaaaataatatgtaaacgtttaaattacaaccaaagcaccaaagaatgtagagctcaacatagaaatattaagaaaaaagaaaagggtatgggtaccaactaccaaccaaagaccatgaataagtgatagtattatgccacactaaaaaaatattaagttgatatattttgaaaaatattatgggcctcgtgactaaaaattttctgttggaaattaaatatttaagtaactttcgtacaaatttttagcattaatttgtaaattactaagattttttttttctttttttgctaaaacaaattactaagattatttgtatatgtatataaattgacaagggagattctaaatttgcacatttatcttttgtgaggagaatatatagtttacgtctataattatgacctatcacaatatttgacaatcaataattaaaaaattaaataggtaagtaactatattaattagaatatttagtcattattaaatattaactttgatatattaa

SEQ ID NO: 184976 - DNA, 3201 bp, Cannabis indica
caccttatataggaaacttttatgcgttcaaaatgccaggaattaggataaacttgaatcgtcaaccttgtatgttgcatatctctatacttgattcaatttattattttctttcatgaatgctaacactaatctgtactcgcaggtagaccaactcgatcaatgttggctagagatcgcgtggaaattgtagaggttctgagcagtcttctagtccaggattgtgattggcatcttttatgcacctctgcaaaactacaagaacacaagttgattccaggtgacgccaaacttcagcaagaactagtttacaaggaaccttctaaaaaaaaagaaaagtttaacaagcgtctttccaagaaaactctgagacaagtattaggtgatacatcatcacatatcttgttaatattctgcgagtttttgtaacctttttatgttacttttccacttttttgtagatatgactttcttaaagatagccccaatccttaactgcaagccaaaggcaaacattgcaaccccttctactgcgacgcctccacaaaagagaatgagcgatgttgtcaatactctaatgattgactatcaaagaagcatcagaaagtttcttaagacaaagggaaaaaagtcatgatggatcttgcaaccaaggctcgtgacttcatggccttgcaagagaagttcgtgagcaatgactttgtcaaaaaaatcaaggggactcctgctgaagatcttttatctcattcaactgagctcatgactcagttgatgactgtatacttgcgggccatcaccgtaggcttcaaagatcttgatcctctagaaaaataaaacatcgctcttcaagaagtcttgaagaaaactaaattggaggaagctaccaaagacaaagagatcaacgatctgagcaaagctaagaaccaggcagaaaagaaagtcaagaaactagaggagtaaatcaccaaccttacctacgaccttgaaaatgaaagagaggagaagaaaaagcttatgaccaggccatcacatgactacatctacactatcctgattaaactgccagacttcggctttgttgtttttagtccagaggcaatcgagatggataattgctttcccaccatgtctcctactgagactcaaggtctaggcaggaatctttttcttgaggaagctgagactgtgactgatattgaagtcgcagatggtgctgagaaggtcagagaatcttaatgcccctactccttagcttagtttcttttatttgaactcttttttggcgatacatgggtactcgcttcttgtatttggtttttgagacaattgtgctctgcacttttaatttattttttttgaacaaaatatccttcaaggataacttttgaaaattttcaagtattttcatactcgaattgtgttttttatgcgattatagaagcaactccctgcttttgaaatgcatgtatttgtttagtcactattttctttatgtgacttttctacacaacttggtgtgatgtgatttatgaacatctcaatattcataataagtaaaattttctaagtaaataatttcaaagacaataaaaatttcaaaaatttaatgattcattgaataattagtagtacaatctttattaaaggatgtagtggtatatatatacatgtataacccctatacttaggtaattttcataacaattgactaagtatatatatgtgcgggtcctactaataataaaacattaattgctcgccattctaagctctaataaagactgagtcgttgagatcacaaagtcggtatgttgcaatccctatattttcaacgattagtaggggccctcccagttgtcgccaaaaaccccatgcacagaattgcgggtattggcataactttttgcaataccaaatctcctactcacaaacttctttcttttactttagagttaaaatagcgtgatgtacactgttgataagctacattttttatctaagcctaatcacgtctttcttctaatagatctaattgaagtacttgattcttttcattgtcttcaatgttaaaaatgtctcatcgcaaggacccagctcctaccttgagtagaaccatggcttcacacccataagaaaatgagaagggggttttgccaatcgttgatcgaggagttgtattataagaccacaaaacttgtggcagttcttctagacaaacacctttttgttcttcaagcttacctttggtggtatgtttgattattttattaattgttttagtttgctcattactttgaggatatgcgaccactgaaaaggcctttttgtatccccaaatcgccgcacaacttccacatttccctaccattgagctttttcccattgttagaaattaacttgtaaggaatacgaaatatgaaaataatggctcaatacacaaactcacataatttggcagttgttatcgttgctaaggcttcagcctctacccacttagtgaaatagtccacagcaactactgcatatttaactctgttatcctattttttgcacgatgacatggcaatgggctgaatgacacgtgtcctacattttcctacctgggcggaagggattactcctagcagcccacaaacggttgatctaaatgtctgatacagtaggatgtccaaacagggtaatcaagagacatccgaccaaagtacaaactcatatgcactgagtaggatatatgagttggcaatttcagagacaagtctcgtcatttccaagacacgaagataatccctatatttgtgggattaagtcagagaataaaggcaatacaccttagttcccattccttgcattataattatagaattaatgtagtttcctattttattcattatagattaagggaaactattcatcgtgtaataagcttctataaatagtggcataatctcactattgagagagaggaaaattaatccagaaagacactcaagagagaaaagtgatctaagagaaaataactcagagatcaattgtaggagctttgcaagaggaagaacacttcattctttctctcaagtcaatacaacaataaggggagtaggctattaccattcttgcgaggtcgaacctctttaaaattcgatgttccttttacctttaatcgctttatcgctttatcactttatcttgactcactgtcgt

SEQ ID NO: 184977 - DNA, 1310 bp, Cannabis indica
atgcatttgtttgttcagaatgtggggggtatgtttacttcctatattacctttgtttatgcctttaatgataaaaaaggcaggaagctattatggaaggagtcggaagaatgcaatacattagaaagatggcttatcatgagggattttaatgatatcatgctaacaaagaattcattgaatgcattgaggggtgtaatgttgaagatgtaaagtactcagggttctattatacctggaacaacaagcagcagggtgaggatcgtatctattccaagattgatcgagttttggctaaccaatcttggatggattctaaattgaaggtacatattaaaaagtgtgcgtgcactgcccctcttctcccatggcaaagaagaaacgagtaggctgaaagccagccgttacaatttccacagtcaacagtgcagatgaggcggacctccctttgatccaagagtcgatagctgacctagaaggaggtgatgaatttcacaatccgtgtgagaacctggggatcgagattgaatctgaaggttgcaaagctgagaagttcgttcgtgatgcgtcgattccagtcagctgggcagaggaagtagaagctgactttcaaatcagtgctagagatctctggagtaaatttaagtcgaatcaggtacctacaccttcctccaaacttacatttactgaacctatgagaatcggtgaccaggtggtggctaagctagaccttgaggagattgaggttgaggcctcattttggaaaaatgatatagtgtgtattgttctaggtgcaaacccaccgttcagggtgtttgagggatttatcaagaggatttggggtaacctgggtatagagaagattgtgaggatgcattcaggatgtactctggttaatttttgagatgaagctactcgagatctcattcttgaggcgggtgttatccatttcgataagaagccagtggtgttaaggccgtggactttagagtttgactcgaatagaattgtgaactcagttccagtgtggattagactaaatgggctggtattacaatattgggagaagaaaaatctaagtgccttggttagcacaataggcaaaccaattatggttgataaggtgactcaagatagatctatggtaaaatttgctcggattcttgtggatatagagaactcagatgaccctccgaaaacaatatccttcattaatgaaaataagcaattagtggaacaagggatagagtatgaatggttgcctacaaaatgcactgcttgggcaattttggggcatacagttgctaact

SEQ ID NO: 184978 - DNA, 7313 bp, Cannabis indica
ttgaagtgtaaaagtaaaaaaattctatatttttataacatacacgaatatagaaaaaattaggctattttttttatgtcaaaatagtaggtacattgacccctactatagaagctccctaatacattacattatggagaatagaaaaaatatgaaaaattaaaaaaatatatataatttataaaagaagaaaatattaaatattaaagtgatataagttaaacatataatcaatgcacctaaatttgtcctcacatagggacaaaaacacttaccctactatcccctatattttaatatgaatgtggcaaatttcattcatgagatattttaaagagcttagattattttttttttactacaattaatatcgagtagtaaaagtgtatgattggacttgaaaattaaaaaaaaattattgccattttaaagagaatcgattccttcaaatgcttaaatggcaataatttcaccaaaaaggccaatttggttaatgttgttcaaagatgactttccaatataataagtataagaaatgaaaccatgaatgagaccataatacatataaataattaaatataaatatattcatataaataaaaatattgggagtgaatttttttcgattttgataaatttttacaaccgttagatcaatagttagattaatcgaatggaagtcaaattacatcaaagtaagtttatagtatatgatagaatattaatgtaaattaatatagcgcgttgtgagtaaataataattttttatgttatatttattaaatcaaaatataagtgtgagactcaataaacataattatctatatcaattcaagaaataattctttgtcccaaaaaaaataaataaaaaagtttcttaatggtgaagttgtaaagagtccaaagaaagaataatgagtagacatacacttgaagttgatgatgccactttagaatctttgagtatatctttttcactcctatagttttcagctcatctagctatagcttttaacatggcttgcctacctatataccatttgtcttttcttttggttaaatttggacacaaaaaccatacttttagaaaaaccaaaattgactaaaacaatcacttatatatgtaccacaaaaagttaagaaaaataaataatataacaaattgatcttgtttatatcttgtgttttgttgtgtataatagtatttgggtaagttgttattaattcaattacattattttcaaaaaaaaaaaaaagagaaaaactttaatatttttatgtttagttactagttaccaattaccttttgtaactaagtgacagttaattctgttacatgtaaaaataagtccttttctctggtttgggtagatacattcttttagtttcttttctgtttttctagcaatgtatataagctcagttcgtgattgtgtctctagtttgttattcaagtcttgccctattctcattgagagttaatggaataagctttgttgattaatctagttctaattttttttatcttgtttcttgaattcttaggtggtggtgtttgattgggaagaataaaaatataagaataggaatagaaataaaataaaatttaaaatgcaataaaaaaaaaaaaaaaaaatcattaaaaatttttttctcgtattacattagaatggttttcttatttttagaaaaatggaatagtcattccactaaaatggtagaaataacatttcattcattccaatactttaaaatgcaatcaaacaaaggaatagaataaaaattatttgtttttcatttcatcatctccaaccaaacgccaccttagtgtgttgttctattgaggtgtgtgttgttctattgaggtgttattcgacaacaaatttgaattataattaatgtaacatcatttagaattattactagatacaattatataattataaggaaaccacatacatatatatacttataatgcaagttgtctataaaacaatctaaccaaatcaaacaaactattatcatcagatattattaaattatgttattcaatttccttaaattactcattcttacaattaatacgtatgagtagatactcattaatagttgatgatttttaacctacgcattttgtttgaagttttttcataacttagtttttaggtacccgatagtaaatcaacaaaacatatatatatatataaatcaatgatatatttttgataacatttagtaaaacattaaaaactatacattttgtcaatttgtatgatgatttatatgtaaatgttttccgaattttattttactcatttaaaatatacaatatattatttacacatcctgataataaaaaaaaattaaaccccagccaattaataaaatatatttaaaaacaataataaaaagtattccataaatacaaagcacgaatattgtaaattttaaaaacactttaaaataaaaatcaaataaagagtatctaatgttacttagcatttaattttttaaatattttagataatctttattttaaaagatctgatgtaaatgctcaacaaatagttttttttttaatagttactaattaaaaaattgcacaacctaataataaattgtcccagtaattatatgccacctcataatcgtgatggtgttaggcaccacgggtgcactgcccgcccttaactcgagtctacaagagagaaaagtaagagcacaggcagtaaagtttacatatgaaatgaaattacctagttgagatgagttgggatgggactatatattaaaaggttacagtaatatacttgtattaatatcattttaaccaaagttgaattcctacagagacaatactcaatactaatatatcatcatatttgaccaaactacattcaactactattaccaacccaacacgtctcatttttcgattaaaacacaaataaagaaaactcaccctcaaaacattgggctcttggagcttggagaacagggatggttggccgtatggaaaatgatgatgagaaaagattccgactctagaacttgaaatccttcttcttcgatttcccttccttttcctgcatttttcgcttccttttcttctcgttctgtatcaaaatatatcacaaaagattttttaagaaaaacagaatcaatattacttaaaagagtggaaatttgagaatcaatacctctgcaaccatgtcactgaaatcttcccgctgacttcggagcttctcctcttctcttgcttcctcgtatctgcaaggaaacaaaggaaaaaagccgggtgaataattgtaattaatttacttaaaagggtgttttaattgtagaaaaataaaaaatgaaactcacttggcaggcaaaacattttccaatgcttccaattcttcgggttgtagagtgacatccactttatctgttttctggcctctaagcagatcaacctgcgcaagaaatatcaaccgaatcaacttgataattctctaatagagacgattaaaatggtaaagtttatgcttacccttttagcagcagcagcagctgaagatttgtcttgtgtaccggtcccgacaacatatctgcaagcagaaaagcattatcaaaagcggtcgagaagaataaatagataataaaaacttctaacaaatgaaatatgaacaagacagctgtttacatacgtgtgggttgttccgagcagtgtccctggagcaattctctcctctttttcttcgagtaccttgaatacacaagaaacatgaattcatatttagaatctgctggtataaattgtagataaggatacaaaaatatatgaatatgattttcctaaagtcacagtcatcaactcacttgatataggggcctgtccggttctttcctctgctgcttacgaaggtcaatgacatcaggtgtctcaacaccagtaggcgtactgcagttcaaatagcaaatatgcataagcaaagacggccataatagctcactttctaatattacgaaaaaagcatgttcgatacatttttcaaaaagattttagtttataccggaataaccatacaaatcaaaagaaagtttaaatttaaatacctcgagaagctttccacagattgtgtgccgtcccctaattcatcttccccaacttgatcttcttcctcttcttcttcctcttcctcctcctcttcttcttcttcctcttcctcctccagatcaccccagtgttttgtcttatccacaggctcttcctagaaagtaaaagcgtaaaatcttttcagtaaataatacgattaaaagagcagatagcaaagtatgggtcgtacataacctcaagcagaaagacttgaagaaagttacctcataattaggctgttcggtttgcagaacaccaaaaacatctccatatagtgggtggccggactaaaccagaaaacacagaacttggagatttagaataaaagaagaatcggaagctagttgttaaaaatagttatcggcagtaagagaaacaatgaagtactgaaagaaaatgtcaagcactgaaaaacttacttcatcaacaggaggcttaccccagcctccaggatgataaccaaagctcgctccagcaggaataggagcatttagcccgggaatctttaggtgtggatacgatggtggaggaccatatctctgttgaaaacgaacaaacaaacaaacagagttcacacaacatgaaaataagccatagattggtaaactgcatttaaaaataccatgaaagaaatttcgccatctcacctgcatattgattagccatgggggaggtgcaccatctggcataccaagagcttcttttaattcatgtgatagcatacctggcttcatctctctcaattttacctgtatgtgaaacaagagagcataaatatgtttaaaaaactgtattccaaattagattttgggagcactcggaaaagcgaacaggaaaacaaaacacgtgcatccagaaatcacagtttcacctatatctctggaaaggtaccatcaaatcgtataagaaaatacaaacgatgcaaatcttacatgcattcctttgaacccggatgttttccaaaagaaaagatgcaaatgaacatgaaaaatatatatcagtctagcataatacctcaaactccttgccttcgtggtacaaatcaccgagacttgtcagctttggcttagtctggtatttaaaaaatgcatcgtggagaacctaacaaacagaattggcagtcctattgttaaacaatagacaagaatcaaaagtacaggtcaaaataatacacataaaagaaatatatatacatatacaaatagtcgaaacctgatagtcgatatccattttgcccatctttggctgcatacgttctcgttgcttttgcttcaacttcttactatcctctttttctatgtaagcctatataggcaatcataaacaatgcagcaggctattagtggctttaaaattgcatagagtacattaaaaaataggaagacaagaatttaattcttcaaatactaataattccactaaacagacaagtgaaaggttacattgcttccatacattttacagagtacaagactaagaacagtgcctcatagagggtgtcattgacattccagatatttttaaccctacttggaacaatttaatgtggggtggaggcagtttacacaggcacatccgtaacatttcacttcaaaaacaatatagtgaaattacctgtctaattttctcaattccagtggcagcaatgaaatcaggtagctgaaaaggttgtttctcgataccacgcttgccctgcaaaatataatatcagctgatgagataaagtgttctcaattatatacataagaatgattttgcatcacaattacgttagtcataacgacataaaaatatagaggaattcagcggatgactaggcagaatggaaaggcatctgaaaattcaaagcagataaattagcatcttgaaagtgaataattcccaaaatctataatgcaaaggtatttatccactaaagttgccccatcattggtgtagttatgattcctaatcaccaacccactataggacatgtaattacaaacaaatcataattcaagagtgccgttagccaaacacctagaactccaggctccaagtttgtaacagccgaatccctgcaagaatcacatatatacatataagagaaaccttattcgacgttatctttcacctaaatctaaaccctgtgcccatctcccatgcatgcatatatctcaaactgttagtgttgggtaaggaaatgctaagttctaacctgcagaaatttccgtttttggcaccaatgtcttggcacgggtacagtatttcgataggacttcaaaaagaccagcaacttgggatctgcagccgtcgcatcccacacctgaaaataatgaacacaagaacatgattagaaagaaagcagaaactagaaggaaagtctaaaacaggtatggatgtttcaacagaaaatataagtatacctcaacaacatcaggcctagcacatatctgtttgagttccgcaatcttcatcctccgttgaagctgaaacaagttcaaaaactacattagcttgaaaaaaagtaccggcacacaaaaccattatcatgactgtaattatcatacaagtcagttactgtaccttctttttcttatttgacacacctttctccttttgttggttgtcattttcgtcctcttccgagtctgagtcactattcttatttgcagttgctttctcagcagcctcatctttcttatcctccttagaaaaataaatagagagaaagagatacttcagcaatattcttcaaatgaacaaaattaaataaataaacaaacaatacattagtttatacctcagcaccagcagaatcctggaaactgaatttttcaaatatttttctaaactcctcatccataccctcttctaactctgctttctcaggaacatactcaatctcaacttgctccagaatctgaaaatgataacagaaaaagtgtatgagtaaacatactaaaccaaatccgcctaaaccgagttaacaacacattcaaaaatcaattgaaaaccccaagttaacaagaacagcaaaaaaccacaaacacacaatcaaacatctctagcataacaaaaaccaatgccaaattcaaacacacactaaaagcttattagacttaaaagttccaaaagatatcacaagtaaacattgaaataaatcacacaccatagttcccacaaatccatg

SEQ ID NO: 184979 - DNA, 2842 bp, Cannabis indica
ttttgtagaatagaccaaagactcattgatgataaaattaattacacactaaaataatgtatattaactcattaacagtccaaattacaaacttaagctagactactagcaacattgttacaatgacaccaatctataaatagtaaaaaataaaaaaaaaaaaaaaagaaattaaagtaattatcataagaaactatattagcaagactaattataaattttttttcgaattatagagataatttgattttaaaaattttagtccaattttactaatagaagtttaagaaaaacaaaaaacacgatttgatagatattaaagttcgggagtacaatttaatacatagacaatcgtcactttagtaaaattaaacaaaattcaacaaaaatcattaaattcaaccatctcaaaaattgaaaagaatttttaataaacttaaaagtttaagagacttaattagttccgcggtgcaaatcctaattaacgtattagtaaatagtcaccaacaataccttaccaattgttaccagtttgacaataagcaatttaccatccttgtttaaaatattacaaaaataccacaaaatatatcaaagtttgaaaaataccattatttgtttcccaaagagaaaattggcctacgctggttctaagaagcagaaagaaatatgagaagaaagagaatccttacttgttaagcaaaaactctcgttagcaacgcgtattttccatacccaaaaaccctatcttctccttccttaattactgttttctgattgtatacatatacaatatagattagtagttgtagtagtagagcaggtaattcaggtcacatcataatcatcatacacacacataaatatatttatatacaatagtcttcccattatctaatctctcatccatttcgtttcagataagttttttcttttgccgaaatcttcaaatttggaaaaagggtattggggttttggttcttgattttgtttttgggatcttcttcaaccatgtccatgctcgattcattcttcaacaagggtttcaaagctgcaaaatggtatctaatttttttcattttttaagttattattgtgttgtgaattgtaaagtttcaattttgatttctgggttgatgagaattatgagatcggaaacttggttggtaggatccaatttttttggtaatttattttcttagcaaacaaacagggattttggttcttcatatgaaatagatgcatagaaccattgattgctgattaataacttattaaatgtataaatttcatagtaaccaaacagagaattttgctttaattttcctcatatagaaaggaaaaagcaacaatttttaatcatgtaaagaatttttcataatagagttgtttcataaattgttggcattctgatttgaatgtgtaccaatgtttacagcaaaaccctgctgaaattgacaattccacgtataaagttgctgagaaacaggagggagatgcagctaaagcagatgcgccgcgacatagccaagcttcttgagactggtcaagaagctactgctcgaattcgggtataatctcttgttctgttgtatcttttttctagattggattgtatttgaatggttgatcttattgggatttttcattttaggttgagcatattatcagggaagagaatatgatggcagctcaggagattcttgagctcttctgtgagcttatttctgttcggcttcccattatcgagtcacaaaggttgtatttttaactttttggtttgtgtctttttaacctgtcgatataattttcctttggctattgagattgatttatatggtatttctgatgtagatttctcaggttattttacttattatatacataacatattaatccatccacaaccacctgagcataagctgattatcttggctgaaagagaatcaagacacaagctcatgcgtgcgtacacacacacacacaaaaacactctttttctctcttaaacaagcacagccgaaagcacaaatactaaagattgtaaaagtgtcaaataatgtgcatgaacatagttgggatgaaatttaaaatttatttgtgctgtagcttgtgtgtaggtttagctcaccatcgaaatgaatttttcagctcgtacatttgtgaattgtgtgcatctgatcacttaggaggatctaatgttccattaatttgcattagatagaaggatggtcaaaaggaagattctattgcttgttagacattaaggggttgcaagatcatgaaccgagaacgaaaaagaaaagagagaaaaattatcattgtcctttatgatggatcacatgatgttaatcttgcggtgtattctttataaactaaaatggtttttttttttaattttgtgaaacatgttcaacgacacaatgtttgagttatattgtttttaactgagaagcaccgggatgagaataaaaaaaaatgaactgggtagttatatattttgatttatggtcttatttcttaactatcttagcttgatagctcagaacttaatgcccgttttgtgtagttacaaatgacaatttgtgaccgagaaattttttttctttatccacctgatctagttttcaaatctgctatgattgtgttcagggaatgtcctttagacttgaaagaagccatctctagtgtgatttttgctgcaccaagatgtgctgatctaccagagttgcttcaagttcaaatagcatttgcatcgaaatatgggagggagtttgtagcagctgcaactgagcttatgccagactgtggtgttaaccgccaggtctatatgaaactttta

SEQ ID NO: 184980 - DNA, 2287 bp, Cannabis indica
gatggttacatatttgatgtaacaaacttcctatatatatatataaaaaaataatttattattttttgtaaataaaaaaattcaaagcgtaaaaattaaaaaatttcaattaaataaaacaaagaaacttgtgtgattgaaatgtaaaaaaaaaaacttatgtgtgtatgttttgtactacattattcatatgtgagtgattggtgcaatttatcatatttttatagctaccaaatcttaacctaagttttgagttttgataaataaatactatttgtatatttgtatgattgaaatcaataaaaaggaaaacaaaggctgttgaattattaagaaaaataacataaaaaaaatatacataattatgggttacaatttgaaaaatacattaaaatgataagcggaaattaaacaagtaaacaagtaaaaaaaaataaaaaataaaattatcggctttggaaattgaagagcttaatagaaaaggcaaagatgattgcaaagaggacagcaaaggcgacattggcgagtgcaacaaattccaagaaatcatgtctgaatccaaaaaaagcgtcggagaaactgttccacagactcacctgtctcaacaatgatgtcttcgcttaaatctccatactgtgatgccactagtagtccgtacagagtccatgcaactggacaaccccagtagtaccacctccaccatattggtatcctctgtaatttaacattacaatattacatattagtacttctcacttcaaaaattattcacttaattattattcaattacttcttgtgattaaacgacatgatttaaatgaagaaatttataggtatgtgaattattcttacggtgcgagggacgacgaagccggcgaagatattccataatccatagaaggcagaagaaacaatggaagcaatgtgatggttgggagtgactcccacagtcatcatgccgtagaaagtgaagtagagcatagcaaagaatgtgaaaaatagataccagaaaaactttgcagcagtccattcaaatccaatcattgcatatactatcaagcaatatactgatgcttgaatgaaaatgtatggaatctccactaccacctgaaaaatagaaaactttgaggctcaattgtaatagtacgggacataaggaccacaatttagtagtagtaataatttgttttaattttatacaattaatcctgatcttttttttttgtgtctcaatacctcttaattttgtttctgtttgcaaatttgaagcgtcagttaattaaatcctaccttaaatctcaattgaattgccactctttacatctaggtatacgtatatagagtgacaattcctgttgacatttaatggttgactttaactgacaaaaataaagttaatggagtattgctccaaaaaaaaatgaagtttaagtgtaaaaatagacattaaaacatatggaggtttcacagattaccctttcaaaaatatgtaaaaagttttacctgtccgaatgagtagggaaaacatgagtacattccagcagctctttctctgtaaaagacagttctttcaatggacactactggttgtacagatgaagcattttggaccccaataaagaacactgcagcgtacattgatcccattgaatttaagatatcttgttgtcttgacctgtaaaagcagaggatattatttagaagatgacattatacacaagacaactaattatttctttgaactttaagacttactttttagatcccaagtcccagaacattgttccaaacatcaagcctatgaaagcggtaaacatgaatctaacagcagtataaggtgggtttctccagtaagacaaccgttgtttccataagcaagcaatgcattgagtgtaaaatgagcgagagtattgagtagggaagtaaagatcatttgaatcaggagcaggtgtgcttaactctttgataagttgtttgttactcctgaatgtttgttaacaacaatgaaaatatatagcttaattagtcttttttcttttctctagcaaattacaataaacagtcttgataaaactaactaacctgtatagttcagaactcttgtaaattttattaaaatcaactcccaaagctatttcttgggcagaactcgaaacctctaacatccaagttgcaggattataaccatctttgattttgctaacaccttcagtagccttgataaaacaacatatttgtatccatataagcaaggaaggaagatagctattgaaagttgagataaaa

SEQ ID NO: 184981 - DNA, 1541 bp, Cannabis indica
tgattttatcattaattaaaataattttatctataaaaaagaagtaatacaatcaggataaccagactttcaaacataatgatcaatttcattaaagagtgtacaacactattagaatcatcacatatgtaattgttagttaatatccatatatatgttttatattttaaaatagattataattaccatatctgtgtaataacataaaatataatattttatactaatcaattatttaaaaataataataatgctagcgttttattatccacttctatttgagaccttattttgatgtcatgtagagtttattgacctgtttgtgacaatataaacaaccacaaaattaattgtattctcacaaattatataattcttcaactaatttgacctttattttaaaaatcagtatcacatcatatcacattaaaataaaaacaggaaatgaactgtaattttataaattttgatattaagatttaaagattataataatttaaagagacatagaatgagctgtgtaaaatattactctatgaaatgccaagcaaccatagctgtgatgtggttgaataaacttaataaataaaattgtgtatggcaactcaaatgaagcatatttttattgaaaaggaatccaaataattatgaaaatatattatacaacaactcatcttatcatcatttgattcatattttatattaagtccaagtaattccatcccttttggtttctgtcttccacgtttccataaatatttcaatctgtattgccattgccaacctcacaatctttcccaatggataaaaaaatgtaattatttataaaaattggtcccttttaattataaatgtaatcaacatagaaattaaaatagaatatatgacagtgggtattgctgattcttaatgcctcatttattcatatgtcacaacatttttatgcccttcatcattattgtacagaagtgctagtagtagtccttatatttttttaatagagtttttaaagttttaagcaacctactactatctatgttaaatattaaatgaaatatatattatttaatttttatctttttttctttttgtttatatgtactatacaaaatttaattgttgtctatttataatttcatatgcttatttacacaactagatatattatgtaaaatttggtgcttacaatacttttctcaatcattttgaaaagttttgagttcaaaatttcatgcctcaaattcctaaaattaaaaaagaaaaataaatcaaattaaaaatgaaaaatatcaagtaatgcaaaatgttttgaatatgttatgtaattacaaacaattacaaaagagaccctattttgtaaattatagtgttaagatgttttttttaagaactttgaattatagtttctatttctccaattatgagaaaatccattttttctgttctttaagtttattgtttacaaaattttagtcgatagtactttttttttacgaatttataaaacaaaacgatcatatttataactattgaaaatgaag

SEQ ID NO: 184982 - DNA, 3307 bp, Cannabis indica
aaaaatgttaaagacaaaacaaccataaaaaaaattgtcgagatactatgaataaaactaaacttttaaaagaaaaaatagtattattggtatccttatcgaaaaacagtcgaaaaaatgcatacacactgaaacaaataaagcatacaaaattatacgaaaaattaaagaaaccctatcgagaaactatcgataaaccttaaaattttcaaaaaactaaattatgtgaaaattattgacaatcctatgaaatactatcaggaagctaacgatgaactattgaaaaaattcaaaaacatagaaacaacatgataaagaatcatcgaaagaaccactggaaacctgtcacgaaaccatcggtaaacacaaaattaattaaaaaattaagttatgtgaaaactatcaacaatcctatgaaatcctatcagtatcttattagaaagatatcgataaactatcgaaaaaaaaatgcaaaaacaaccaaacaccagaaacaagctacaaaattcaaataattttgactaatctcacaagaacaatgacaaatccatatccaaatcacaagtaatgaaaagaatttggcaaatgctgctctaaaaaatattattttatttttttaagaaaatagtaccttttcaattgggttttcggtggtggcgatggagattgggtcgttagggccttttcgacagattgtggcttcggtttgagtcgaatggggtatggaacgattccattttgaatcaagagggactagtcaattgaagttttatcgtttgagtcgatgacgatctgtccacgccagtctgagtcacaaggtgcttcgtcattcaaccttctgaagaaagagagaatcagagttgagtgagagagaaaatcaaataagggtattttgagtatctacgaaaaatactaacatcttttagtacaatttaatttagaatctattttttgttgtaggtgtaccaaaattaccataactaaccctgtgccgcatcagcatttcccacattccctaaagccctcctacccataggtcaatggtggcaagattgtaattcattcgaagtgccgagttttgggcaaacatgtggtaatacactttctttatttatcaagtgaaatgaaacaaaacgtacaagtgcaaaaatggccgttacctactaactaattacacaataacatattctgagattccaacttaaaacatagttgctcacacacaacattgctcataacatcatgtacattctgagctttgagatgtactatgaacggcttatgaaataaaagaaaatataaatcaataaatgatgttctggaaactaaaattgttacaaggtattgataagataaaacatgataatatgagtagtgaattatcgattaagatgatattacacgagcagagtcaccagcttcacatatcaaaactgctttgtcttgtttccattggcttgccaattcaggctggatcttttgatactctctcctaacaaatgatgctgcttcatctgcatgctcagcattcaccagtgcaatacagcaccctctgaatccggcaccactaaatcgtgctccaaaaactccaggcgcgtttactaggattttgtataactgtataaggggttccgagcctaaagaataacaacattaatatccaagctatttaaagcagtacttatatcttatgatctactagatttgtttggggaaacagaaatcaggttacacaaaccaaaaacaaaaaacatctaagaagtttaccacattcatagttctgaatagagcttaggccagaggctgtaataagttttccaaaatcttctaaactaccagtagcccaggcttcaagtcctgaaacaatcaagattttgaccaaactgtaagttgaaaaataacaaaaagtaaatgtttgaaacaatcacagcacatacgatgtgcatctcatgcatatcctactattgttgcatattaaaagaacctttgatgacacgcaaattttccgaaaagtaatgctctgcccttttagccagatcaggttctaatttgttctacagaaaataatcagaaataggtcaattaataaaatgtgtatgtcattaaccattatagctcaaatacagtgttaacatatggtatcttaaggtgtccacaccaaaagaggtgacattttaagtgtggtctagtgtgtccaataccacttattaaattataagtgaggttttaaattcaaccacatataagatgagatcacaagtggttttgggcaccaagagccttatagcattaatcttaactatagtttatccctcatcagaaataaattgaagaacattccataaaaattagaataattgatgtctcaaaatatttcaagaatgaatacagaagaccatgtacaaacatccaaaaacaactaacaacaattgacccttataagcaataggggcaaagaagcaacgatagattcaaggtttccaaatccttcctaacaagaaatgatcaatatgcaacatgcattgagattgactgctatataattgttgcaaatggagctgagtggctgagagtacctaggctggactgtgtgaagctattgtcatgaaaatatttccattaaaattgttcacaatctggttcaatgtttatgaacaaaagatgtcgagcctgactaactttcaataaagaaaaacgaaaaatcacgataataaatttatgccttttcttacaactggggactgatcagttgacactacgactgtaaatgtcaatttcgggagtataaccagagcagtctctttatctctagtaaatagtcaactttatttttctgtacaacaaatgtacagttgatattcttaaaacatttttctattcgacagtaggctaacattacattttatacctgtcaggctaccccttgtagacaatagacaatctgaagtcaaatataaattggacagccctacatggaattatttctcctatattatgtgatcaatttattttgtgcaagtactttagtttctttttataacctaaactatcaacgagcttggtgaggtaaggatattaatgttgaatgctcactatcttgctccccacttcttttctctgatttcttacttctttcatccatttttctcactactgttctatagtataatgttttgagtctcatttttatttgcctatatataaactttaattttatcctagttagaaaaagttaaatttattgagttttgaatgtctaggattgaaaagcgaataaaagttataataatgtttatactctttaata

SEQ ID NO: 184983 - DNA, 7043 bp, Cannabis indica
ttgatgataatttttctcaatggagacagcctatggtacaacaagccatatctcaggttacgttcaatgtcatgtgaattcgttttgtttgtttccaattgttgcatttgactttttagtttggatgtaagccataatttagattcttttagaatagcttgctgacaattctggctatgattgcagatcgtaataacttcgtcgtcatcattataccgtccgctactccatgcctgtgctggctacttatcatcattttctcaatcccatgttcgtttctctggattcatttagtttttttgtttgtttgtttaatcctcatcatggctgtttttgtgtttatatgtatagacatatatgtgtatacttttaccaataactactatgctgattattgctgaatagagatatattttcatgcaaacttaaatatcattcgattgaagccaagctaccaaaaataggaaaaaaaaaaaaacctggtggaactgtagaaatgcaaaagaacattaagaagaagcaccttaacaacaacagaactatcttttttttttttgaaaaagaaattaaataaagaaaatgtctataaaaagaggttttgaacaatatgtcatgtgggggagcatgcaaaattattgacactacatatccagaatgtaaattcatgcttgtcaaagtggcatgcagccttgtttcagtattgcacgatggcttttggtaatactgaagtggataacgtattgtgctgctggtttaatttatcgtcgtcctccattaacagattgaagttttttttctcactttgataaagagtaaacatctggtggttcagaacttacgtctgttctataagtactaccctgcgcagatgtgaaccacagaattttacatatgctaaaagtgtttgaatttttatgtatgaattaaattatttcattttggtggaactctttatgtttatccgattgactaattagcaactccttttacagagcaaggctgctagtgtcctgattgacctgtgctgtagtgttctagcgccttggatggctcaagtgattgcaaaggttcacctaaggcatatttatgttctgaacattctgcaatcaaatttttgtaatgaattgttggttggcttgaatacgtgtagtcttgtcttctttaaaattcttaactctgcaagtttgcttattacaggttgatctaactgtggagcttctagaggatcttttgggtacaatccaggtattgttgtctattctctacaaacaaaacaaatacttttgtggccagtggtcacatgttttgtctaaaaaatgctgtcaaatacctaaactcaaaagtctttaaaagaaatatttaaaaaaaaccctattaaaaagagaaatataaatgaaaatttggctataccagtatacctattcaattggagctatattgtacacattttgaagttatataagctttcattttctcaattaatggtaattaagtactttctttcttcccattacactgcagcagttattagagttcttggtggatatgttatccttggctcttgcttttttttttttttaattcaaacatagtatttgctcttctatttgacatgtcatgtactttaggataaacattccctggctcgtgctcgtgctgctttaaaatatattgtgctggctatttctggtcatatggacgacattctggggaagtataaggtaaagctttttgctttttgtgatttgtcgcagaaaaaaggacatgatttggcagactgagtatttttctctgactgagaaacatatatttttttataaaaatgcgtaataattgtgcagctcacgtgtgtgaagtgataagatccttaacgagtaaaatttcttggtattggtaaaacagtgcttatgtagacattgcagaatggtgatgttagtttgttatttcggtcactgtttcaggaagtcaagcataaaattctctttcttgtggagatgctagagccatttattgatccggccattgcttcattcaagagcacaatatcctttggacatctctcttctacttatcctgaaaaacaagaaagcaattgtgtgattgctctcaatgtgattcgtacagcagtacaaaagccggcagttttaccctctttggaatctgaatggaggcgtggctcagttgctcctaggtaatattattcatgtgatcatgctatgtaatgtcctagtttgcttaacattgcaaaatgtcttgtgagaacttaattttagacaatcatcctcagaaaccattaattttttttaccttgaacagtctgaaaccccatctaccctttagacaacaactgaaaaagagtaaggatttaaggatttcccccttaatttctcttggatgattaagttaccttttttctaaatagatttttagttttgttcttttggtgattttatttcctttttcctgtaatacctttttaatcaataaaaattattgtctcctattaaaataaaacagcagaggagagcaacctaaccgcataaagataaagaataagacaaaaagagaaactcgctaagataatttatgttgtatggaactaaacatacgtatttatttcttattccagtgttcttctggctatattggaacctcgcatgcaattacctcctgaaatagaccttcgagcttctattttgaagccctcagaacttgaatcttcaagtggtttatccaatcccagtaatccttgccttggggtagtttgtttaaaatcaaacaaccaagatgaacttgatggcaaaacaggtgtcgctgatagtgctactaaaatggatgtttttgaagatgtcaatattctttttgctccaatagaactacgtagcatctcacttacaaatgtatataatgattttaatgaaagtactgactctaacctcggaggtgccagttcagaaccaaagctggtggctgaaaaaatctttcccaagcagtctcatgttgacttgataatagatacaggttttaatgccgaatacttcaacttacaggaagattactttcaacttataaactatcaagattgtgagcttagagcatctgagtttcagcgtttggccttagatttgcattcccaagataagattacaatggagagccatcatgcagcaatagatgctttgctcttggctgctgaatgctatgtcaccccttttttatgatgtccttcaaaaatggtccgaagttaaagaaccagatcaacatcaaagagactagggctctcaaagaacacgattttgagagaaaagtctctggaaagtctagaactgacttagaaaccatagctctactagaaaagaaaagagataaaattgttctccaaattttgctcaaggctgctgaattagacaggaaatttcaggaaaagatgtctggtggcgatgatgtttcgtgttatgttgatatatctgatgaacaagttgtgaacttgtctttacttgatacacaggctgtggatgccatcacattggttcgacaaaatcaatctctgttgtgcaactttttaattgaaaggttgagaagagaacatcactcattgcatgaaattctcttgcagagtcttgtttttttgttgcactcggccacaaagctatattgcagtgctgaacatgtgattgatattatattacgatctgctgagtgcttaaatgggatgttaacttccctttattaccaattaaaagaaggaaaacctaatctggagccagaaacaatacatgggatacaacgtcgatggatactccttcagagattggtagtggcttcaagcagtggtgaagaaggggcagaatttgctatcaataagaacaatggtttcagctatacaaatttgattcctccttcagcctggacaaatagaatctcttcattttctagatgcacatctcctctagttcggtttcttggctggatggcaatatctcgtaatgcaagagagtatatacaggaccgaattttccttgcttctgatctgcaacagctgacagatttgttatctatatttgctgatgagcttgctgtagtggataattttatcaaccatggatacgaaaatgtgaagttagaagaattttgcagccaacgacatgaatacaagtcttttcattctttccatgttctttaccctgatctatataagttctttccgaatatgaaaaaccaatttggaggttttggggaaaccattttggaggctgttgggtcacaattgagatcccttccttccactgccatgccagatattttatgttggttctctgagttgtgcttgtggccattttatcatgtggatcaaatggcgtcagaaagcaattatgattgtttgaaaggttacattgcaaagaatgctaaggtggttgtcctttatgtactagaagccatcataactgagcacatggaggctatggtgcctgagatccctagagtagtgcaagtgcttctgtctctttctagagcttcatattgtgacgtttcatttatcgactctgttttgtgtttgttgaagccaatcatttcatattccttaagtaaggtgtctgatgaggaaagactattacatgaagactcgtgtcttaattttgaatcattgtgttttgatgaacttttcaataacattaaatctgatagaaatcaggacagaactaccgaggatccatttaccagaggattgacaattttcattttggcttctatttttcctgatttgtctattcgacgtagaagggagatgttgcactccttgctgtcctgggctaactttactgcgttcgaaccaacaagttctttctatgattatcttgtcgcattccagaatgttatgaaaagttgcaaacttctgttagttcagatgttacagttatttggtgctattccacttcagtcatcaactggtggactcctaggtaacaacttggattcacatttagggtttttaagtgatgtctaccaaaacgaatttaacgaaggccctattaagttggaggatagcagtgacgctggtaatgtaaatcagaaagttctcaatttgtccacagaggaaattgaagaattttctaaagacttagaggttctcattattaaacttaacccaacaattgattcatgttggaatcttcatcatcaactggctaagaagcttacaattacatcagcagaatgtttcatgtactcaaggtgtttgtcatcagttgcacagaaagctgataatatgcaagacattgacagtgaaacctctagcacatccaagtcagctgaccaattccttgttcattggagggttggtcttgaaggaatttctgaaactattctgacccttcaagaaaaaggttgctgggaagttgcttctgtgatgcttgattgtctactcagagtaccccactgttttgtgctgagtgatgtcattggttttatttgctctgccataaaaaataattcatgcagtgcgccaaaaattgctttgcgtttgcagacggataaatggctatcgaccttactggctagagatctccatgccgttaatgaatgtgaggcttctctggttaatttgttctgtacactgttgggtcatgctgagcctgaacaacgattcatagcacttcagcttttaggaaaacttgttggccaagatatgaatggaagaactcacctgcaagattttaggttttgcaatagtctttcccctggcctggtcatgtctattcccgaatctgcaattacttatatggtatcaagtacatgggatcatgttatcgtggtggcatcatcagacgtgtctttacatctgaggaactgtgcaatggcccttcttgtgcaatatctcccatttgctcctaggcaccaattacaatctttcctggcagcagcggatagtgttcatgggctgggaaagcttggtcaaccaacttgtgagggcccattgctacgactttcattggcacttattgctggcgcttgtctgtacagctctcctgaagatatttcattgatccctcaaaatgtttggagagatattgagactttaggattgtcgaaatctggtatagcccttttatttagccgtttgatttgatataataatgcacctgtatgtatccatgcacttttttatcttgaactattttactttgttttgcagaaaaaaccaggattggagatcttgagaaagagcttgccaaattctgtgcagattaaaaaatgacgaggtcgaagctaaagaggtagtacaaagagacacaagttgtatttaagtgaaattggcaagcttttcttctagctgttttttatttactgacataaatgtttgtttcaccattgcatttaaggctctaaaagaagtactctctacaagctcttcaaagcaattgaacccagattttctgagtacccgggaagcaattcttcaggttaggagcactgtaacttaattcattgaaacttacaacacatgcttgaattgaactataaaattgtaacttgtgtattttatttttcttactgtagctatgtaataggatagttgaccactatgtgctgtgtagtaatatttacatacatatagaaaacgattaggtaggggttgtttttaatcattatttatagttacttttagtactttcggtacatgtatatattgcaattccattttttcacatgacaagtgtattaatgtaattatagggaacgtcctacaaatttttagatagtttcaaataatttaaaatgctgaaattaagattcaaatgcaacaagctgttcaagtcctgattttaacatcttaaattattcataaattttaaaaatttgtgaaaggtccattgtaactgcattatttgacgtcatgtaaaaaaatggaattacaacttatcatgtatccaaaaattctaaaagtacatataggtatccatatttgtatatataaaacctttaatggcagaccactaaaatgttactatgatgacataactatttttatatatatatttata

SEQ ID NO: 184984 - DNA, 4409 bp, Cannabis indica
tagtcaggtatatcttcttctatctatttcaacggaagttgtaattagagtcttcataaaataattaatccaatttagattgaaaaatttaaaaaattttgtaattgtgtggattaaatgttaataatataaaaaataacatctaatctaatttacacatatttatatatttaaaaattatataaacaattaatattttaatataaaaatataataatttttaactgtaaatttcattcaattaaactaatttagcctcaacaatgtaaaagtagtaatgtaaaaatttaatacataattgtaaatatattttaaaacttagtaaattaaatattttatattccactcttatttttatatggaaaatctaatgtaatacaaaattatataattaaactaaaacatttctcttattagatgtagataaaataaataatgtaccagacccttaaaatgatgcactatgtattttttctttgtagattatttattaaaagataaaaggacatgttataataaattttctacacctttcttttaggggaatataattactgaaattctcaaaaaataataccttaaaatttcattgaaaaaaaaaagaagaaaaacctaacacatctaaaatattgtgtcaatatttaattatttattggaagagtaaagggaggtggtcacaggtagggaagtgtcaaaatcaactaatttgataattatatatatattattattatttattttgaaaatcacctttttaaaactcccaaaaaaataataatagtaaagtaagattaaagtttgaacggtcaaaaaagaggcacacaacacaaaacttctctcacttgcttccaaatataaaataaataaaatattattattattattattattattacttgttctaattttgtttgccatcaaaacactcatttaattattaaattaaattaaattaaattaaattattaaacattaatattttaaaaaaggactaataatttagggcttttttctttgactgtcaccagcgcatcaaaacacaaccacatacacaaacaaaacagccaaaataaactcaaaacacaaattaacacatcactctctttctctctcttctttctctctcctcacacaccaaaataatcccaattctggaaactacgcaaaaacaaaaccaaaaggaaaaccctcaacggctgctctctctctctcaaatcaatggatctaggcttttgatgctcttcttctatgctcaactcttccatgatccctttttttctgcttcttccggttattttttttcccttctaatttaataattattttgttgctttttatataataaaaaaattaaaaaagaagttttttccttctctgtgtatttgttttatggggggtttttttttttctttgtttttgttttggttatatggatcagcttcctctggtatgttggtatttatatattttccgttaataatttttttttgtgagaattatttaatattttatttattttttttttaaaaaagtgatgaacttttatatgttttagccttgaggttaatggttttttgagctggattcgttttgttctgatctttgtttttataatatgtatacacacacataaaaactgtggttttggtaaaataattgcatttattgcatattattttcagtttattttgtgtcaatacttttaagtgggttttgataaattttaaaaattggtttttggtttttttttttctttaacttaaaatatttattgatccatcacatctatctttctttgtttcatttctcttacttcttgtttgtgtccagaatctgaaaatattaatatattaaactatatgttttgtttcaactgtttccctaagaataaacatgttgctggcacaaacaaatgtgggtggggatgggtcactggggaactgagaacttatcttgatcttttgatggctttgattgattacagttctttatctattagttagtactaatggatttttttatgttgttggagattttatgtgtgagagagcttaatagatgctacttccataatacaaatggatttacaagtgttttgatttgaacaggtaaatggttagttaaatcaaggtgaaaaacataacaagacaagaagagtttttctttttttgaagaatggcttcagtgggggtggcacctactggcttaagagaacccagtggtcatgctggtgttgataagctacctgaggagatgaatgacatgaaaatcagagatgacaaagtatgtcttctattcattttagtttttctttttgtgttacatttggctgttttatgttcttgtgtttttcagttacaatgtttgtgccaggtgctcacgaaatttcctttcttctcatcttttgcaggagatggaagccaccgttgttgatggtaacgggaccgagacagggcatattattgtgaccactatcggtggtagaaatggtcagccaaagcaggtatggcactacagttagatgtttacatgactagttataacaattttttttttctttacctttctatttgtatttttcctgtgttgattctggctgttgtgattgtgaaacttctgaaacttttattccaaaattaccatatatagaaattgcgcataatggtgatatgtgtatttttttatgatttcagactataagttacatggctgagcgtgttgttgggcacggatcatttggagttgtgttccaagtaaggctatgtacagtttcgattatttgtagctgtgggctcttttatttttaaatggattctactttttcctctcaaactaaatgcacttttccaattgtatgctcattttctttttgggtatctataggcaaagtgcttggagacttctgaaactgtggctataaagaaggttcttcaagacaagaggtataagaatcgtgagctgcaaacaatgcgccttcttgaccaccctaatgttgttgctttgaaacattgtttcttttcaacgactgaaaaggatgagctttatcttaatttggtacttgagtatgttcctgaaactgttcatcgtgtgattaaacactacaacaagttgaatcaaaggatgcctctgatatatgtaaaactttacacataccaggtatgctctaaaaagatttacagcatcttccaattctatttgtcattttacgtataatcatttaaacatgttcttctgttgaatgtacatgctgatattgtatgtcatctctttttgatcatgttcgtattgtattacttgtggtttaacagatcttcagagcgttatcttatattcatcgatgtattggagtttgtcaccgagacattaagcctcaaaatcttttggtatgttaatatttctttcacatacaacgtaactatgttggaaacagcacagctattagtggacacgagttatttagaaccgaaaagttctttttggaaagtattttaaagttgaaccttttctgtgtttttctcaggttaatccacatacccaccaagttaaattatgtgattttggaagtgcaaaagttttggtaagctttgtttttttttttgtttttctgtttgttcatacgaagctccttttattttatctaacatgtttattttgttcttaggtaaaaggagagccaaatatatcctacatctgctctagatattatagagcacccgagcttatatttggagcaactgagtacacttctgcaattgacatttggtctgctggttgtgttcttgcagaactactacttggacaggtaaatagtttttgtgaattacagtttataaataccctattgattttatgccgctcacagtgaatcttttttttcttattctaccagcctctgtttcctggagagagcggagttgaccagcttgttgaaatcatcaaggtacctttttatgtagctttgttgtgaaaccacctagcgaaattgctatcagcagaaatgctgttgtgattttcgagagtctatatttgtttgatgaggctacaacagatgaatgttttgctgaacaaaatacttcttcacatcttttgtgtaggttttgggcactcccacaagggaggagataaaatgcatgaatcctaactacacagagttcaaattcccccaaattaaagctcatccatggcacaaggtaatatatcaggatatacatctatggttgatccttcaggattccagactttaatatatgcttatttctctttcagatattccacaagcgtatgcccccagaagctgttgatctggtttcaagactactgcaatactctccaaatcttcgatgctcggctgtgagtagtagtactttgcagttgtagtgcttaatattttattgtgacctatttttttt

SEQ ID NO: 184985 - DNA, 7307 bp, Cannabis indica
attattattattattattcatggttaagtggtgataaggaggtcataaatcatcgttttgtttagttgttgtgccattatatattttgctgtcgtaggtggtctaatagttatttgctatttcagaatcatatggtacagcttttagaaacagcattggttgatggagcaaataaagtacctgaggcagtgcaacctttatctgcaactagcctcttagagttgccggtggttgctagtaattcaagtggcatggagtttgttaacagcattgagtgcaatcttcaaggtattttattttattttttttctaaattttttggctaatatatcgttgcggtggatgcatgactttgtctcgttgttgttttaactaacaatatgttttttcgtacttttgcctcagatagagctatttgttcaagggaggagaaggtggttgaccggatttttttgacattagcatctgagtgtatacaagctgatagacagactactgctctaactgaacctgttctccctcaagatctaaaaaaaatggtttttctgtctcaacattgggctgtttctcatgtggagtgcattcaaaagttgattttggtctgcaaagaactgattgttctccctgatatgtttgatgagaagatggctggtacaaacttccgcaagagattaatgctcagtttgaggattttaaagctactaggaagttttgcaaaggacattcccttcattgaatacgatgtctcattggtccaggctgttgcttctattgctgatacattgccttacttatttagacctggatttgaattcattagtaacaatgctgccgtggagggtagctttgaaaatcttgctctgtcgctattggaagaatttcttgatctttcccgggttatattttgcaacagttatgtttttctgaatattcaagcttgcataattgcctctatattggacaatttagactcttcagtttggagatataacaagttggctgccaacctgaagcccccactagtgtattttcctcgaattgttatttacatattgaagctcattcatgacctcaaaagacaaactaaccgaactcttagctggaaggagttggacatagagattattggcaaaaatgttgatttgccgactgatttgccttcttgccatgttcataaggagaaagttactttgcttaagaggtacacatttgaacaattattggagatgattttcccttcctctagtcagtggctggaaaatctgatgcatgctatctttttccttcactctgaaggtatgaaattaaagccaaaagtggagcgatcgtactctattaatgcaaaaactagttgcaattctgaagttgaaaatgttgttttccatgaagatgaggcactttttggagatcttttctctgaaagtggtcgctctgtaggatctgtagattgtaacgaacaaccacctgctgctgccaattccagttccagccactgtaacatgcccatggaagctgctattgaactgttaagctttctcaaagttggcatcttttctcttgaatggcatccttctctttctgaagatggctgcatgaaaatgagggaaaatcatgttgatatattgctctctttagtcctatctcaggggtattgttccgatgataggatttctgatgctgttatcctttacatgaaagagaaaaaagattggtcgtgtgcaagaaatttgcttcgaagtcttgcaagatcttcttacacgacatgctttgtccgattcacttgaagagtaccttgttgagaaagtcttgagcattgagaatgacatgtttgtttacaatgaccagacccttactttgctagctcactctcttttctgtagagtgggcgcggctggtagcaaattgagagccctgattttcagagaatatgtgcgttttattgttgagaaggcaaaatctatttgtttaaaatgtcctagcttgaaggatgttcttggtactcttccgtctttgtatcatatagagattctactcatggcgttccacttatcttcatcggaagaaaaggcatcactagcaaacttaatagtttcttccctcataacaattgatgctccaacagaaagttttgacagcatgcagttatcatgctgggctttactggtttcaaggttggttttagttctccgtcatatgatattgtatccgcgtacctgtcctccatctttgcttctacatcttcgctctaagataagggagtcccctcattcatgtgcgcgtcagcctaattatgttaatgatcatatgtcatcttgggcttcaattgctgtaaagagtgtaatgggtgcttggtttgaggaagaatctatcatcggtagcttgataagtcaactggttgatgtttcagcccttaacacttcagtttctaaagatgatgcggcgattggtttcttatccttgaattggaatgagattttgtccaccacttcaaggattttggggttctggaaaggtagccaggctacagtggtagaggatttaattgttgaaagatacatgttcttgctttgttgggatttttgtgctgtcgattttgcatctgaccaagtgctgtctttgaagaatgacccacagattcctgacagttctgacacagaatatttgtttttcttcagccgctcaattctaggccattgggatgtgctcgacaagtgtcctaatttttctgaagttgtacttcacttacttcagcacttgaatgctgaacatttatctgaagatattggggaatcaggctgggatttcttgagaaatgggatgtcactttcattggtactgttcttgctaaatgatggcattcggagacatggaatgaagaatatagtttctggggataatgagcataaacctctttctgagcacttgatttcttccatgatggaaggtggccaagttgaaattctggtaaagctgctgtcatcttattgaaaagatatgtatgcattcttcagaaatcttttctagctacatttgatattagtgagaaaggtgatggtagcttttcacatttgctgctcctaaagcatactggatttgagaaaggccttctagatgggattgagaaaattcacactagctctgcccaattcgagtctgtttttgacctcttacctaagttggatgctgttgttgaccaaagagctaccacagtttgtaatctctcctgggaatctatattgcatggcttaccatttaatcttcaagttcctagcagtatccttctatcctgccttcttagaataagagggattatttctgttttagaaggaattctcaaaacagaagatatgaaaggaagtggctgttttgggactgaggtactttgtgagatccttgatagtgtgatgaaaatcaagtacgacaagatttttgaaagcattcatgacaagtgtgatgctatttatcatagtttggttgttgggatgggagaatcggactattccaatttatttttattggctcacatggagggatttttaagagacataactgtgaggggagtaagtgacagtaatatatgtgagtgcattattaccaaggctattgataccatggatagcctcaggaaagatcctacaaagtttagtgttttcaaattttaccttggtgtagaagatgtttcggagaagttgaaagagctctttgagtttcaacgtggtgatttattggtcctgcttaattctctggataattgtttctctgaatcagttaatgtgaaggttctcaacttcttccttgatttgttagctggagagttatgtcctgatctcaaactgaagatacaaaataaattcctcagcatggatatgacttgcctgtctagttggttggagaacaggctactgggttgtgtaacagaatcttcagctggagtcagcagtggcaaaggatgttctattcctgtcagagaatcgaccatgagttttattttatcccttgtatcctcacctgaaccgcaatcaagagaactgcagtctcacattttcaaagttgtgctgggttctctccatcgtgcttttttgcattttgatattcatgtatccaagtcttttttccaatttactgtacaactgtctaaaggggaaaactcgatgaaattgcttttaaagaggactgtgatgctgatggagaagctagttggtgatgagcgtcttctaccagggctaaagttcctttttggttttctcgaaactgttctgagtgactgtggttctagcaggatttccccagaaaggtgttcagggaagtctttatctagtaatactcttgctgttggacctattccttctaaggaagtaggctcaaggaagaactctgaaacactggttctatctgctgatcaaggaggatccacagctcttgaatgtgatggaacttctgtagatgaggatgaagatgatggaacttctgatggtgaggtggccagcttggataaggatgaagaggaggatggtaacagtgaaaaatctcttgcttctaaagtctgcacatttacatccagtggtagcaattttatggaacaacattggtacttctgttatacatgtgatttgactgtgtcaaaaggttgttgctctgtgtgtgcaagagtttgtcatcgtggtcaccgtgttgtctattctcgctcaagtcgtttcttttgtgattgtggagctgggggtgttagagggagcaattgtcaatgcttaaagccacgtaaatttactggaatcagcaatgcaccagttcgtaatgcaagtacttttcagtcatttttaccattcccagatgatggagaccagctgccagaaagtgactcagatcttgacgaggataccaatacagatatagataatccaacaaggttgtacatccaaagagagcttcaagatggtatcccattgttgcttgatgaacttgattttgaaggtcggattcttgagctttgctctttgttgttgccttctataacaagtaagagggactcaaatctgtccaaagataataaagtcattcttggtaaagacaagcagctttcatttggtgttgatctcttgcaattgaagaaggcctacaaaagtggatcactggatttgaagataaaggcagactattcaaacgccaaggaacttaaatcacatttagctagtgggtctcttgttaaatctttgctgagtgtcagtactcgagggcgacttgctgttggagaaggtgacaaagttgctatatttgatgttggccagttaattggacaagcgaccattgctcctgtgacagcagacaaaaccaatgtcaagcctctatcgaagaatgttgttcgctttgaaattgtgcatcttacttttaattccgtgatagaaaattaccttgctgtagcaggctatgaagactgccaagtgctcacattgaatccccgtggtgaggttactgatcgtcttgccattgagcttgcactgcaaggagcgtatattagacgagtagactgggttccaggttcccaagttcagttgatggtggtcacaaacaagtttgtcaaaatatatgatctatcccaagataacatcagtcctgtgcactacttcaccttaccagatgacatgattgttgatgcaacacttttcgtggctcagagaaggatgttcctgtttgttctttcagaacagggaagtttattcaggctagaattgtcagtggaaggtagtgttggggctacaccattgacagagaaaattcaaatacagggcagagatatacaagcaaggggctcttctttgtacttctcaacaacttataagttactctttgtgtcctatcaagatggaactactctgataggtaggctaagccctgatgccacatctctaaatgagacatctactgttttcgaggaagaacaagatgggaaattgcgccctgccggcctgcaccgttggaaagagctgctggctggtagtgggttttttgtttgctactctagtgcaaaatcaaattctgcacttgctgtatccattgaagcaaatgaattatttgctcagaacatgcggcatgcagtaggttctacctcgcctttagttggtgtaactgcttacaagcctttatctaaagataaaatccattgtcttgtcttacatgatgatggtagtcttcagatatactcacatgttccagttggagttgatgctgctgctaatttaactgcagagaaggttaaaaaattgggttctggtattcttagcaataaggcttatgctggtgtgaaccctgaattccctctggacttctttgagaagacagtttgtattactgcagacgtgaaatttagtggtgatgcaattagaaatggtgattctgaaggggcaaaacagagcttggcatctgaagatggctacttggaaagccccaccccagcaggatttaaggtatttttcttgaactctatttaccagttcttcattggctcttcctgttaaactggaagttcttgttgttgctgtgtcatttgtttattataatgtgtacatgctgtaccattgattaaaagtactaaaattaatttgtttaaatttttttatgaaaaatcttttttattagtttcaatttctgtgataaaatttattggaaaaaaataataagttagtatttaacaaaataaagtactaatgtacctaagtcttacacaagaaaaaacattaaaagagctatgaaaaatgataataaaagaaacatatttgtatatttcttatgagataatttataatggataagaagttatatagtaactatacactttttattatactagttgaatgcacgtataaatatattttgtttattaactacattaatatatttaactttgtgcaaataatttataaaaattaaaatataactaaattttgaaagtaaatgagaacatatatattttggtacatataagtttggagatacattagtctctttattgatgcctttataaattattttaggtgtaaatgaaacttacttaaaacttatttatatttgtattttaagaatgtttcactattttttttttactttcagttcacaaaaatcacaacttgttgtcactaaatgtgattttagctataacacttgttgtaactaaaattaaattagagacaatttgtatctaaatactacattctagtgacaataatttttgttgtgctaaaagtaatattttatttattttttttttttttgttatactatgactaaaagtaatatttagttaacaaaaatactat

SEQ ID NO: 184986 - DNA, 5444 bp, Cannabis indica
atatagtttagtatatgaggggagaactgataacattattgagatcttaccaattgagagaattcctcccatgaaaagcatgaaactcccagtttttcaccttctttcttttgcaaacttgtaacattagcaaagcttacaattgctgaaagcaacgaaggagtattttggttagcaacctcacataacaatgcactttgtttggctaaaaaaacataaaagaaaaaattaataacctactctttatgtatgaagaacagtttggcaggcatgatagaatctgcacaaatagtagaaacatcaaaagaggcatagtcttttctatttcactcttgctatatatgtttacgaaactatcaaaagtggtttttcaaaaaaaaattattattgattaaaaatacttacagaagggattttgttctcttgaacaaatgctattgacacttcaccatggttaatgataaattcaactgcattgggacctgtcacatatacgtaaaaatacttagttggattcttctaacaagtattctactactcaataatttttagagtaattcaagaaaaatctccctgcataatggtgacattctaaaaagaaaacgaggaaagtatacctaatgtgtcatacaggggaacatatgtcacggcatggctgtaacaggcctgttgaaaccgaaatgaacatataaatgaatatacaatcttgccataacattatatctatattgtttaaatcacattccaatgtttcaagtattttcacagatataattgaaagtaaactccctaaaaaatacgagcaatctttagctatgtcattacaaaaaccaaatagttaaacaaataaatataatgagtgagttgactactttgttcacttaaatgttattactaatttaagacatgaacatggaaagccaaaggaggtaaatgagaatgcaaccatgttttacaaaatacctgcattgctatgatccactgcgaacaatttgttccgtatataccacagcggtctccctacagataatttaagaggacaaaaatagagcaattaatttaagaccaaaacccttttaaaggtaatagtagtacacagtacttattctacaagaaatgaaacaaacttaagtaagaggttaattatgtagttataggttattattctgatatgataatgttggtagctaatcctatattctatgtaatatgtatagtcttcctctcttctccactatctctctctgtctattcttgtgatgcaccaaaatataaataaagaatagtattccattacatttcaactcttgaacttttatagctcactaactgatataaacataataataagaataataaagagaacacataaaactaacaaattagactattttaggacacctcataaattttctagtttattatcactcaacacattgtctcgatgatctgttgctaacttgagagattttggatcctaactgttgagaatgcaaacaaagttccatattagctagaaataggaaggatcatgggtataaggatatatatctccattggtatgaggcgttttggaaaggtttccaagaacaaaactgtgagggtttagttctaaagtggacaatatcatacctaaagatgtttggtgtccgatgatccttgacactaacactgaaattaatccattctttccacgtctagagcatgctttttctatgtatagcaggaattttgtgtgttcaagaacgcataaatgaactaccatctcttcaagattcaatgtttgaaatgcagcaacaactagaagctattccaaaactccaaatggacactaaaactttgatcacatcttcaatggataaaccacgcattgaaccacacacgtcaccaccattcccatcaccaaatctaatgcttccattattgttgcctcttcttcaacaaactccatagccccatcatcttcaactaatagactaccatttaagacatcgcaatgcaagagaaaaacacttaaggcatttcttctattgtgagaaaaaaattggcaaatcaaatctacaaataatttgtcttttttttttggaaaaggacatcatttacaattaaattctgttgttctggtaagtttgttgggaggaatggaaattaaaaataggaatgagaaaaagaattttagctgaatcgaaatttaatatgctaaaaaaaggctagttagattttttgcccctaaattttaacatgtaccaaatcgtaccccaaattcttcaaaccatcaaaatttttctctaaactattgagattgttggattcgaggacttctatctaattttactaacagatgtctggcgtggattaaaattcagaggtacaatttggtacatatcaaagtttggaggcacgatttggttcatgtaaaagtttgagcgtgtgatttggtacatggagaatcaacacgttagtaaaattgaacaaaattagacagaagttctcaaatccaacaatctcaatagttcagaagaaattttaacagcttgaaaaatttaaggaacacaacttggtgcatgtcaaagtttggggacaaaaatcgtaattagccaaaacaaaacaaaaatcaatataccactaaaattgtggaaaaatagaatgacaattaatactttaaaatgcaaaggatggataggaatgacaattgattcaattgcatctatatttcgttattcccaaccaaaggctgtaaaccagtaatactggtgattagtttgttagttgtggtaattaaagttagttaacaattctattaacattgattggtttagcatttaaggctaacttgcaacgcacacaactcatgaagaaccaagccaacaaacataaacaagacttgacatttgaagtaggtgacaacgtctacttgaagctctagccttttagccaacagttactttataaacgcagcaatgagaagttgatgacctccaaaatctgtgccccatttcgtattgagcagaaagtttgtagcatagctcacaaaaactacaacttcatccgaatgctcgaatccacctcattttccatgtttcccaattgggcaaggtcatacgaaatcaccatctaacaaccaagatcttacttgctttgactcaagacatggaaccccagtaacttctcagtgtgtagcaatctacacaataagattataataaaccgaagttctcattcactaaaatgatcaaccttcatatgaagacttctgagaaagatttgaggtgataaacacacattatcctcatttcaacctgatgaacaaagttctagtttgggtggacagtactcttaggaccctaatagataacattaattttgtataggtgttctaattatagtcccttgtcataaaatgggtactaaatttgggaattgtattagaaatagtgtgaaaagacaataccatatataagatgtgtaagttacttaattttgacataaaaccatatgcacttttttctaaaattctaacaaatattagtattaggagagcggaaggtctctcaaatcagctaattgatctgtccaaaatttcctaagatgatttccggtgctaagacaatagtactactaccttgttactctttcctaaaagaagcaaacaaaacaaaacctgttacatattcaacacacacttacaggattcacaccacggcttctcatggcagaagccatacgaacggcttcatcgtggacctcctgatacgtgagccacacgtatggacctgcctgcaattttcatttaagcaagcattaagacttgattcagttcagcttttccacacacacaaaatcaaattaaaaataaaaaataaataaagtacttagattcagcttattaatgttttttgtattttagtctcgaactaagtactcaaacagagtgataggtacctttgaatctgtaatttggcgttgacccagcaatggagactttgggttcctcttaacagattcactgttacaaaaatcagttgttagcatttgcggaaagctatatacattcgcacaattgaattacaaaatatcagagtttgaactcatgtagacgcagagcatttaacagtacagcatcaaggtttttttatttttttttaattattattattattataattatatcctacaacgttcaaaagatggtaatatcgaaaagcaatgttgaaacaagattaattggtaacccttgtaacttattgtaagctagttttgaggcatgtactctcagctggacttcacatgtcatagatagtttttctttgagatttagacgagaacaactctaccaaacatggacattggacatatttatccaaaatgaaaaaggcaaggatagcttgtgtacctgaagaagtcccagggagagtgtaatccttcaggcaactcaagcaagccatctttggcataaatgctccgataaacaggcccggctgatggcattttctctgtggccggccttgcttcctcaaccctcacagtgtaagacattatcacctacaatgcaagaatcaaaagcttagtctcattaaatatcttttcttctttttggaagctactatttatatatgtatatatagatatatctgtactttttgtgactgtccgtttactttttcttttgagatgttctgaagcttgaagataagtacaaatggagttgtaaacaactgatgcaaacataaatatatagctcacttataacaaaaaaaatgctccaataatatataaaagtgattcaaatttatcacatagtaaatattgtgcggatatatatttttattatttggcatatagtaaatattttgttgaatttgagttatgtattaaatctgcataatcataaatacataactttattattatttttattattatttttatacaatttttattattattattattatttttttgtatatttagttataaatttatgttctttttttatatattaagttttataattatatattaaaacacaatattataaattaatccaaatatatgacaaattttcttttcactttaaatataatacaatttttaaatcaggtgtaagatttgagataagagtacaagttaaagcagcaaaaagggtgataatactggtgggagagagttagttcagctgaacaccataaattcttgagtacttttaaaagaaaacatttatatttgagtgtgaccccatccccttacatcggcgtttattaggctttaaagttagttgtctctcactcactcctagctgtacgtacattatattaactggtaagaataagaaatcatttataatggtagatggagtttggtgagaatgttacattgtttttatttttctttacctcacctaattaaaatacgcaataaatgcaattttccttttattttatttt

SEQ ID NO: 184987 - DNA, 2811 bp, Cannabis indica
attcttggcatattttaaacttcaatagtccctgtttagttttcactttatttagaattgcaagtaaaagtataaaacgatgctttggaactgataaatgattccaaaccttctaccaatattaagagccaaatagccttggttgattttgtacatgcaagagcaaaattgttgcatatctactacttgcttgatcttattttttgtgctcaccaatcttctccaacaccagcttgggcaacaaattatacctccactaatcttttcctttgagatatatattattatacttatattttgagcaataatataatattgatacatgtaataaaattagactatgaaccagcctgaaattaaaaaaaaaataataaatacgttcagacaacttgccttaagaagtacagttggtagaattattcaaactcatcattttaaagacaataatgagatgtgaataattgatgagactagcgaaatgaacgaagaacagagaaagtccatctcgagatacatagaatacacgaatgtttggaaagggtagataaaataaattattcaaaaaactcacagctcattgacccatgtactcatgagtatgttgaaagactaaagccaacatccccaacatggttcacctcacaattttcatactgtgataagcgtctcgtgtatgcctcactcagcactaatggaagaacgtgagaagtacttcctgacttatacttagatgctgatttttatgataaagcatctaaaggaaaatagttgcattgcaagaagaatgacgcatagtcggcataactacttatagaaaagttaaaggagtgattatgagaaattgtttgtcactatcccatgtgatgtaaatgtgaaatagggattgtgcacgtttcatgaacgattataagtataagattctaagggaataattgtcactttaaactcttataaatgaagacaaaacctagagaacaaaggacgactataattggagaaagaaagagaacgatactaatctttcattttgtacacaatttattcattgtcatctcaaaaaaaattaattaatctcagaataagatgaactcgtaaattatgaatagttagcttgaaaaatatgtcaaaaactctcttgtcatttattactactattattatcattgttcatttaatttctgagtatattaattataaaaaaagacttatttattagttaataaaaatttgtgttaacagtttggtactttcattgagagatttgtaaaaaaaactcagaaaacatatataactttttattcattggaaacgatactcctcaaaacaaattgaatcaggcgctagagaaaacaactaagtgtttaggaaaagctcttcattttgctcatttttatttcttattttgtttattctcttgttgaatttttagtctagttcaattcatgttttggttgttttatttaaattgagttagtattgatttttacataattaattcctaatcaattcatgtagagacgatatttacttatcactttattacttatttgacgactatgtacaattgcacgttaatttttacagcactctctcacctcaaacacatttgaaattgggtaacataaataatgagattcgttattagggcaatcaagcctaaaactacatttagggttggattacaagagagaagggatatctaattaagtcataacagaatataattaattaattttattatttcagtataagcttttggtgtctactcaaatgaaactggaataaactcaactttaataacttttattatttgacaagaaatgaagttaaaatctccacaatgctaatgatgatttgtgtgtaataaaatattagtgtttgattagtaattataagctccatctttcctggaaaattctaggattcacatgttatttaattaatatatatatataaatatgtatttacatgttcatggtaaatttcttcaaaagttagatatagattttgatgctttcctggaaatttctcttgtagaatcaaggttgacacataggtaatattgatcattgaattaaaaacatttttttgttaattatatcatgtaaattgtgtaatttttctttatcatgtgattgtacacatgcaatcatttcatttgttttatttacgttggaagtaaaaaataaaaatcaatctaatatataattgaattgaatattaattaactttaaattatatcctttgttaatttttatttatagagcaaattatttagaccatttttaatagaaggtataaaaattgtgttatatttaacataaaaagtaattttataatatatttgcattaatattaatatacaattgtaaaatttaattataattatatcattaattttattattatttcattatatgtaaaataataaaaataaatataaaaatatttataatttaatgtgatagctaaatttaataataaaatattatatatgatataataataaatataaaaatagtatttactaatgaaaattttgtatcatatgatattgtaatttaaatttaaattaacttttagtatgtgacaaatttacaccaattttttaatacatcattaaatcaatttttttacaagtaatagaaaattacatagagaactacttttatgcatgggcgtgaaattttcattaattaaaatttgatctttccttttgttttaataataatcactggaaaataaaatatgtattgaatattgaaaaaacaattgtggataattattataattaattataaatataataaa

SEQ ID NO: 184988 - DNA, 2002 bp, Cannabis indica
aagtaaatattagcgtcatatacactcttctctccccggttcttcttcctttggtttggtccttcacacagaactaacatagatatagatgtttttctgcttttgtacataattttttctctttcttcatttgcctgaattgtggcacagaatccaaaataaattttatatcttttgaaaaaaaagctcaaataatagaaaagaggaagtgggatatttggaatcttgactaaatgaattgaaggattggggattacggataagtggttaggagttcataattatcaggttttttcgctatattaattaatataaaatatgggaagaaaacaatccatgcggagcaaagctgcccactttgtatctgatctcaccaccgtcttcctcaaccccatttcggataaaccctccaagtcccaacccacctcaccttctccggtttctgtaagtatatttttctcttttcttctctcttttgacctgcggagctttttcggctttcattaagtttcttcattggtttttgatcatttaccggcgatcaatgaagttgattatacggacacatatttaatctgtccgtttttttttttggctctatggttttgtgatgataatttgattattaggatgggttatggggatggttagtttgctagagtttaaattcaatgtgaaatatttatatatatatatatatttatgtacctaaaattcatgaataatggagaaccttatatctgataaagcttccaagattagcttgcgctattgataatttactttatttaggatgaaatgtggaagcattttggtcgtaaatgggaaaaaaaacacccttgatatccttatacatatcaaatgaagaccttctccagatcaaacacccttgttccagcttttaacaatgtatgatgttttattatcaggtagatgagactgagtcgaaaagaaatcaagttgagtcaattggtgaagagggttctgaagatgtaggtgttggtccagatacttcttccttctctgcatttctttactcgcttttgtcatctccgaagtctggagataatccaaacttagatgaaaaggttgatgagaaagtggagcaggccaatcccccacctaactctgcaatgaaagaaaatagtggaaggagaagtctattttccaagggaaaacaaactcttggaagggttgttagccaagctgctagaattagtgggtatcgaaatcaggatcgcaggggtgattctaacttgagaattgatggtaacaataatgctaataatgataactctggagtggagatgagacctatccaaaaagtgaatgagccagaatcttcgggtgactttccaggtgtttctgaaccttcattacttctttcggagaatacaagaactgctctctatgcttcacttccaccacttgttcaaggacggaaatggatattattatacaggttaaaaagatgagaagtttttcttttgagtaatatgtttttgaaagttccattaaattaaactgctggtgtttctgattttgcttttgtctctaaatctctttattgttctgtgtagcacatggaggcatggaatttcactttcaacactatacagaaggagcatgatttggcctggcctcagtttactggtaaaagtttgttttctatcaagacttttacttggcagtggcataagcacttcattttgaaaatctatggcgaaactttctcagagctttctgttgaaaaataatcaattgtttagattatggtatagccctttatactgcctaagagcatctgtagtgtagcgatgctatagtattttataaatagaaaatgctgttatggtggtgtgctaactaaatttgatacatgttcaaagttgtatcaaatttgtcataataataaatgagctttataataacaatactgacattgtagaatagaaaaatagaaaaaacaatagtaaagaagttttttttttttttttttttt

SEQ ID NO: 184989 - DNA, 1889 bp, Cannabis indica
ttaatgggtcgagccgggtcaacatgtcatcactccgaaaacatagataacaataataatccaaatatttgatgaaatgcaaatattattttatttagtattttttccaataaattaatattgtgaagagaatataacattttggtaattaatcttttttctataaaaaaaatgaaaaaaagaaaaaagaaatggatgggtcgggtcgggtggcctacccttagttcaagagagcttacgggttagaccagatcaagtcaacttgttaatgggtcgggccgggttggggttggaccgtcccatttgccatttctagacaagatgtagtgattttgatggcctattacaacaaataagaaactatttggctgctaattgtgtattggaattaagttttatttataaataagcaaattatgtatagcttatgttttattcaattatactttggttaaacaagcaaatgtattgtagattgggatttgttttcctagtgctagtcatatgctatttgtaattgttgttgaatgtatgaattttatttcaaataaataaataaataatacaacaaaataaataagagcggtgctctttaagatggagtatttgtaggaattccactcctacgataacaacaacaacaaccaaaaaaaaaaaaaagaccaactccactttccgcctcaaacatatcccggctctaaatatttatatatatgtatgtaaaatatttgaagctcaaataaacttatcccatttttttatatgttgttttcggttttgctgaaatgaaaatagtagttggagtagcagtaatattgttagttttgttgggcaccattaataatgtagtggtagcaaaaataaagaagaacaatatcgagttagagtattcatactcagccagtataagttgcagatcccagagtgtgtcgttggctgattttggaggagttggggatggaacgacatcaaacaccaaggcgtttcagtctgcaatcaattatctgagtcgtttctcttcacaatccaaaggagggtcccttctctatgtcccacctggaaaatggttgaccggcagcttcaatctcaccagccacttcactcttttccttcataaaaatgctcttctactcgcttctcaggtccataatttacataaacattttatcaaaacaaaagtctttttttaacttggtttgtataaagaaattttgcatcaaaacccctttatgaaattatacaaactgaatgaaatctccaatctttttgttgaaacttgtcaataatacctgaattgatgatatttatgtttaggatgagaatgaatggccactgcttgaacctttaccatcatatggtttaagagggaattcaacaggtggaagatttagtagtcttatctttggaaccaatcttactgatgttataattacaggtaatggtaatagtaatactactatttttttttctttttatcatagaaaatgttcagcatataagaacccttttctttttctttcatattactaaatgtttatgtcaattatatcaggagacaatggcactattcatggtcaaggtgaatcgtggtggaaaaaataccgtgctggagagcttaagcatgagaggcctttcctgatcgaactcttgttttctgagaatgttcaaatatctaatctcactttgattgattctccaaattggaacatacatcctgtttattgcaacaatgttattattcaaggcatcacaatccttgctcctgtaacatctccaaacactgatggtatcaatcctggtaaggatcatttgctctgtggaaagtctttaccattttttttcttttcataactgaatttatattatgtgaaatgttttttttttttttt

SEQ ID NO: 184990 - DNA, 4394 bp, Cannabis indica
taagttgctatcttaaaatattcctacttgtaatgtcaaatacattagttaagaatctagtttctatctgaattgagggatgaaattaacactaggattcagctgttgaggttatctaatctaccaataccagactaaatttcttttgtctcaaaatgaattgtatgtttaaataactggattcatgttcagggatttattattagcgataaaattggttaaagaccataccattacaaaactactattcaggttcatgaagtagaaaagtaaacaagggactatgaaacataccattacaaaactccaagttcttccgggatcattgtaacgagccagggaacaaccaactcttggtttaagaccatctttgatgagacatgatcgcaggaatttctccttttctgaaacaacatcttcagttggcttcccactgaactttatcacggctgcaatgcctccttccacctttctcaagcttattgtgtctttatttggattgggtaaactggtcatggatacacacatctataaggaatagtgtttgcaaaatgaattgttgaggcacatttgttgttgatagttcatctaaaataaaacactacagtttagtatgcttgaatccataaatacatagatattaacctgtttatatctttgtcaagtggaagagctacttggatggatacattggataactctgaatcaaaagcttcagtgaagacaggagttgtcattggtatcttctccatggcggaattctttccaaaaatgtacctgtcaggcagacaggatattttactatcagtttcatttgaaacttgaaagaaagcaaaatgaaaagagagtttgcaagagtattaacccggtgacatcgttgaacccagtggagcctgagagcttgtctacacttccttctacaactacaaatggttcatacttccttacctgttgaatccatccaagaataacgtgaagcatcagaattaaaaataacgaaaatataattgcatcgagtcaattcaacctctatactttagtagtataaatcatagtagtaaaactgtttgtaagtattcattggtttggttttctatggtctttgttaacaagggatctctcactacttcttgtgatagcaacatcaaatcgtgctgtgacaaccacctggcttttggaaaatgaccccttctccttctccttgtatctttctttgttacattactcaaaacttgtttcactcgtgtgcttctttcgtttgaataagggcaaggaaatttctgtcttgacattcgttaaaatgttttcatgacatcctttctcacatcagtaaaacagttattactgttttagccttcttagccattttttccctcagtcaggattctctaactagtaatttcctggaaacagaacaattccattctcacaaatctttacacctctactgtaactgtgcagagtattcatttgatatttttgtagacctacatgtcaaggagagagaaatcttttgaattcttctagactcgtgtctttgattttctattcttagctaccctttcattttttaaaggagtttaaggatgatctaggtccaattgggattttatctccatggtcacaagcgggtccaaagtacctccattagacactcgagcaacgagatttcactaagggtatcagctatctctaagaagagagttctagcttatattgtcttagttcttgctgtgttctcttaatggatccgcattctctaaacttggttctgtggatatatatatagacttagttgaaggacaccacatctttcgccattttaattctgatattttgccactcagtaaaaccaaaccaaagtagattctaattaggtgataacaagaaaaatattcagtatcagcatgtcaacagcttattacagttactgatttttccttcactttctctactagttgggcagactattctacacatgttagttgttactagaattcagcatgagcaacttcaaattcaaattagatcatactgataatacaagctgatatagattattacaattcataacaagcaaacagacctcatagtttgccgttttcttcagtatttgatatttgggtgttcccaggtcaggtgtcttgtaaattcttagctgcataccattaaaaactaagatgaaaactttcatttattttgttaatttagaaattagcaactaatgcagtgtttattatttaaacaaggaatgagtacctgcttgaacacctcccacaatccttctaaagaaaagtaatcattgttttttatagagtcccagtagtcctacaaagtaaaggaaaatcaattacatactagttagaatagcacttaggacataaataaaataaggaaaaaagaagccccaaacttattcattccataccttgatatgaaaagaaaagctggtcttaccaagtggctgcaaaactttccagtctcagggttgatgcccataacagaggttcctgtaaaaaccaactctggtttccaaggtaaaagaatgaacttcataaccatagtccaccttgttgttatttcatatggacctgtctatatcaactcaatcagtaacaaacatctaaaaagaaattaaacctaataaccaaacaatcaaaacctagatccataatatatcaaaacttcctaactaacctgtttgacccagtgcaaaagaaagtcaggcctgaagagattcttcaaaagggcaatgttatacaggtacccactaatggaatcgtgcttagtaattgggtccctgaacttgacacgttcatcataggccgtccgatcaattccctgatcatcaaagagatggggtaaatcctcatacaagaaatcaaccagccgttggatatttacagtcgacttctttgggctctgctccaccaagcttagtttcacagcccacttggaattgtgggcaaggctaaaatttctcttggaggctgggaatgtaagggtagtggctcctgaggtgttaagtcgccgagaagtggcacaaaaagcagtgtttggccggagaatttggtggcagagctgtgtgcaagccattattatgtgtgtagtttttgcatttggtagaaaggaaagcttagccaaaagatgatgggtgagtgagtgttcatttgggagtggtggccgttttctggtatttgtggtatattgtcctccacgtagttccccatctaaattaaacggaattgagtgattcagtcttttaaatataaaacaaactattgcaaataaaatcaaactatttactacagaaaattaaagatatatgttttcttttgtgcttaattctattttctctacttatattattagattaatgttaggttaagtgtgattgaaatctataaaattaaaataattttatttttaattaacactaataacaaagtgtctaatactattgtgaacgaagtaacatttctatttataaatggtttataaataaatagtgacaatctataactcatcacaagttagcctttaacatttctctgttattaaatcattggcactagctccgattcaaacttcaataactaataactaaaggatctaatttacgttttccaaaaacaatgagaattggtcattataaatttaacaaatttctaatgatatagacaatgagaaaattatgaaaaattttctttcttttttcattaattttttacttatatattattttaattatgtgccgaattcttacatttgtatttttttttttttttttttttgctagaagtctgatttgaatttgttatatacaatattatacatttggtaagcttttcaaaggttgactattgactcactcggtgaaaatataaagctacttttttagtgtgaatattggagaataacatttatcagatgtcccagccacagaatagtatataacaaacaagtcgcttttctactacataccttcttagttcttaaggcgaataaattaataaagagaagctaataatcagaatggagttcgatgatatccccggctatttgatgaaatgtgccaattcactttaaatgtccacgtcttcctttctcatatatatcacaagttcttcgcacacacacaattataccttatatgcatgatgcatcccattcccagcacgcgcatgcaacaacacctctccacggtcctaatatgtaagtacacatttatttgttaccaaaatatagtttacattttacagtagtactacaccatattgtttttctttgaaaaaaaaaacgtactagtactacactataattctatcagaagaatctaccaaaaggagcgagtacccaccgttaaatatgatatgatatgaccaatgccatgt

SEQ ID NO: 184991 - DNA, 981 bp, Cannabis indica
aatatcaactcaaagtaacaaataatcaagacattattaaacaagataatgcatgatgataaataaaagattaaattagagtggtgggagtcaacagccgttggtcaattcatacagctgttattttatagtggcccatgtcctggtccttttagtcctcactcacatcggttttttattttgatatatagcgtaaataccaaccagacaagatgatatgaggaaaaaatagtacattaactttttcagagtaaggaatcaagggaaagatcaaaaatcacaaagtcagctatgtaaaatgtatagaacaaaatacatttcacagtagctgttttattattattattatttggggaataatttaaataaatggatgttggcaatttaactttgtagattcttatctaaaaaacacaatgatgaaaatgaaaaccttctttacaagaaaagtgattgatcatttcagcacttaaatgatgaagaaatttcctagaagtactacgcatttcataactttattcaggcaataataaaagaatcatcatcgaagaataaaaaaacaaataaatgaagggaaaataataaaaggtaatgtaaaaaggaaataaataattatcaataaataatgaatattaattagtattattgaatacctgaaatcagtgtcgtcgaaaatcttctgaaccttccagcttttaatgggccactttgaaaagatggcgttaccgtactccggcgcccaactctcggcgaaaacgtagttcatacccaaagctgaagctaaatctgacaagggtttcatggctttttcttcctctgctttcacatcttgcagagctaatatatcagcgtctagctctctcaaaacttcaagcacagtcctcttgcttctgtacggatcatctccttctccaccgtagtctatacagccggaaaagctcatactcgatctcaatggagcttttcctctgagaaatctag

SEQ ID NO: 184992 - DNA, 2620 bp, Cannabis indica
ttttctatagcccactaaagttcaggatcgactctgagagaaattttttgagagattagagagctggggattgaaaaattgtatcgagcaacacatctgtttgaaagtgttggctcgaggtgagagtttctcgagtttcgtgaataaagattggtgatagtgctttcaaactcgattacacacatacttgtgttctgttttgttaagctgttcatgtttttcttttgaacaataattactaacattatgtcacacttttaatctcattgcagtagaatcagtagtaacaacttttcaggaaaaatgcctgagtttaacaattggaaacaacttcaaaaattgtaagacatattattatctcattggttttcgaaattcatcatgaccccaatttatactgatttttacataatctcaacagagagatggaagcaagtggtttcaatagctcaattccttctagtctatctaatttgaattccttaacagaattgtaagttgtcttcattttagtaactagttacttgaaattttgaatatgtttattaacttgaaaaattatcattatgttactctttgcagaaggattagtgacttaaatggggagatgagctcaaattttccagacttaagaaaaatgacaaatcttgaaagattgtgagctaaatacatgtttttctataagcttttatggttgaaaaacaactcaatatttgaacattttaacatataagacttttgtttgaaatttcaggatgttgaggagttgtaatctaagaggaaatattccaaattatattcgaactttgacgaatctaactgtcttgtactttttccactttattctatgtaataattagcattagaaaattcaatatgttacaccaattaaccttgtttttctttttgtagagatcttagcttcaataaattagaagggccaattccaaattttgaaaatattatggcattggacacattgtaagttctaaagacttttcataaacttttcacttgctttgttatatgttcttaagttattgtgtttcacattgaataggtatttaacaagtaactcactcaatggacctattccggattggatcaaactcagagatagccgttagtaagttaccaaaccctgaaatgtatgcatcacaagcataattagcaatgtgaaaacatgcttatagagtttagagattggttgatttgttacctctttagctaaggatgaagtttcttattatgttgcagccaaatagatctttcttacaacaatttttcggaatcatctgagccatctacttgtagagaaactttgtaagagttcctctattgtctttctttttctactattcattgcatgatcatgtcaaactaaatacacttgtgtttttcatcagcaatctctttcgaagctcatctggacagaaaaacaactcgtaagcttcgaaaaactattgttgcaacaacatgaacattacttttcatgatagttttactatgctaatgcttgatttcaatattttttttgatatagaatacttagcaagtgtttgactccatgttcaaaaggtaagcaagtctttcaaattgtttgatcagaatcgtaatctgctttatcagaaaccaaacctgatagatcattattacaatgtacaatgttgttttgatgatgtgtagatcattattcattgtatattaattgtggtggaaaacaaactaccattggaggcatcacatatgaaggggatcaggactctggaggcgctgcaaaactcgtccataactcgccctcgtggggatttagcagcactggtgatttttgggatgtttggagcaccacaaaggattacatagctgaaaatgtgtctctactcagaatgaacaattccgagctctacacaactgcacgcctctcgcctctttcgctaacttactatgctcggtgcttagcaaatggaaattacactgtgaaacttcattttgcagagatagtattaagagacaatagatcttattatggtgttggaaggcgaatgtttgatgtttatgttcaggtaatcataattttcgtcgactttggttaatagaattaatgcaacttgtgatgagcctatatttgatttggttaagttattatagggaaaacctgtgttgaaagatttcaacattgagaaggaagctaatggagttgataaagaatatatcgaagtagttaagacagttgtgagtcataagacactggagattcgccttcaatgggcggggaaagggacgaggaatgttcccaagagaggaatgtatggttccctaatatcagctatttcaataaagtctggtaagtattttctatgaggaagaaactaacatgtttttaatgaaaagtaaaaccaattttcttagtaaaaaatcgatgttttcttttgcagatttcgatcctccaagaaaggaaaaaccaacaaagttcatcattattggagttgtttcagctttttgtctagttctcatagttttaggaattctttggtggaaaggctattttagaaagaaagaatcaaaggatgaaggtaactaaagatcatactttcatatgctttcttaggcttaaaatttc

SEQ ID NO: 184993 - DNA, 942 bp, Cannabis indica
atggagtgatctcaattgagtcatcctcatcatttgaaacctctgtgcttgttgaggaaggaatgaaggtaacttaataagaattaaatatggaaagttctttcattattgtttgatgataaaagctgaaaactgtgcatatcaggttgaattatatttcaatatttcataccctgatatcccacataaccgaagctaaattacaagtgtaaaatgttcaaagctttagtattaaattgacagcttaacagtatctctgtgatggattattgttggtagttctaaatggctgttgcttcttgcttggaaattgatggttatacttatatctttaatttctgcttatacgtatacttgaattctggatttgcattccttattttgaggtagtatatattaaagaattaatttaagtgtacttgaggtattgtatcttactgaaaagcataaaactagaactatagatagtcaaaatctaagtacaaaactgcaaccaagcatgcacaaacgaatccaaacctcagtacagagctcttcaatcaaaaaccacatgatattcatgctatttttatctacttaggccatctccaaccgagcagcaaaatcctatatataatgtgattttcccacaaaacttttcaatcgaactgcaaacctatcttatttttatgggagtatacgatgttccactaattaaataatactttttgggttgggattggaaaactttttagtgctaaaataattaaataaaataatatgaatataaaaaaatactttttagtataatttgtggtgttgtggttaaaattaaaaaaaaatttagtgctaaaatagtaatctttcggtgttgattctgtgttgattaacactaaattttgggtttcaccattagagttgtccttatgcttgtatttacgtgttaagggtcatagtgctaat

SEQ ID NO: 184994 - DNA, 1825 bp, Cannabis indica
tattggccaaagaacccaatatgcaagctgtcataattgactattaagttagttaaagaataactaactaaccgaatcattgttgagaggtttaaggaataataccacaaaatgtaacaatcttgtaagttgtatctttatcttcatatttattgttcttttcacaatattcatggattattcttgcataaaattatgttcttcaaactaattaatggctaatttgcagcatgaacatattggactggacaatcatggtatccgtaggcgtgaatgcagccattaggtaaatttatacagaactaggatgattagtgacttggattttcatgcattaaaaaagaatcacataattactttcctcctgaacaaaactacatattagtgatgagaaatgcttgaggcacttcaaaggtgccaaatactagaccgcaccacatttattgatgtattttaatattaaatcttatatattttgatttaataaataatatgaaaaattgttaattaattataaattgtgatgttgggtactttaaaatggtttatactatagtgtgagggtatcaaacgagttaggggcagctcacccaagaacagcgaaattctcagtggtggtggcagtaataacctcatttatctgtggtcttctcttagcacttctcctcatggtctcacggaatcaataccccaccatattttccattgacactgaggttcagaatgtagtcaaggatctcacaccagtgcttgctttttctattgttatcaacaacattcaacccacactctctggtaagttgcttgtctagttaccatcatatatttcatttgtcactgttcatttagatgagaactgtatatcaacatacaccccttattagctttttttcattttgatcatgcaaactcaggggttgccattggagctggttggcaagctgcagtggcttatgtgaatattgcttgctattatgtgtttggaatccctttgggcctaatattaggctacaaactcaacatgggtatcacggtataagtaacttgtatttttctcaatgttgcttgaaacttgaaagtcatataccttataattatattagttttatctttctcgagtagaagaactgatcaacgctctcatttttcttgatctcgtgtataacttcccagggaatttggtatggaatgttggcagggactgtactacagactgctgttatattctggattgtgtatagaaccaattggaacaaagaggttagttattttcattgtttaaagagggctctttactcacaatgaataatggatgatttagatacttcaattgtaaaaaaatagtaataaaaacatgcagatataacttgagactaatgaaatgcaggcatctttagctggagacagaataaaaaagtggggaggctagttacagagcaatgcagatcaagtgaaaaagatatgactataggcagttttatcaatttgctagggagagtattttattatatgggcagtctggccaatttgcttgagccaattttctgcaacaattttacaaatgatttaaatgaaagaaatgaaaaacaatctgtttcttaacctctccaagcaaaagattaagttgtttgtcttactacaatttttcttcactaccccacaaatttattttgtgagtttcatcacatgagatctatcacacagcttggtgaaggttttggtgtcacaaagtaacaagtactaaagcctaaagagaagagttgagcattcactcaaatgattattgtgaatttgtcattgaaaatagccaatgctttatgtaaag

SEQ ID NO: 184995 - DNA, 3269 bp, Cannabis indica
tttagccattgattcaattttggtcccagtggagtgccattggaatagcctgcacttcacctgccattgcttaatgagcttggatcttcaagctccaatcataaaataataataatacacattacttactgatagtgaatgaatagtcattactcattaacacttcttaaagggtctcatgttgacaaatgggctttttgttggcacagaaaccaagtaatcttaccaaactggcccaaatgatccctttcctaaatacaaattacaaacttcttttagtttatgaaaaaaattctgtttagaaatttataataatttcaatctgttaaaaataaaacccaagcttctttctattttatatatgtgtagaaaaaattatttgaattataatttttataaattatccaaatttcttaaaatttgaccaaaaatctcaaataactaaaatatagatcatcacaacaaaaaaaaagttttttttatttttatagtttaaaataattttttttagcaattttacggaattccacgtagaaatcctaaatagcaataaaaatccacataacaactcacatacaaaccaccgaagaaactactagaacaactcaaacgataaatttaaaaaaaaaaaaaattaaaagataataattaaggtaatttcctaaaaagaaattaagataataactcttctaatatcaaaaaataaaaaataaaatacatcaatacatccgtttctagagtataatgtgaaagcatcctaataaaatgaccaaattagagtatttgatttgttttagaatatttttgggaatgtgtataatatatgggaaatttgaaaaattatccataaaacactctaaaattattttcctaaatctaaatctattaaaattgcccatatatgactacatttaatttttccccataatacccctcttatttgaaaaacaaatcccaacattctttcgtgaatctctctctccctctcgctgaccacgcacgcacgaccctctctctccctctcgctgaccatgacttttcagcgctcgaccaccacgcccggccaccgacgaccacccaccaccaccgacagcagccctcgaccacgcacgaccaccatccgactacgcatgaccaccatccgcagtcgcgaatatgtcgaaggttagtttttcctcggtcggttttgggttttttcagatttgaggttgaagacatcggacctcctattggtccgatgtcgtccgatggtctgatggggttgttgtgggttgggtccgatgggttgtgggttgggtccgatggggttgtgggttggggtccgatggtcattctcgtggtgttggggtccgatggggtatatgggtagggtccaatggtccgatggatggggtccgatggggtatgtgggtagtgagaaaaaactaaccttggacatatttcccaatgtcggtggttaataccggtgctggtggtggtcgtgcgtggtcgtccggtgctaaaggtggtggtgggtggtcgtcagtggtcgtcagaggtgaaccgatggtggtgggatgtggctgtaggttgtgcgtgcgtcgtgttcagcgagagggagagagaaattttgagtttttgattttttcaaatagaaggggtatttgtgggatattaagaatgtagtcatatatgaccaatattattaagtatgcatttagggaaacaattttaaggtcttacatggaatttcaaatttccctaatataatcatgttgctttagttaatctctcatctgttttcacatttagaagatatttttagtgtatatttttttatataattatctaccttataattatttaaaattaagtaattttcaaaatattatataccaaaacacccttttaagtctattagataaatttctaatatttctgtccatatcatctaaaactgtaattaagaaactcccatggtgtgacatttaaatatttttttcaaaaaattaaaataaataaaatgatgaaccgacactcgccggtacccgtctgcaaattcagtgtaaaaataagacatttttctaatttaatttcttctgatttcgataaaaacaaagatgaaacgaagaccgtggccgtttcgatcgaacggctcacgtctctccgcccttccatctcccaacatcaacggtggaaaagaggatgaacgcgcgagcagacaacggagcaccaaattcaccaccctcacaccttcatggatatctccaagccgtcagattcaatcgcgctcgataccttcatcttcggcttcgaaggacggcggtgatttcaccgcacttccttacgacgtactgacgaaaatcgcagcctccttcggcgtcggcgatctcagaacggcgtcgttagtgtgcaagccctggtgcgacgcgctccggccattgagggaggcgatgatgttgttgaggtgggggaaaaggtttaaacacggccgcggtggagttcggcccaatttggataaagctctcgactcattcttgaaaggcgcggctcgtggctcgactctagctatggttgatgctggtcttgtgtattgggagtcggggaataaggacaaggccatggctctgtatcacaaagcttcagccttaggagaccctgctgggaaattcaatttgggggttgcttatttgcaaggtagtattttgaagctttctatctttatccatggaatccttacaaatactaattaaacatgaactttaatttgtttaaataactgaactatatagtttcaaaaggtgtttaatttattcaaacccattcattttggctgatgcagttagtaacttgtatttttttttggttaatgcatactgtaattgcttgtgcttttcaaggatttgtgaattgtcaacacttactttgaaggttgtgatattgatctatgatttttacagtgtggactagtcactaatgaacgatcaacatctgtgtagctgaacctgcaaatgctaaagaagctgtgagatggtttcatgaatctgcaatggctggctatgttcgtgctcagtaccaacttgcactttgtctgcatcaaggtcgagggttggaacgtaatgacatgcaagaagctgtatgcaattcaatcttgttatttgagttttctataaaatgaaactgtttatgtggaaagcacacaatgaagccttaatttttgttgctcactacttattgtatatgcggtaaataacttgtgcaaatgtagatgggttagcttagaactgttt

SEQ ID NO: 184996 - DNA, 4325 bp, Cannabis indica
tcatcgttatcattgtcgaacccctattttgtgttgttatttaatggtagcaatggcaatataatagaataagaatagcaataaaaattgattataatatttgttttgtagttggaatgaaaatataatagaatagaatgtgtattgaccttctttgtaatgaaaggtagtaattataatgggaattatattggtttctgtaattattattaagaaaaaacaaagaatgtaatagattacaaaagttacgattaccattgaaagatataagtatgatttaaaatagaaaaattttaaaatatttaaagaaacaaattagtgttcaataaaaatttaaagtaaaataaaaaaataaatttttttaatgatgaattttaaataaaagagtaaaaaaaagagtgttctaacatctaaattgtaacacaattaaaagattacataaatttatgaaatttatttgtccaaaaattaccattaggaatgatactcataaaatttctattttccaataataacattctaaataattcatgaatcacaatatgttttatgcctagaaacaattataccataatcattcaaccttgtttattttatcagagatttcatctgattcggttttcaatggggtcaaacagtattaaatatcagctaaaacatgggcaacatagtactatcaagtgaataggttaaacagaaaactagaacggatttcaagtctgcttaacaatggcaaaacactctgttaagaaattctcaagttccgatgagtacaagttgggaaagcttcgatagtgatccacatgaggagacgaaccaaagttgaaggatttcacttctcttcccatttccttttgttcttcaatgaatgactcgatcgactgatatggtaccactttatcggctgtactatataggtaaagctgaggacaaggaggctgtttttttgagaggacggaaactacatttgttaacctcctgcagccgaagaagagaaaaaaatgatagtgtcaatcaatttcagaaaacatgatttgttagttgtgacattggaatgatgagtctgctgaatacttaccgattcacatctggaaagtttaacaaaatcgcaaatagtgtctccaatagtgatagaagtactacttcaataactggttgttccttttcttttgtgtttgaaagtgcttctatatttgtttgcaaagttgatgcactgcgtttcttcagaatcgcagcagaaaatcctgccgcccaaacctgccacgattaaaggaaggttacaaatagtgaaatacccgaaatcctgtacaaacaattatagactaccttaaatttgaattatgtgtggaaacaaaaataaactacagttactagatagacttgagcttaatgtagcaaaatgaggattagcaaagatataatcatgaaaatatatgtgaatttcaacaaattgaaatctcatgtttagaatcttcagccactttcatacaactcccatcacagagttaaactcctcttgaagttgagatattgtgagatgggaatgtcacaattttcgtttcgcctatcaccagagccagatcaagaccaaaaaggattacacattcaaattacttgttgcagctctaatctccaattgctctatactcatctcctagttaaactaatcggacttaaggaagaaatcattacaatcaggatgccccctcaccacaccaaccagaatgaagataccaacccctcatgatattgaggagagatcaaaaaggaacatcaaatccaaaacagaaaaaatactgtaacatattgataagtagaaaattcaacctaacattaattctaaaaaggacttattcgtttcttgtctcaatttcccaacaaccctcattattaggaggcactaggcagtggaaaactctcaccatattactaggtaagtctcatgttgtaaatcaaagaaactaacatatttttaggtaagtctccttccatgaagaatcaatccctagactgtaacagatcatatgaacaagatgaactaaacataatacatctgattctaaaactaaaagaaaaacatttaccaagatctctataagaaattcatgttgattaaaagcataatataagtaaaagaaccttgggactgaatggctcagcagctcctgaatccacaatacaccccttaaccttatctaccaaatctggtctaatatgcagagcttcaacaatggttccatacctgcaaaaacaaaacaccaacaatacaatcattccaaattcatatcccaaattgaataattttctttctttaagcaaattattcatattcaaagagtacctacacaaaccaacccgtgttgctgaaagtatgaaaaaccaagcaccgttctttaccgtcgggtcctttctcggagacccacgaaataagctcatcggccaaagtcaacaccctttcctctgctctccgagctaaatcgaaccacaaaacctctctcacattcgtaacgaacgttacagtgtgaaaaccccttgaattgtaccactcagcgtacctcttgagatgcctcgtcttgcacccaagccaacccagtaaaaccaccgccacttcacaatcgttttttccccccaaaacgccgtcgtttccgttaatcggattctgcgaagctgagctccaactcgaaacgccgtcgttcgtttgagaaagcggcgacggcgagtggtaatgactgatttgggaaagagaagaaaaggattggaagggtttgaaagggtttggttccgaagggaatgtggatgatcgacatatgggtgagactgagagcttgggttgggcaagcttcgctaatcgacgatgtcgtttgaggggtaatgtaacaaaggacggtgtcgttttgtgaatgaggtggtggcgatttaggttgagaacggtagtgggtttggagaagattcttctgactggagcttccatggcggaaaattttcacaattgggtctccaaacacattcgaaatttttaccaaacaaaggttactctttcttgaaaaaggaaaaaccaaaacaaaggttactactttttttcaatatgaacaatcatttatacaaaaaagggtacaaattcacctataaatttcagttctttattggcagagcagagcaatcaatactcaacctaattcagcaaaaatcaataatactcaaccaaaacaaaaacaagttgtaaggggtggcgatttgggttatgatacacgtgtgtttggcatgaaattttacacaccgacgagtaaaatcttccagtgattccaaattaacaataaagaatctgttaaactattaacaggagtagaaactgcagcgcagcagttaaaaagttacatcaacacaataagaaagagatatttgagaattttttttaaaattaaaataatttatataatttgaaatttactcataaaacatctatttaatcgtttgtaattgatactgtcatacctattccgctgctaacgaacaacagttatggtgtttaatacacttgtcatacttattagctagatagatagatatatagtttgttttgcacgtaaaatccccacctatattttctcggaaaaacatttactgagctgagacaaaatagttagcgtacgacatgtcgttccatatcgagacgacactaatcaaacaaaacaacgtgtcttgttttgttggatactttggggtctggtccagagttggccaccactgccaaaattacatgaaccactgaaattgtggcctcaaaaatcaaagccccatttttttcttttcacattcttttatagctctgtgcttgtctcagatcagagtgctttaattattatagcagtggtttggttgcaaacaatgtcttcctcttgtgctgtgtccacaccactcagaacagagctctttaactctattggtagctctaacaggctcataattagcccatcaagaacatttcaacacaacagtaagccatctcttttcgtactttacttattttttattaattgttatttatttgattgagactttactttttcttgtaaggaagcaaatgtgaaatgagtagaaggggttttgcttttaaaggaattgtagcttctggggtttcagtcatgggatcttctttggcagctgaccctgctaaaggttaatttcttcaccatttcacaaaaagattaaaaaaaaaaggttgcattttgaaaatggggttttgttaattcggtttgtttaattggtttaggtgttgagagactagaatttaaaccagaaggatacaatttttggacttggaaggg

SEQ ID NO: 184997 - DNA, 1299 bp, Cannabis indica
tattgtcgtgtgtttcaaattattattgtttatttatgagaaagcttttgacgaaataaaaagaaaaagaaaataaggaggaaagaggttcatgaacccaaaatcagaatatactatcggccacaaaataaggaacaattggaaagagagagagaatagaaatgataaaattcaagcaaaacgacaaatctttgaaaattataacataaactaaaaaatgtcaggtggtaggcccatatggtcagtagtaaaacacacacttgtcacttgtgtaaataatttggcctgtcttttcatttgctattatcatatatttttaaattaacaacatattacacgttttcatttcattaaagcaaaaacatattacacgtttccatattaccgtaacaatttacaactacaagagtgtgtgcctttcttactcggccaatttaagtatcatatatattttaacttttttaattttatttaaataggccatcgttatatttaagctgtttcgcgaattggaggatgggactagattcgggactgaagtttaggtctgggtgtgagttcgggtttagagttcagaactgagtttggagttaggatccaaaattcaagtctgggtttggggccaaagtcggagtttagaatttgaggtctagagttggaattgggttcggggtcagactttgagtctgtggtctaggtccgggtccggagctggaactggagtcttggtccttaggccgagtccaaagtttggtttgaggtctggtctgaagtcgagtccagagccgaggattgagttctggagcgggtctggtctgggatctagatccgagtttgaagtatgggtttggagttcgagtacatgtccgagtcagggcggagtatggatttgggtttaagtttggcttgatggaagtctaaaatattgattaaaaaaattttaagtgatttttttttttccaaatttttttaacaacaaaattttcaaaaaattaaaaaatgtaaaagtaaaaaataattttaaaagacatgttttttttaaatattttttattcttttaattgaaaaaaacaaaaattaattactaaatactaaacaccacttatattttaaaatatatattattgttattatataaataagagttaattacagtaaaagtctccaaaaatttacggttgatgcagattagtcttcaacttcaaaaattgacggtaatagtccccaaggtcacattttctgtaagtccgttggtccttaacttaactgatatgtcaaacctaaataaaataccacgtg

SEQ ID NO: 184998 - DNA, 4773 bp, Cannabis indica
gtcttaggccgatcttcaaatctaagcttcgattcattactagaaacacaaacagacgaaaccgaagacaaaacagatgaatcatcatcgtcgtcgtcatcgtcaacggaggagatatttcgcggagaacaactccgacaatattgagaacagagatgacgtagatcgtcaccggatactaaatttccagcaaactcttcacaaacggagcacaaaggttgtcgaatatgacgagcgacgagaaaattagcagtgtgaacgtctgcgtcgcaattccggcaaagaaaagctcgatcggctgcgcagtagagaaaagcttcttgatcgcaaagacagcaaagcttgttaggtttcatggcgatttcttcttcttcttctttttcttcgaaaactgattttttgtaaagagagagagagaaagagagagatcaaaggaaagccattaatggattatgtggttgtgatgagaaagggatccaatagaatttgaagatatttatatgagtagggttttagaaagaaagagagagagagggaaaatagggagtttctagagagagaaaattgggactggttgtgttgatgaaatgagtttagttttttgatgagtccaacaactactatatatatatttgactatatttttaatgtaatattttttgtggatgatattaagagagaataaataaataaatttatattttatttattattattggtgatatattttttataattttatattaatatatattttagaaaaattataccatgcaattttaattattgggaatttttaatttaactttttataattatcttatttaggatatcatgccaacatttaaaaaatttaacacataaagagtttaaactttatttttagcaagttaaattttttttaaacatcttaaaattttattattatggtttgaattaaatagtttgtttgttaatgttttatgagcaatttaagtgggtccattagtgccttatggcactcattgtctccacacaaaaacctcggtaccttcgaaactctctattctttattttcttttttcaacttacccccaaatttgttagtattttcttttaatcaacctactttattttaagagaaatcaatacatttaaaataattaagtaataatattacacaaatagtggagaattttattttattaataaaaaaaattattaaaaagtattattgttatcatactttgctccctcctcaatattatattcatattatcggtgctaataattttttagagaatatcactaactattgtagaatgccacttataaaagtgttagataccactagcaatgtccattaataaaaatttattatctatcctaaagacataaaaaaaatacctcaaaaaaaactacataaataatatttattaaccattgcaatcactcagaaaaataaataacaatttaaaagtatagctaaaatttctacccataaacgatcaatcataacactagaatttctgacaattgtgtagagctcaatattcataaaacgtctaataaaaattaagcctaaaaataaaaacataaagactaaagaaaaattttacactcctcaataatagagttaaaaaagactcgtgttgttctatttattttactttaataatgtttataaaaactgttaatacattaatgttgagtttacatattattataattttattacttaagaagtcattcttcattattttcatttttaattgaaaattaaaaaaacattttctcttcattatattttttggaatattcttatttgacaatattcattcattatatgcttgcattattatattacaagtatcacaattcacatatataatttgttacatagtacttattaacgtgtagacatataataatgatatgacatgtaattatgttatgtgatattttaatgaatatataatataatattattcattgatgaaattattattatataatttgtaaacatatattaccaaaaataatgaattgaaataaaactttataatattttatattataagttgattattatctgatgaatctgacttaatttctgtggtgagaattgggtgtagattgaaatttgttgtctaaaattatattttatttcttgtctcctccactaaataaaagattaatataattaataattaacaaaataaaataatatatcctataatactcatctaaaacttcaaataatttttttttcttcttgtgtaataactttattaaatgtataataaagttagcaaataaaaaataataatcacattttgatccctagacctaggtacgataaagaagagtacataatataaaattacaaataaataaataaatattggaaaattttaagaggtggattgatgtattcacatccaaaatttttcaatctaattatttttatggtcgcgttataattatttaagacattttgtaaaatttaattttaaagattgactgtttaaatattattttctgtattgtagattattttaatttttcaaaaatttataaaatagtttaaataattacaatatatgcgactttaaaaaaacaaataactttttttgttgtcggaaggtgatgtatcggtacatattttttcaagagtgtaaatttctataagaaaaacattgagagacgaatataaaaaattactaactacttatacgatatattggtatgagaaatgctaaagggcaccactggtgcctagcaccctcctacgtgtcaatatcgttattggtgcaattaagtatcgggtcccatatagtttaatataataatttttatagagtatcgctagccaattgcaagtcgacacatttaaaaggtgctaggcaccactggtgcccaatagcaatgctctattggtatgtccaataacaatactcttcccatcaatattttttataatttaaaaaatagaaagaaattggaggagtgttataatttgaaagaagagttaattaattaattaattaaagattagagtaggacaaagaaataatagtttagaatatatgtgtggttgggttggtcagtcttacaaaatatcttctttacttgtttttctaccaactctataaagactaccaagatgaaattatgaaaccacacccacaaccccatcacattccacacgtgcctccatttcctatcatttctctctcccccaaactcttttttcttctttccaattttaccctcctcaattacaagctcaacattattaattttgggtctactcactcacaaactaacacgtcactcattcttatttttttattgactaattaaaatttttataattttactaattccgtgaatatttatgtattaaagtatactcttccaaatttaatcaaattttgacatatataatttcatttccccgcaattttgattcatattagactttccttaccaaaatttaacaaaagtccttaaatctaataatctcaataatttagagaaaacttttaatagccagaatagttcataaagcatgatttggtacatgtcaaaattcaagaaacataaattctaattagctttttttaaaaaaaaaattaattgaagcgtttatatggtagaatttaggattcgatcccaagggtcccctacacacaccctcttaaattcccctatgaccacttgagctaacctcaagtggttctaacacgtcctcattactcgtttcatttcttggatcataaatttaatatcataatgtatcttttactaattgcctagtattaagtataatttgtattaagtactaatgatgtctaacactaattatacttaatattttgtaaataattagagaaattatgaaagtcttgtatgatgtcaaattatatttttagtgagttagatactcctctgctttaaaatctattgtaatgactgaatgtttgaatcaatgaatgatctacttttttattcaaaaaataaattaaaaaattatgtgggatcctatataattacatagtgatatatactctatttttaggtggtgttagaaaaatactaaataacactaataatgcctaacattatttaatatgtcatattttaattggtgtaattaagtattgaattctacatgaccaagaatggaggcaaacttgaacattagcaaggccaaaaagaaaagggggccaaactataaattttgaaagaaataagaaaaatacaaaaagaaaaaataaagttatttttgtttttctaaaattttgaggaagccataattaaccacattttacacaaaggtggctccgttcatcaatgtaataacatttataaaatatcactaaaaattcatttaataaactattaacatcacctactactaattcttcaacaaatatatatgttataaaattttaaacaatcatatattcatgtaagattatttgttaaggcaaaaagtatttgtaatcttctaacaaagttccaaaaacaaaattcattgtgactttattcatactcaagaaatctcttattgtttgatatatgatattgttgttgttgttgttgttacacatgagatgtttagttcaaataataaggaagaattgttgtccattcatttttaatgtgggcaagaaagaagaagatatatgattgagaaagaaagttatattagatagagaaaatggcacatgtcatcctataataaattatagactacaaaaccaactttatttatttatttattat

SEQ ID NO: 184999 - DNA, 4104 bp, Cannabis indica
tgtgtttcttgctctttttgagtggaccaaacccttttgggctcttaaaagttgcatacaagatgtgaagttggtggtggaaatagcccaaatctaaaatgcgttctctatttattaaatacagatatttgagtggcactctattacgatcaatgagagagacagagagaaaagtgtaccttgtgagatgatgcggggttgaattgggagtactggtttattttcaaatgggtgtcttggcttttccattcgttcattgtgattcactttcatgatcacaatttgaatttgttttgtaagctggcaatggctttctgatctccgtaattgtaactaaacatttattgattttctattttcatccatgcatgctctcatatagttatactttccctaaaaagttgaatttttatgattattaattatttttttagatagtgatgctgaattcgtttttatgatcacaattcaattagttttttaagcttgtgagatttcctgcattaaaatagcataccagtacacttatatgtttttgattatgattaaacattgattattgaattttgttaatgcccgattgtcctattttcttcaagaaattgcatttcggaaactctttttttggacttgaaattatttataagtttctactctacttggggctctagtcttttctatggtgttagtgattagttctggctctggattagtagaatgcataagccttttatgttttaactatcatgaatagaagcagaatctaagacgttttatcttttatggtaatgacacagttggtaaactattcaagattcttgctttttctggattctcccattcagtaattgaactctcatattatagatagtttgtacaagagttatacttggattgtatagagagaaagagatggaacaaggtgcagaagtagttctaaatcttcaacctagctcttcagttactatttcatatcacccactctttggttctcatgatgatataatgctgcttgagcttgatgagaaacttctcccagatactcttagtcaacggtaaaagagcttaaaactttgctttattagttttggcttaaatttagtgagctaccaactctagatttcaatgaagttttgcagtaaggcatccttttttctttttatttttctgtagggtagttgtgagaggacagcccgaccaagatgcagttctttgcactaaatcaaaaacttatgctatgaaatttgttggaacttccaactctgttttactcataccaccatcagatcactcggagtttgctgatagcacaatggattgtgatcagaaagctcaaaaccagatacctgctgcatctgttattaaagttgctcctggtacaatggagattgttgaggttgcttcgaaactcgacaagcttaaatatctcctctctatgaacccttacagctcttaagatgacatagaaatgaaagatttgtcagaaacagaggaaggaccgtttacatgggatgatcttggagatctagttcaagctagtgatgatgagttgaggtctggcttacaagcactctcggctgtagaaattgatacgatgcttaagatgcttttgatcaattcagtgttgaatgactggtctttggatgcactttgatctggataaagttgtcaatgtgctgcaatcagatggttatcttcgcaaacccgcagagcattgcttgtctgtttttggtcaaaagttaatcgaaggtttggatacaggtagtgtctggaagctagatgagaagaaagtttgtgtgcattttgcaaaacaaatcttgaaaggtggaaagaagaagatggagagtttcatagagtggaagaaaaagataccagaaggtttgcaaattaatattgacatgctgaaaggtgaagtcttgactgagaggcttggtgttgatgcatgggtttatgccttcagctctgccatcaactccggctgagcgtttctcttttcttttcaaagagggactgaagtgggagtggaaggacttgcaaccttacacatcaggttaaccaatatttcttctgcacattcatctttcctttaatatattgtttgttgttttacttgataggtagtaacatgtttcttcttttcttgaaactttatttagggatttaattgtaccaggtctctcatcagaaggtttgcttcttaaatatactagaaggacacaacccaatgcagatgcagaacctgtccttggcgcaagataatcgtatagaaatagtctgctttcgtgtgagtttaaactggcctcttgctttagatggatccactgagatgttacagaagtagagtttgtattggtgtatgtttgaactggcctttctagtctagaattagatagatcacattggtgtgcttcttgattgatatattaatgtttaatttatagtccactttgacaaattattctgcaaaaatattgatgtgtttaggcatgctttatatcctactaaggtgttattcttcaatcaataaacaagattcaatttttcagcttgttgatttaaaaaaacaactccacttgacaatattagtctctgttttctaatgaaaatagaagccctccaattagttgcaagagcagcatccatgctccaaaagaaaataaaaggaaaagaagaaatctattttttatacaactcagtttcaaaatatacaaactcttttgcctgtaatgtactattatactgaaaagctcggctagcttagtcctaaaacagtggctactttctcttggatccaccccgaaaggactgccaaaatactggccagttcttcttggcctcattccaacccaagaaagatccttccctaagtggatcccaactggacgacacaatcccatagcttactccaagcagagctgtcccaaagaagataaaagacacaatgaaaggcacccaagtgggcacatcaattttgagaccaactttgagataatagaagaatggaaagaacaagagcccaacaaacaatggagccccaactgtgaatcccatcctgctaatcatcctgttcgtcactatctccggtattacaccctcttcgtcctcctcttcttcatccctcttgtcatcttcatcatcgtcgtcatctttgctcgttgtcttcttggttttcttgctcttcttgggaggaccgaacccttttgggctcttcaaagttgcatacaagggtgtgaaatgtgataaacgagtttggttcttgcaattacaagtgttggttgtggaaatcgggtattggttggctttgagacattttatcaaacagttggtggtgggaggagaccatatcttgaatgcaatctgtgcgaagatattacacttatcagtatttttttttctttttggacaaatacacttatcagatttgatttcagtaaacactagtaccaatatattatactcatgtacccaaagagtctcctccaagacccaaaagctatgttcatcacagcataattcatcatcaaacatttctatatacataaaagagtaaaagtgtaccttatgatatgatgtggggttgaagttgggtactggagagagccatgaaaatgtcacagcagttgcagccattgatttgggtaactgaaatttgtgtttctcagcttcagagaaatttctccatatcaattttttgttgagctacaaagaaagacgttttttgagtgtttgagatgggataaggtgagtcgactcactatatttactgatttgcacttccaactctttattcattcactcacataaaaccaactgtttgaggggtataatcgtctttgcgcgccacgttaataatcctatggctaccgttttaattcagccaccagtcatatcaacaaaacaaaaataaaagttcagtcaccagacccatcatcttttacttgtaattctttggaaaattatatagttcactttctatgttaatttttggtgtagagcagtatacaaaataattatttaatatattatacaaattttttagaaattttttaaaatttatggcattaaaataaaatttaaatattttattgtatgtgtatttattta

SEQ ID NO: 185000 - DNA, 1356 bp, Cannabis indica
gctactcatgttcatcgtagaaaatttacacctattaattcgaaatagaagaagaaaaaaatgttgaaaaccccgtagaaaaagccttccaggttgattttgctctccaattttcgtactcctaaactgcttgcaaattaagagtttatgagttttttttagctctgaaaacgtactaaaaacactaataataatgtgtttatataggttaacagagttacttaaaagatactaaaaagatttaaaatttaaattaaaaaaaaaaaatcgcaactctacttgaaaagttatctttttttcccctatttttttattctttttttttcagaaattttctactagaactactgatagtattttggtcataactctctcgatattgctcagaatttgacgattcaagatgttccggaaagctgaaatagagatctataagatctataacttttatgttttgactttttctaaaatctgatcagatcatagtcgaattcaggcttaatatttcagctttattttttgcacaattttctctattttatagatcatctttttttgaaatttgacccattcatacattttaagtgtagaaactttaaattaaagaaaacaagcgtaattctattctaaaaagtaacaatgaaaaagaaaattaactctaaaaataatttaaaaaataggctaaaaatatccaacataatgaaaatgaaatttcaagaaagcaaatgttaaacgataaacacatttgtggcatttcttaattatgcatataaaaaacattaacttttaacaattatggcatgaaaagatttgtaagaaaataattgtgtctaagagctctacatttagaatctgctatttcaattttcagggaaacaaggtaaaactgatccattgaaaaataaaacagtgatttaaatctctgcatgtatgaaattttattcatttagcaatcttgtatgaatgttacaacaagaaatgataaattaagcttctccaataatggatacaaccaagaaagaaaaactaattgtatttgtatagacaattcttcaaaagaaagtaacaatggatggtagtacaaaacattaacaatggtctcaatcaacctcttctacaaagtaaaattaatgacaccactctaatcacacaccatactcaaactttagacatgactgagaaggcgaagctgctcagttccaagcgatgcacatttttgggcttaacttgagcagtgatcatcaattatatttctaactaaaatttcataataatttactgcatttttataaaatggctaagtgaaaatgagaggatgaaccaccataccgcatacacaggggcggacccacattg

SEQ ID NO: 185001 - DNA, 4921 bp, Cannabis indica
gtttgttgcaaacttaattcaaaccagttttctcccattaccaactaattagaaatttttgagcgcttcttgttattttcacggttttgtttgttagataactacatgctatatttattttcaaataaatgcaattccaaagaaagtggtggtataacaaatcacatattcaactcaaaaagttgctagaaaagcacaataattcatgtgagatgtaacccagttggagttggactatacgatagagtatttattccaatgtgcatcaaccgtgttcgtcctagttttttcgaccttaagatatattggtcaagtacaagcaaataaggctacctaaatgaagttacagaatttaattaaactaataaatacttataattaaaagaaccgtctaatttggtaagagttaactttttaaaaagaaaaaaaaggtaacagtgtcaaaaatttgaagtgatcattagagacagactctcttttggttaattaataacagacaagcgaattaggccactaaacatgatttgtaatcacttgatcttttttctatgattataaacttataattaaatgaaactcttttttttttttgcttaaattaaatgaaacttaaaagttacaaatatatttatttgataatattttaaaattagtacattaaccattaaacttccaataacgatttttcaaaagtgcattaggtactgattttttgggggattgtggagtagttgctgctcttacgtatgtatataaataaaaatatataaacatacatatatatgatatgcacattcctttccatttcatattttgttcatttacaagaaaaaaaaaacatgggtagtccattcttccatgaattgaaaaaacaagcatctttaatgttaaaggagaaggtaataaaacccgctcgtttggcgctgactgatgtaactcctgttcaactgtgagttttttttttctttattattggtcacaaaattatgaatgaatcgattttgagttttcttaattttcttgtgtgaaacattattttattttatatttttcgtttgggggtattttgttaggatgacagaagatgtcacaaatggaaattcgttgttgccacttgatacacgaacactcaaactgatttcaagggctgcctttgaaattgatgattattggagaatcacagagattttgcatagaaggttaacattaacatgattttctgtcttgattcttaaactgttcattgaaatctctctacttaatcaatattttctttgcccatgaatttaggctattaaactttaatagagagaactggcgtggaccttacaaggctatgatcttattggaataccttctaactcatggacctcttagaatatttgaggagtttcaagatgataaagatattataaagcagatgggaagttttcagtgtgttgatgagaaagggtatcaaatatcaatttggctaacatacacatacttctgtattattatgtatgcttatttaagctcaatttagcatatgtgacacaagtacccttggtgttttcatttgcaggttcaactggggattaagagttaacaagttatctgagaaggtgttaaagcttctcttgaactcatcatatttcaaagaagagagagctagagctcgaaagctgagtataggaatcaaagggttagggagcttcaacccacgttcatcttccattgatggaagtttgaaagagttctctaccaagtcatatgaaagatgtaattctgattatatttatcgtcacagtgaggagagtatgttcttggttgaagatgaagtaaaggaagcacaatccagaaccgaagaaaatgctatgtgggaacactccttttttggtaatcaacactatcaaaccaagaaacccctgctttcttccttggcagaactaagagtcaaagagaattgattacaatagtttaagtcaacctttgacattgtttgataaacttttgtttatttgaagatgatattttgagtgtaaaaatgctgagaagaagcctcacttgcaagtcttcatttagaagaactgcttttgccgtgtaaataaaatttagttttcacgtggatcatacagattatttgattcataaaataaaggttttatctcatgaattgggttcataagaaatttaagcattcaatatgagcttttgtaagtacggaattttgggatggaatgaccaaaaaataataataatgataatcaaagaagttgtaataacaaaaataaaataaaatttaaaagaaacaaattggataaattaactcctggccttccgaagtcacttcaagttgagaataaaaaaaaggtaacgagctagaatgaaccttctgcaaacaacacttttctccaagataataaaaacaacagtacttgcttttctctctgcagtagttctaattctcacatgcttagaagcatttcctatgaacaattgatggcccagactcatcgtactctgcttttgcaatccacatctgcataaggaaaagataaaatatgatatcagtaattattgaatcatcatattaagatcatcatgccaaacttagatatgaaaaaaatataaacctgctggaaggtgctgagagaggccaagatggagcctccaatccagacactgtatttcctctctggtggtgcgaccaccttaatcttcatagagcttggtgcaagagcagagatttccttgctcatcctatcagcaatgcctgggaacatggtcgaaccaccagacaggacaatgttaccgtaaagatcctttctgatatcaacatcgcacttcatgatggagttgtaagtagtttcgtgaatgcctgctgcttccattccaaccaatgaaggttggaaaagaacttcaggacatcggaatcgttcggcaccaatggtgatgacttgcccgtctggcaactcataactcttctcaacagcagaactagtcttggctgtctccatctcctgctcaaagtcaagagctatgtaggcaagcttctccttcatgtccctcacaatttcccgttcagcagtggtggtgaaggagtatccacgctcggtgagaatcttcattaggtgatcagtaagatcacgaccagcaagatcaagacgtagaatggcatgaggaagagcatacccctcgtatatggggacagtatggcttacaccatcaccagaatccagcacaatacctgcaaaactaaggcaaaacttctagctaaattattttaagacagggcaatataaaagctacataatagcattagaaaatgagggtcaaggtttaaacttcaagaaaaatataatttccaaaaccaaagccacactacaatatttgacaaggtaagaaactatcatatcatgatgcaagtagttggtaaacagaaacagaatgagattggtattagtaaaatctcagttctgaccatacttaaagtctcatttcagtgtttataggatactctaacaagaaatcatgctatgacaatgaaaagaaaaaagaaagtacttggtactcaccggtagtacgaccactggcatacagagaaagaacgacttgaatggcaacatacatagcaggggtgttaaaggtctcaaacatgatctgggtcattttttcacgattggccttggggttaagtggagcttcggttagaagaacggggtgttcctcagaggcaacacgaagctcattgtaaaaagtgtgatgccagatcttttccatgtcatcccagttgctgacaataccatgctcaattgggtacttcagagttaagatacctcgcttggattgtgcttcatcacccacgtatgcgtctttctggcccattccaaccattacaccagtgtgacgaggacgacccacgatactggggaacacagctcatgaagcatcatctccagcaaacccagcctaataggtaagatcacaataattcatggtcaataggcaaattctacacacccacgagtaacatttagctagcttttgcacagaagattaatgattcaatgggaaacttttaaacaatgactaataacattaataccttgaccattccagttccattatcgcagacaagtggctgaatatcctctgcatctgccatcttcacttacctatttgttcaccaaactatgctataagaacatctttcataaaataataaataaatgcggtagatcgtcatatagcgatacaatgatactaacaatgcaacataaatcgaatgcatgtatatatttgtacaccaaattcttgtgttaaaataagaatgtacacacaaaataaaacagatacaatcaatttgtaggaatgaactcaatttttgatcttttctctttcttcttcttctttaggttatttaccacatttatatttgaatatttaatcttaaaaaacataaaaagaaacaaaaaaaatttctttttaacgaaaacccaattcatcgagcattaattttaacaacttggacaaagaaataaacacaaaatcataaatccaacaatgaaatacaaattgtgaaacatacataaatatgaaattaaaaaatgataatactaaaacagaagcacagatcgggtgaaataaagagatcgaaagagattatgaacctgttgaaatgcgaaaagcaagatggaagtttagagggtttgtggtaaatgaatgaaagaatgaatggtttagagtttagaggtttgagagagaagaaggagaatgagagggaaagggaaggtgtgtaataatagtatataaagatgagcgatggtgatgatgatgcaatgtggtccgtcagatcagattaagagtacagtctggactcgtcattatgtcttcaaacaaatccatttctatattcttttcattcatttgtcagctaaca

SEQ ID NO: 185002 - DNA, 6132 bp, Cannabis indica
actaattttgtatatgagagaatctagttttaataaagtgcatcatctaatgttccaaaagatggtgtctttttcaacagggatgcgcgttcaagggagcttgtgaaagtgtttaacatagaagggcagatcgagaatagagttgacatttcatcagtccagcaagaacagacagctgtagaagatgagatgaaggtaaaatttgtgaatccatcgaaaaaggaaaaatctgggggctttctacaacggtcgcgtaatgctattatgggagctgcagatgtggttcggagagtggcaacgagaggtgcaggggcatttgtagaagataccaagagaacagaagctctagtgataaccgcggatggcatgatatggagtggatgtacaaatgggttgttggtgcagtgggacggcaatggaaaccgtgtgcaagatttcagccatcacccgtgtgctgtgcaatgcttttgcactttcgggacgagactatatgtagggtatgtcagtggcatcattcaggtgttggatttagaaggaaatctgattgcagggtgggttgctcacagcagtcctgtaatcaaattggctgttggaaatggccatgtttttagcctggctactcatggtggcattcgcggttggaacattacatctccagggcctatcgacaatatcttgcgttcagaattggctgcaaaagaaaagatatataccagaagagacaatgttagacttttggttgggacatggaatgttggtcaaggaagagcctctcatgatgcacttatgtcatggttgggctctgctgttccagatgttggtattgttgtaattggattgcaagaagttgagatgggggctggctttcttgcaatgtctgccgcgaaagaaactgtaaattaattataatatcccattccttctttttctatagaattaccgagttgactcaactcaactcaactttcctttccttcacctgtggctgtgtaggtagggcttgaaggaagttctgttggacaatggtggctggacaacataggcaaggcattggatgaaggaaaaacgtttgagcgcatgggatctaggcaactggcaggcttgctcatatctctatggttagtcgtcagtgacactgatttaataatttggattatcatttttttatatttgtatgttgaaattttcattctatgtaaaaaaagaaaaagagggataaagagatgacagttgttgtttacagggtaagaaagaatcttagaacgcatgttggggatattgacgctggagcagttccatgtgggtttggtcgtgctattggtaataaggtctgtttgtacaatcgtccttatccattagaattaggataataataaaaaaaaatcattgtgttctgtttccaaattcatatgcatttatagattgagttgagctgacttaaaaattaatgtccaagtagggaggtgttggtttgaagatcagagtttacgacaggataatgtgttttgtgaactgtcacctggctgcacatttggaagctgtgaatcgccggaatgctgatttcgatcacatttatcgcaacatggtgttcaacagatcatcatatttccttaataattcagctggtatggtgaagctcctaattttgtgtttctgtgttgccttgtccacatatttatcatggctcctttattcttctggcttcccatggctactctgtcttgcagctggagtctcaactggttctcatatgatgcgtggaacaaatgtaaggactttggatttactcttttgaatttgtacaagcatatatgtattattgtgttattaattggtgatgtgtatataggctatgggtggaaactctgaagaagcaaggcctgaactagcagaggcagatatggttgtgttcttgggtgatttcaattacaggctttttggcatatcttacgatgaagcgagggacttcgtttctcagagatgctttgattggctcagagaaaaggatcagctgagggcagagatgaaagctggtaaagtttttcaagggatgcgtgaggcactcataaaattccctcccacttacaagtttgaaaggcaccaagctggtttgtcaggtaaagaagataaaaagagtaattaattgacttagttatgaacacaattggctttcaatttgataattcccttgttcttctttctacttaattccaggatatgattctggcgagaaaaaacgaattcctgcatggtgtgacagaataatatatcgcgacagcagaccggctccagtgtttgagtgtggtctagagtgtcctgttgtggcatcagttttgcagtatgtcattttattataagggccttaaatcaatatgagggccttaaatcaagagttaataagtgtgttgttgattaacaggtacgaggcatgcatggatgtgactgatagcgatcacaagcctgtacggtgtaaattcaacgttcaaatctcccatgttgacagatcagagaggagaaaggagtttggaacaatttacaaatccaacgagaagatccagtcgatgctccaagagttatgttatgttccagatacaagtgtgagcactaacagtatagtcctccagaatcaggacactttcaatctacagatctccaacaatagttccaacgacatagccatatttagaattgtttgtgaaggacagagcactatcaaggagggtcaagaagtagaacaagaagaagctgaggagggtgcagttgcggggtatcgaaccaagagggtccttcggctttccaagatggctggaggtagttttattaatgaatccaatcaatataatgaattcatgagtttgtatgatgaatgtgtttctgttgttatgatgaaaggtgtcaccggcagcagggatgatcaaaggcgagcaagtggttgaagtatcaatcaggcatgaagaggttcacagcgtggaagagtttgtagagggcattccacagaattggtggtcagaggacacacgagacaagcaagttattttggcagtgaatgtccaaggcagttgttccactggaataaacactcaccgaatatgtgtgcgccattgtttctcttccaataagacactacgccttgactcaaaactatccaccacctccaaaaagacttccttccaaatcacagattctcgccaaacttctgatactactactactcatcatgacaaatcatcatcatcatcatcatacaaggcagatccacccaggactgacaatttgaagcagttgtagatgcatatacatatatgcccatacccactttacttactactacatatttatttcttaggcattttcttcatttatttttcactttgatgtacagagtgttaccttttcttcacacaacatcactaatgcgagttgtaagagagaaattggacacttaagaagacttaagtgattttaactatttttttttgttttcaattacgtacgtacttagatgcattaaaggaatccttatggtcatcagttcattaattaatacaagaacttttaaacccaacaagcattacattcacatactacattacatttatttacatatacaatcagaaactgattaatcatgagtaggtgtacatcatcatcaggatttaggaggaggagcaatatatggcttttcccaaatccactaaactagcttccaaatgttatatatagaagcaaattaaggcaggtaaatagttgtaaactagctcgatcgattgcattctattttatataaatacaaaaggctagtaaattaaattgtactattaagtaagtactctaataagtgtgtgaattacatagtacacaaccaaactacagtacccccaccaattaatatatatgaggaatatgagctgctatatcatcaagatcatgaccattgatgatgatgatcatcttgggatgcatgggcggggaatgaggactccggtggtagttccagcgatgttcttgcaggaggaaatggcagaggcaatcacatttttgttgactcgataagtgagattgatgttgtgcaatctgattcctctgcaggggttgctaccgctgcaatcgaatttcacagcctctttggtggcagaagttcctcttatgtttttgtaggtgacttgggtgatcttcactccagagctctgccgtggacaacccttgttgctggggcagtagttctggtctatgatgattgggttcttaactccattcatgatcagattctggaaaacaatgttggtgacaaaaccattggtgggtcttgcccaagacttgattctgacaccgttgtctgaaccggtgaagacggcgtttgtgagggtgacattttgaacccctccttcgttctggtccttgcctaggctgccaatgctgaccccatgccccggtccacagttgatgttggtcatgtgcaaattcttggtggcaggcccgatggagatgcagtcgtctcccgtgcgtaatgtggctccggtgatggtgacaccggtggagccctggacgtggatgccgtctgtgttgggactctggtcaggcgctctcagcctaacattcttgactaacacgttggtgcaactgtttattaccaaatgagtttgttgactgttgattgatgttaagccgctgatcacaccattgttcacccagttgaaagtcattgactgcattatatatcaaaattgtcttacttaataaaacagttattttcaactcaaccacaaaactgaaaaacatattcattgaccttcaattatatattcattctcatactctgttcatacttacttagttacttaggaatccttcacaattctcttagaggttaatttgccttgtgcattgaaacacaatagtaaagtttagagcccttttttgagctaatttgctatataaaatctgtaccatgcattggagatggtcttctttggcaaacacacgacattccacaattaagtgaacttagcatttctcattgctatatatatggaaaaataaaaaagttaaaggtacgtaccctggctccgacagggcatttgttgccagatttccggcaagcccaaaaggcagcgcccttggcgtctatggtgcccccaaggacggaaagtctgttgattttgatgaagagtatccagtagcctgaatttcccatagcccagtagttggagggagccagaagggtgccatctatgtggagagtgactcggtttctgcatgggcccctgaagactataggatttagcaggtaccttcccttggggatgtacatggtggctgccttctttgatccacacactgcgctccatgccttgacaaatcccttgcttgaatctgtctttccatcaccttttgcaccgtaaccaaccacgttcactaccaccttattcttattaataatattactgcctcctactgcattaactattcccactctcatcatcaataacatcacaaccgtccatacccaaacaccaacacttactttcttcttattattattattaagcttattctccatattcatcattatatgttcagatgatcaacctagaacgattacaaattaatataataatatttattttgctatatatatgtagattgtgagtatgtatatatatatgtaccagacactcttctagctaggtacgtagtatgtagatgtggtatttatacagttgaatttgagtatatataataatatatgaattatatattggaatgtatgtatatatgtatgtatcgtaaataatcagtgagattattaattgagttgggaataatatacatgtggttggttaatttggtttggttttgctttgttgttaataattaacttaattattaattaaagatatgtggagcgatcgagatgaatagatgatcatgtcatgacatggatgatatatataatatgaaaagtatcattaggtagaatatataatattagctatagctaggcctatatagcgtgatgtattgtattgtatgtatgcattattattgtgaaatgtgggtattatgatatgtacggtacttgaaatgcatgtgatgatgatgataagtactaaaagtagtgaagcagggcag

SEQ ID NO: 185003 - DNA, 3071 bp, Cannabis indica
ttttagttaattgttagaattaacaagtgaatgagataacactaaaaagaaaaagtcctcttgatttgagtcatgttttatttgtttgctttttatttagagaataattattatacattattaattaagcaccatattcatcaccattttaaggtgttctatataaatagtaaataattttttataataattattaaaatagaatatataagatctgacattcaattatactaataatgacataacacaaagttgactctgggactaattgagccttatgtagcaacaaaattactggcttatttaaaagaatgtggtatttttaacatttactaaaaaatatgtatattttaatttttttagccctagacttgtgtctaacctaccttagcccatgcccgacacacctcaagtgctacacactatgagtacggtaccacttagcattatttacttagttataaaaaatgtttattaatttttgtttttgatgctattcggtggtctcttgaaataaaaaaacgattggggatgggaaaatgacgggtcccacctaatccatcttttgttgttgtgaatatttatgagtattgttattggatatcagtggtgaccttctataagtggtgctccataattgattagcgatattttctaaaagctattttcttaagttatatgagaccttatacttaattactctaatagtggtatgacacagagaagagtactagacaccaataatattttttagcaattctcatttttttatagtgttgtctctgagttggttatgtaaattttattgggattttgtcgtttatttttatataaaagaatacatgtaaattgattaattatataattatagattatttgtttatggtgtattgcatcattgtattggtgtgtctttatttaggaaatatccttatgaaatttataattattactttcacatacttttagatctatatgaatttagttctatttcaaacatttaataaaagttcatttatctaataataaccatactagggagtagattttactcagtgaggttatgcatttcataatctatataattattagatcaagattaagttgatctaaccgttaaaaattaatgtacatcaaatcgagcatagaatacattttaccttaactaatacataacagaacattgtgtcttttttttttttttttttgtataaaataaaagaataagattcataataatgtaatgttcacccaaatcaagcttccttaaaatgaatattagtctctaagagctaaccccatagtgtatgttggaatgaagctaagagccaaaaggtcctcttaatgtccccactatcaattaatgcattacattacattatattacacttaaatggtccttctctactctcttatcttttttatagtacctacactacacttctaaatacactactttttaacaataactttcactccacactttcatgtttaacccaaaaatataaatattattatacacatgtgtatatctctatataaaatgtggttatatgcacttaaatattacatataattaataatataaataatgaattttaacttacataaaatgaataaaagttaatttaagaaattgacacaccaatgtgttcaatattaaggcacatataatgcttttggggtcaatttataatgcttttcttaaataaggcacatagttattttcataactatcttttattataatgttttaaattatcaacaataaaacaaaaattaaaactactattttttcttaaccacataaatttaaaacacaactatagtactatactttggatttaaatttttacaacatttgtagaggactaattattaataatatgattattaaataattacttaaaaatcctaaaatgtaaatctttgttttgtgataattcttagtcaaaaaaagtcaactagtttattttgattttcctttatttttcattatagaaaaaaaaaattaaaaattaaaaaatccaattaggatgagttaaaacatgtcctataattatctttatttcttgtccaaatcatacatttttgtgatgagactctttttgattcgttgaccacctatacctacctttgacttgtgtgaagtgttctaatcttaaagaaaaaaaaagctcaagtctcaacacactagtccaccaaaaaagcatataatcttattatcttattatcccattaaacaaaaaattaaactaaagacaattacataattagccttgggattcgtaatttgccgtacacgccatgttagctaatagtttcaattgaaaattttcactattagaataatataaaaaaaaaaaaatttattccccatattagagtagagaaaaaatataaacacttacaaatataactaaaacattttatagaattttttaattttaaattattcatgtaacaattagctaaacaatcatattatcattttgtcttacacgtgtgataaaacttaacagaagtaccaatttacaatactataaataatttagagactatttttaataagtgaaaaaatttagggacacaataatacataaattataatttaaggacaaaatcctaaataataataataataataataataataataataataataataataataataagtttgttccccatattacatattagagtagaaaaaaatatatataaatacttacaaatataactaaaatattttgtcaaattctaagcctaagactccatttttaccaaaatatttataaatataactaaaatattttgccgaatttgaagctcataaaacaaacttctcggttctaatcatattcaaaaatattacattaagagcttaatttcaattattatttattgaacacatggtctaaaagttaattttttttaaatttaaagtccaaacaaataatgtgcaaaaaacacatacttgaaaaaaggataatccctaatagaatataaaatagtatagcatagtatatacattggaatctaatcatatataccaaacataacacttt

SEQ ID NO: 185004 - DNA, 1018 bp, Cannabis indica
cattaaattgcatagttaattctttcaaggaattcttttcacaaggattattaggtacttaggtgtaaattgttgttatatcagcccctaataaactacacattattaacaatgatgacattgcatgattcgaagatagctcggattggacgctcaaaaaagttagttaaattctgttagttttaagtacttacttatgttatgtgtaacagcttttgtgattgactccttgtgtctataaaagaatgcctcagtctcattttataattagagcagaaaatcgaatagagagggttgagagaatttttgtatggtgaggttgagttgtaaacttagagcaagaaggtttgacatggagagaggcgaacagaattgagaagccaaagggaagaagatcttcaagggggtttcctaagtgttcaaagctccatttagatattgctctagggaaaattatcaccattgtaacagttcgatctttcttgaaccaaacttcgtattcttccattgtcatattgaaaaaggattccttagaagaataggctctaaaattctaaaattctacatataagtagataggatttatttacaagaagaagcaaacttcataatcaaaacaaaccaccaaccttacaacttcaacaaaagaattacatctcttgcagcttattacttcataacttgtctttattacaagaaagaaccatcctaagaacaacaaagatagctcacttgattgtgtaggaaaaacatccattatccatacatatgtataacacctgaaaacacaaagtaaaaatactgattaattaattagtagcaccactttaacaacaaaagcaatacaagttagctcagaaattattacaagtaacacctcacctttcattttatttctcatatatattatatataaccacccatccatggagattcatgcttcaacttttgtcatcacactgcaattttgatcactacacaaacccaaaaaattaagagacatgctactatgcaaatc

SEQ ID NO: 185005 - DNA, 7500 bp, Cannabis indica
tgatgcattcccttctttaatcttaattttttatatatattaacaatgtataacttaaggttgttgctcatgtgtttttttatacacttttattctgaatttttaatactttgttaaatgtttaaataattataataaaaaaaagtaatataatatacatcatcatatattaaaaatgagattacaaactaatcaaatacaaaaaataggaaaagagtgcaccaattttggggtccctaaatttttttaaatcttgtatttttaatgcttacataataagtttcattttccactttattatttgttcccatttgttttcattgaaaagaaatttattggaatacaatacaagtaactcaactcattgccaataaatatatattatctatataaaattaaacctaatttcacatgtaataacatgtgcttactataaaactttcaatacaaatttaatttataacttttattttgcttaaacttaaagtataactttgttagtataatctcaaatctaatttaatttataatttgttttggaaattttttagaagactcttaatgggttgttttaataaattttctatctatttcgtcaatttcaaaaaaaaaaaaaaaaaaaaaacattttttaatttaaattttttttataatcgcgcatattgcacttattttagagcagttataaatttaattttttttttgaatagtttacaatattaaaaataagatttaacaattacttaccactcgtataagattgaacactagtacaacacaatatgtaaatcttattttcgacattgtaaactatttagaattttttaatttataattgattctaaataactataacatacaagatcataaaaaattatactaaaatgttttcctaggaactgaaacaaataggttaaatttataaaactaacaatgtaaaatactaaaatttgcaaaacaatctcatttaatttattctatgcgatcataatggtcacatagtgtaaatatatggtcgttttgtgaccataatagtcttttatgattgcacagtataattcatagtcgtttttgcgactatacaatattattttgctaatttactaataaaattttttgtgtaaagttatttgttatttttataaagattatttttacaaatcactaaaatgttttagattttaaaattaatataaaaggaattcaccaatcaccatcctaatattcctaggcatcttcttagtgcttcatctgttagggactctggtttttcagttcaatttcatcagagcagaatttgaatatggcaaatccagtggcaccccagatcgccattcttggagctggtatctttgttaaaacccagtacattcccaggcttagtgagatctccaacctagtctccctcaaagctatttggagtagaactgaggttattactatttctctttcttcttcttctttttcaagaacccttttttatttttattttctttaattttactgtgtttttggtttaggaatcagctagaggtgcggttgagattgcccagaaattttttcctggagtagagtgtaaatggggagataagggtcttgatgagatttctcaagatagttcaatacttggtgttgctgtggttttagctggccaagctcaggtattatcaatcgtatacaatttcttataaccaaaaaaaaacatcttctttttgatgtttatgtgtaaatttagatgcttgaagttgaaagatttactttttttgtgtgaggtttatgttttttgttcatacaattggattgagtagaatttggtgagtgtaaaatgttagtatatttatgtctaaaattagagtaagttcaattgttaaaaattaagaaggtggcaatagttaatgttacatgaaagtggtataagagtttaataggaaattgttagtattgtctagtttagtataaatatgtagtgtcattttacaaatagattttcaatgaaatgaatgagaattagaagtattcctattggagtttggcactaactcgaacaatgtctcccagtacttgtattcgagtttggcactaactctcaatgaatgtactaatgataagtaacgggtcctcttcaagacagaacaaatctcccaaacgaaccaaagttcttttttctcatttcatatccattaatcactatacaattacatatttatactaagatagacactactaacaatttactattaattctccaataccactttcatgtaacacttaaggtattcaacaccataccggcgtatcacctcattattggtaagcggttaaccatatattattatttatttaatcaaaatgtatgggatttgatgttgaaatgcacaaatagctatttgtcactttttatggtgcttagcatcttaaagtaccctaagcatttctcgggtggtaatgatcaagactcttgggtaaactatagcattttctcttctgtaatgaagataattttttgaggcaaaaatgaatatgcagtgagtttccctactttggtttagattgatcactgcttgcttatgctgtgagtttccctacttttgttttcaaatgaatatgtaacattaaagttggtcctttagagtagtaaaatctgagcacaccaattgatttgagcataatccttttgttttgatttcaaaggctacattatgtatcattccatgcaggttgatttctcactaaggatgctcaaggcaggaaagcatgtccttcagggtaataatatcaaagaagtttattcttgatgttgtcattttttttcattagtcttctcaggcaatttactaaaattttccttttggattctgttgcatggttaacttggtggttctgaagagaaaccggctgcagcttgtaagtagtgtgtagtttttcggcttaagtagtatgcattgtcttcaatgattattagtcttaactcaaagttgctaacaatttggatttaaatacagctacaagtcagcttgaagctgctattgcaggctataactcggtttgtgccaatatctcgagtaaacccatttgggctgtggcggaaaactatagattcgaacctgcttttgttgaggtatgtattattcctgctgaagtgacataccctctcatttttctagcctgaaagacactcatttttgcttacacagtgtaagaagctagtagctgatattggagatatgatgaatgtccaagtgattattgaaggatctatgaacagttcgaatccttacttctcaagctcttggaggcgcgattttactgtaagtgttcatacataatcttgttctctcgcaatcatgagtcccatgagatatttagtttgttgttcaatgcctacttttcccacttcagttgtactatttctattaaagattcaatgtctttgaggtgtgaattactaaaattcctcatgaaagtgtaagggagttattggtacataatccttgatttcactgtctcttaagctaaccagttcatatatttttctatgacagggtggctttattctagacatgggggtgcattatatcgccgggttgaggatggtaatgttacgtttaaaagttcattattagtaaagggatagttgcggcatgactacccaaaatttacatttgtaaccggcatgtacccaataatttttttttagcagcaaaactacccaaagtttctaaaactgtaattttgtcactttgaaccgttaacttccgttagctagtgtctaggatgacacgtgtcactatctaaattgtagtaattttgagtagttttgttgctaaaaaacaatcattggatacctacctcttacaaatataaaactttgagtaattatgctgcaaatatctcattagtaaaccatgtcttggccattgtatgaatttttttccctattcattgaaacagcttgttggatccgaggtagtctcagtctcagctttaacatcttatgtagacaagactttgcctccaccagataacataacctctcttttgtaagttatagctgtgcaaattcaaagatttgtttttttttccctgttttggtatgaaacaacttaagctaaaggtgaaaaattcgatttctttgacttagccaattggcgaacgggtgttctggagtttttgtaatgatcgtctcctctagctcgcccaaggtatatgtcgttacgtttactataacattcttttagtttgaaagttgtatgtaattaattttatttatagatttacgattaattattggtttgctctgaataatcccccttgctgattattgctcttatgtaatcataaaaggctaatttttttcttttggggaaattttagaccaagcttctgataaattttgattttcgactagaacagcactaactcgtcaatagatttcttgttgaaagtagccttgatcccattgataacgagtgagcccaaataattcaattagagtaattcgatatctgttattattatgatattcagttttctaaattcccattaaatattagaaatgtattcagaatttgatctattcaatgaaataataagataaagacataacaaaacgtttcttttgagtatgaatacaattgtctctgtagtaattttaattttttttttgtagattatctggagagttgttggcttgaaagggacattacaagtcgagcgcggaaagcatgacggtcaacatggctacctggtaacttgaaaacctaacaaagcttatgaatgagctttagattagaatatgttcaagaatgggagttgccatttgggcttagcagcaaaaagtttagttctttttatcaaaaattgtataaagtttacatcttttgatattttcgatgttgtttcaggttacactttatagtactgatggacaaagcaaaagcacattctacaaattcagtggagtgactgatgaattcaaaagtttcatatatgacatatcccaagccagcataaaggtaattaattcaaaaattgtataaagttttcatctttgattaaaaattgttgtgattggatcacacctccaacaagaacaagaaaatcaactaaacaagaattcaatttccaaatcaataatcaaaaatagcaaagaaagaatatcaccagaaattgtgtagactaatctatgaaacaatgtgtttggtgatcaaaactattggagcaaagaatgaactttattgatgaacatgaagtaatgaagtcaaaactattggcaatacttgttttcctatggcatgaagtcatgggttcgaacatgggtggctctctctgggaagaagtatttaataaatctgccttaaatgtgaacttttggtgtcggcccattcccaaccctctacttcaggaaaggcattcaccactagttgttcggtgcggttttggtgacacgccccatcataagtaggggagaccacacgaatctcgacgaacattctagagcggggttggagctctcttggtaacacccagagaggagagctacattggtagccccctcctctcctattattccatcaaagaaaaaaaaaaacactagaatacagattcatctcacacgagcgaagtcatttcaagaatgaacaatccctttaacaaccctccaagaacacacactctgttttcagctatgaataggtggaagtagactacttatagtagctggttttagttgaataactaacagatttagttagttagttgctgaggtgttaaagtccttttctattagtatcttaattacaacaaaattgaacacttttctggttagttttgttatgccatctttcacttacatgagatctttcttctgtcatttgaaggggaatgaccacaaaaccgagcctcgtatgtctttcgaggaaggtgccagagacgttgccgttctagaagcaatgcttgaatccggcgcaaagcaaggtgcaccagttcaagtaaaaaagttttgaacttgattgatgattaactcttctttaaaaatatgattgaaattcatgatacattggtatcttgatacccctattttttccctttaacatcaagatatgaaatgaaataaaaagaagagatttgtagaactagtgcttatttgaataaagtttacttatttgttgttgtcattatcaaaacaacttttttttagcaaagtattcacttatttatatcactttatgtctccaaaccagacaacaatgaagactactaattaaggtactaggttttaagcaaatactaacaaaactttagtcctcatatcgatttcggtattcagaagagttatttggtctcatttttattttcataatcgtatgcgttgtagttatttagaaacacatgtaaatttttagaaaaaataattatgcatacagtaaaatatttatattttattttcgatattgtaaattatttaaaaaattttaaaaaattaacgggcagccctaaataccttcaacgtacaaattcaagaaaaaaaaagatcagactaaaaaactcttttgaataccgaaataaatagagagtctgccgaaacactttattaaagtgtgtactataaacttacctctatatttcaattcccaatgttgccaaaatagtgaaaatgtacaatgaaaaaagaaaagaaaaaacagattagagatatcaatatttgttgaagagaagagtagttaaagtgaagagctttatgggggtttggtgtgtgaatattcttcaactttgaaaatctttttacctaaataacaagatattgcagaagatggggtctaattgatcatcttcacttcatatgcatgtgagcattaaaaccatttgatcttaaaggccaaaaatctcattcaaggtagtggagcaggatcttacacatgctgcaatccaacttgtatatacatacatatatatatatatatagcatttaaactcttccaaatcaaagcctatctttttctgttgtagcactgtacacagatcatagttatgataatgaaaatgacatcacttttcacagccagaaatccactctgctaagggtagtttgtttcattttctttctttttttatatcaagaaaataactcattcttaagctattatgaccaatgttgaaaaagtaatatttttttaagaaaaatatatatatatatttgtaaaatgagatttcagacttttctagtgaggttagatagtttaaacaattgagtaaaactattatttattttagggtatgaaaagaataggtgttcctcatttagttatcatatataatatgatgctattaattagctatactttcaagctatgagtgaataaaatgacatgagagttaaaaggtttaattatgtttattaaataaatatgatttttggctttcgaactattatcactatttcatcatgtctcttcaaatttttaattttgccctaaatccaaactattattattactaaat

SEQ ID NO: 185006 - DNA, 6252 bp, Cannabis indica
aaaaaaaaaggtgagcaactaacttaaaagaaaaagaataagctaaagcttacttttttgaagctttaataagtaaaaacacaataaaaaaaattaagtaggaaaagtataaatataaaaatttctttattgaaatataaatgtcaaatttagaaaaaatttaatatttagtgtaaattctccgataaataaatattgagctcaaagcaaaaagtttaatattgagtcactttaaattattccaaagattgccacaatagatacttttttgaaatatcaaatttagagatgctcacattttatggttctgatgctctctaggagcaaacttcttggaagttcatagaggataactgctactgttaatcgctctacatcatatcaccatctactgtcattcgaatcctcctggtattctactgtcatggacccagcagggattagtgatctttttgaagaatccatacaattgtcccaaagtgacttaacattcagcctcaatcctggcgaggtggatgaaccccaggagtccaacaaggttctattggggaagataatcaacagacataaactaggcaaagctgccatccagggatcgctcaaactttcctggaatgccataaaaggctggaagtggaaggaaattgagggaggcctgattcagttcacatttgctaggagagacgacgccatgaatgtgctggcccgaagaccatggtttatctgtggggctctggtggttatcatgccatggcctgcttggctaacaccagcagaagttcggttcgataaaacacctctatgggtaaatgtggaaagcataccacctttctattggaacttatctaatctcaaggagttggcttcaaaagcatcccctgtacacgaactcccacaaggcattgaagatgcaatcggtctgagtactctcagattcagggccacaattgatctaaacaagccaatctactctggtttttttcttcgcagacagaagctcaaagacctctggatccaatataggtatgagaagcttccaaaactctgctttaaatgtggacttctcacccatgaccaaagcacctacttcaaagtcccaaccattgtcaaagatgaatttggcaatttctatcccatgttcggagtctggttgaaaaacgatgcccaagaaaaatccaccttcaccactcctcttgcaaaatggtttcaagattgggtcctccaaaaacgcctgggaaccgatcctgtgcttcgaaaccagatgaaaattcatagggccattagaaatagcgaggaagctgaaatatgtgagtgcagaatgcaactccctaccaagaaaagaatagtcaccgattccgaagatgaaggaagcgcagccacggcggagcaagttattacccaactcccgttggtttacctgccaggcattggagaggttgccccttttggcaataactccaaaagaatggtaattcaggacctgatcgatgcagtaattgaggcctcagatgaaacctccaaaagcaaggctggtttgggtaaacagggagcagcttcagattagtcaaagaagacaatacggaccaatgagacagggacagatagcaccatttcccttcccagtatcgacaatgaaggtaacattgccctacactctgataacgttcctggagttagtacacagcccgaagagcacgctgtcccttgtgccgaaagtagaagaaaggacaagggcaaacatatagccgttgggaatgactctaattttagacaaatcttgccttataaggcttcacctcttgggacacaagcccaaatcatcaattggccctctaaggaatgttgggcccaaccaaaggcccgtgagcttctaatgggggcccttactgtggacaaattccacagagaaccaactttgttcaatcccattttggatattgaagattttagggtccaagaacatctaaacggcccaaggaaaaggaaagggtctgatggcattattttcaattcccctcccaaatcgaagcccaatcaaaaaccattttcgcaaggcaaggaggtggggcctttggaatctgaacacaaacttcctaaccttgatccactcgcaccagactcagagactcttgcagaaagtcttccccatcaatttgtgcctgggaagaatcccgaaaacctgactgcctctcgaaggggaagaccaaggaaatctattccaatcccaaattccacaagtccttcaccaaaaagaagaggcaggccgcctaaggtgcaagagggactttccccaaccccaaaatcattcaaaggaaaaaacaatcgaaggaagaagggagaactcaacacaacgatcacgagtctatgggaaggtaaaacaattgacctgaaggtggacctaaataaccacttcgtggtgatagaaaactcttcgaacactgtctcaaggtgtcggataacagaaattcaagatgaaccacaacaaagtttcacatccaacaagtcggaagtggattttcgttttgggcctacggagacttgcccacaaaagtctccagagtcgccatgaaaatcttagcttggaactgtcgtgggctcggaaacgccacgacagttcgacaattggcggctctaatccgtcaatttcaacccgagatgttacttctttcggaaacttgcattcctagcaataaattccaaagagtgtgcaacaaactcaagtttgatgatcatcattatgtccctcccgtggggctctctggaggcctggggctttgttggctaaaaggagtccaatgcaacattcttaaagcaaccaaatatgttatctggggtgaaatcacttcagatcctcctggagaaaaatggcatttatatgctacgtatggccccccaaatggaaacaataaagaagccttctggaatgccattggacactcgataatctcatcctctcttccaacacttctaataggagatttgaatggtacgctcctggattatgaatgtttgaattatgctaaacaaggaaattcctctaagtattcttttgacctgcgccgaatggttaaccgcacgggcctagtggatttgggattcattggacccatcttcacttggtctaaaaacaatagaggtctcccagttggcggagtaatgaagaaggcaagactggatagaggcttcgcttctacggattggcggcttcttttcccaagcgcaatacttaatcaccttacggcttcagtttcagaccacaggccaatcttgctggatacttacgggggaatcaattgtaaaggtaaaatgtttaagtacgagaacatgtgggctagagaccaaagatgtttttgggtagtcaaagaagcctgggctaaaagacttcatcagaatccaatgataaacttccatagaaaagtgaggaacaccagccgcaaactccaactgtggaataaaactcaattcaaacatctctcgcgtcaggtccaaaaagccacttctgccttggcagaggctgaaagactcacacctgacaacctcgaggccatagacgagtcgaagaaacaactttctgaggccctcctcagagaagaaattcaatggaagcagaaatcccgagtccaatggcttaaggaaggggacaagtgcacaaaattctttatgacctccacggtggttagaagaagaagaaactatattcagtgtatcaaaggtagtgaggatggggattggatttgtgatcaaaaggccattgctgagtgttttctagatagcttcaaggatctatttaaaaagcaccaatctcaggcccccctacactgaacggagtattccaaaatcggatagacgagtcacttaacgaagctttaaacgaaatcccaaacttggaagaagtgaagatggcaattatggagatggggcaagacaaagcgcctggaccggatggccttccccctagtttctacaatcaccattgggatactatagccccggactttcttgaaatgatcaatcattttttctgcaacattgagctcccccactgtataaacgacacatcaatagtccttattccaaagaaagacaatccgactttcaccaaagactatcgccccatagccctctgtaaagttgcatataaagtgatttccaagatactcgctactcggctacggagtgtcattcaagaacttatatccccgaatcaagcggccttcgttaaaggcagatgtattgcggaaaataccatgattgcaagggagattgttcattcctttagcaagaaaaaggtaaaagaggattcatgatgataaaacttgatctcgagaaggcttacgacaaaatggactgggactttatcttgttagtcttgacgcaacttggcttcactcaccccttctcaagctggatcaaagagtgcatctcagtaaaaggaattaagctcctcctcaatggaacaatagcaggcaaatttactcccggacgaggcttacgacaaggtgacccgttgtctcccactctattcatccttgtagccgaaactctctctcgtttactgatcaacaaggaaaaagaggggaagctcaaaggattcaaactcaatagacatggaacctcggtaagccaccttatgttcgcagatgatatcatcctctttgggcaggctaccttgaaagaagccaaaaccttcatggaatgcttgtcattgtattgtaaatggtcgagccaatctcttaaccggcagaaatcatccatattcttctctaaaggcattgacagaaggaaaaggcaagagatatctcagtttttggagataaaaaagatggctcccaatgccacctacctgggccttccactattccaatctcagaaaagatcagaggacttcaaacctcttcaggaaaaagttcttaaaagagtccaaggttggaagagcaagcttctttcaaacgcaggaagagcgtgtcttattaaatcggttggctcttccttatcaaactacttagcttcttcggatgcccttccaaaagccaccgccaactcaattgacagaacccttagagagttttggtggggcgataaggaggacaggatagtgctgcatccgatcgcttgggagtcgctttgtaagccgaaagttcatgggggcctggggtttaggaccaccgaagctactaataaggctttccttataatatgggcgtggaaaatactcaatgacgactacagtctttggaaaaaaatcaatgataggcaaatatctcaagcagcaacaatttcttgatatggagtcgaagccttcggactcattactttggaaggccattcttcaaaccagaccaactctcttgagaggcttatgcaaaaagataggggatggtaaatcaacttccatttggtttcacccttgggtcccaggaaacattcttcaaccccaaccccgttttgatgccactgaaggagttagtttggttagccacttcatcctcaataatgaatgggaggatagagtgagatcttggttccatcctgatgatgcgaagaggatcctaaatattacgctccccaacaaccccattaaggactcttggctctggctgccggagaacaacgggaaattcagcataaagtcagcctatagaacaatcaagaatctgaattccgagtcagccatctgcgacatatggagaaccatttggggagcaaaaattcataaccgggcaaagatgctttggtggaaaattgctgccgattgcctccttagtcgaggtaaactccaatctcttttccccatccaagataaccgatgtcctttatgttcccttgaagtagaaacctccttccatcttttttgggaatgtcattttgcccgtgctatttggttcggctgtctctggaatatcagatcctcttcaattcccaactgtgggggatgggaggattggattcgatggttcaaaatgggagctaatagaccgcctaatgtctcaaattgtaccttcatgggaggatcagctactatctttgaagctatttggagggaaaggaatgacttagtccataatggaaaatccactccagtgaatcaactaatcatccataccaaccgaagactattggaattgatgcagcatcaagatactacgaccgtcgctcccacaatttggcttccccccctaaagggtggcacttgtgcaacactgacattgctatgggtataataattcacatggtgcagccgtcttcagattg

SEQ ID NO: 185007 - DNA, 6232 bp, Cannabis indica
ataaaataagatgtgtaatattttctctaccaagaacatttgtctctctattatcattcgttcattgtctgtctgtctatcttttatttttatgagaaatgaagtcttcatttaagattaagaaagaaaaagaattacagaaagtgggggatctgatttctcataaagaaacgtacataatctgaaaaggaaaagataagaagaaactaaacactagttgaaacaaattatttttcattgaaaaaacattagggatagtgagaaattccttccaattctcctcctagaaatgaactgaattccctatttattttgaaccaaaggttttctatgaatcttttcttttgcagctccctgctattatatgccaaggcctaacattagtggtgtgccctcttgtatcacttattcaagatcagattatgcatttattgcaggtaatttttttctcgatcagtatatcttgtttttagtttcctttctgttagtattctggcatctcttctgataacattactattcaattgtatcctcctttttgggttttctgaaggcaaatatacctgctgcttatttgagtgccaacatggaatggactgatcagcaggagatccttagagaacttacttctgattattgtaaatacaaactgttatatgttactccagagaaagttgctcagtaagtgtatctccattatttgtatttatgcatttactctctcttttggtataattgggctaatgaagaagcatgtgtggaactaaagccatttttcttaataatagatatgctaaatttacgattagatcaaatttcattatgtaattccttgttttctctgcttactactactagattggcttcattgtttaaatattctttctgtggtattgcagtcctattagcctttgatggaagattgctttgttcttattgtactatttgtcatccatattttgtggtctactgcacttaacactgtttgaatagtcaattgaagatatgtctaaaaagtaaaaattctcatgtcttagtaatctaataagctggtaatggggagagtatttaatatagttttatagtaacagtcgctacccgtattagttaagcctagtatgtgttttaaataatgggccgtttctttttcttccctgtttaactaacttataacatttatatattaatgcaacaaaatttgagctctccaaatctataaatctcaatttttctggcacatagtttattaaatagatttccctagtatcttggatagaaatatatatgtattatgtacaatataaatataatatattatttttgtttaagccccaacctaccatatgattttatctctgtttgaaccaatatcatttccaaattggattttacccttatggatgcaaatggcacatgttttttttattatccttaactgttgttttgaagaaacaaaacacacatgtaaacaacccaaatttgtttagtcagttcgatcattaacaaagaattttcactggcataaattccaagtacgatattcattaataagttaacaaattatatttttcttttttatacttttgatatattaaatgtatacatttttgtttcaaacataagaagttggttagtgttacatgattgagtaaaatattttcagtttggtgtatttacccaggatacacattttcctttgttggttttcattttggattcggtctggttgttgtactcatgcttattgtattcaatatgggctcaatgatattcgtaatttgattaattccccttatcctcaatcatgaacacaatagtgctaattttctaaacattacagattgaaattaaaatccaagtggaaaaaaataaaaataaagtccaagactctgattacaatgcataaacattttttttaatactgcagaagtgatgcccttttgcggcacctggagagtttacattctcgtgagttgcttgctaggattgtaattgatgaagctcattgtgtgagtcagtggggacatgattttagaccagattatcaggttcttgacccctcttaaaacctttaaagtttatcttgagtatttattactcatttttctaataaacattttcatgtaaaacgatcagagtcttggtatcttaaaacaaaagttccccaaaacacctgtgttagctctaacagctactgcaacagccagtgtgaaggaagatgttgtgcaagcccttggacttgccaattgcgttgttttccgtcaaagttttaaccgtccgaatttgtggcaagtatcaatcactgtaaaaccttctctgttgttacaggaatacttttttaagctgtcattcaaatttaaagataatattttttttctgtaaattgcaggtattctgtcataccaaagactaaaaagtgtttggatgacatagacaagttcattaaagaaaaccattttaatgattgtggaataatttactgtctttcaagaatggactgtgaaaaagttgctgaaagattacaggtactatattatgatcactttgttgttgaggccttccatacatccagtttttgatgtcatatcacttgaaaaatgtttcttctacttgagtcttgaatttatctatgatcattttgttgctacatgggaagtttaaaagatgttatgtcactttgattacatctggaaaatccgtacaatatttattttattgattatgatacagcttgatttcatatttatttccctatctgtcttgagagattattttctactgatcttggaatctacagatataaccaaatctgctaagcaatggggagatcagatcataagcctttttgttttcttcttcttctatttgcttggagaatatcatgagatttgtttcatttagagttcacttatatcttcttcaggaatgcggtcatagagcagcattttaccatggtagtatggatcccgctcaacgatcttttgtgcagaagcaatggagcaaagatgaagttagtataatttgtgctacagtggcatttggaatgggtaaatgctacagtgctgttaattgttgccttgatcagtttaatttgttactcgatcacaagctaacattagaatttcaggaatcaacaaaccagatgttcgctttgtaattcatcattctctcccaaaatctgttgaaggctatcaccaggtgtttaaatagaaagtagtttggcatttcttcattggaattgttcgtgtttgacatatatggataacattacatattggttaatgatattagcttattgtggtctttcgttctagagtcaggagtgattatatgtcagtgtcattatatgctaacttcttgcattaccatgggctaggaatgtggtcgagctggtcgagatggtcaaccttcatcttgtgtgctgtattacaattacagtgactatgtaagttctagcaaagctgctacatcagatcagttttttttacctcgattgtatcgtgtattttttgaagactgaagcttactaatttattttctcatctttgtatttatattccttggcatatttttgttattctcgtgcagataagggtcaagcatatgattacacaaggtgctgtagagcaaagtccgtacatgtctagaaataatcgtgctaatacaagttactcgggaagaatactggaaacaaatactgaaaatcttttgcgaatggtaattgatacaggcttctgattgtattgactattacgtcttttattttgctgctctctttgaaatcaaatatgtaaagtgtgtgccttgtttcaggtcagttattgtgaaaatgatgttgactgccgacgtcttctacaattaatccattttggagaaaaatttgatccttcagcctgcaaaaaaacatgtgacaattgtttgaatatcaaaagttgtgtggagaaggatgtcagtgagttggcgaagcagttggttagtaatcaatgtagttgtttgatctcattttttttccttgtaaagaaatgatggagtgctctttatgttgtttactgtttgttcatttataattcatagttcttgcatatccaattagtcacttattgacatgtgcttacaggttgaactagtgaaattaacaggacagcagttctcttcatctcatcttttagaagtctacaggggatcccttagccagtttgtaagttgtaattgtaagggatgtatggtgctttctattactgtaacttatttttacttcttaatttaatgtttgtaatgtgaaaataggtcaaaaaatataaacatgaaaaattaggtcttcatggggctggaaaacatctagggaagggagaagcttcccgtatcttgcgccatcttgttactgaagacattcttgcagaggaagtaaagaaaagtgatgtatatggatctgtatcctcggtgctaaaggtacatgtagttgcttttgtttgcttgtgcatggttctcatataatatcaatgtatacgaaagagaagaaattggtccttggcaactctatctatcttttttctcttttttaaatgtataagagtggtttacttttcatctcaggtgaatcagtcaaaagcatatgatctctgctctggcaggaagaaaattgtgttaaggtttgactttctagtcatgctattcttgctcatacttaggttatttgctagttctgactaatttatttacatgaaaagatgaagtctatgattattaacgcttgcttttttgttcattcacttgcatttgtcatgttttggaaaatgttttcatttctttacagtaatggtttcctttatttatgcatgtcttggtttgtcctatagcctttaactgtactaccctttgctcaattacctacacaactataatttatgctggctgttggttcccttacgttgtagatttccttgctctggaaaagctactaagcaaagcaaatttggagttactccagctaaaggctcattgccccttgagaagctgagtgcacaagctggcaatcctggtgaacccaagtcagacgtggtataaaactcgtaatttatatgcttcctgtgtagatttagtactcatttatgtatttgtgtacatgtaatgtaattgtgcatttgcttcatccaactgttgattaaatatcaaaatactgaaatcaataaaatacatgatcttttacttggtctaatcaatttcaggctctgtcagctaaaatatattctgcgctacgcaagctccgatctagtcttgttaaacaagctggagaaggatttgcagcacaccacatatttcagtaagctgcattttgtttttttctagctttgttttatatgggcatgatatggaagaatgatgtggattggtacactcgcttgatatgttgtcgttttctttcatttagcaatgctacactgcaagcaataggcagcagaatacccaaaacaaaagaagaactccgtgaaataagtggaattggcaagtaagttttgtaattttgtttataatactgattagccaacggacatgttaatcgtcttttttgttttccctttcctaatttagtgttaagctagccaagtatggagatcaagtacttgaaaccattgaatctaccataaaggagcatatgaaagacaagaacagcagcagcggtcacgacagtactgaatccgcaaagaagaggagagctggtgagcagagtccaaatctggaggactatgaatttaatagcacaggtagatccaagaaaatggcatcaaagaggcagtccaatgtgaccaactttggtaataacatggagcaagataattacaaccagtacatagatgatgatttagatttcatagattgtgatttcgacagtattgcatctcagatcaagactaatcaaaagaacaatggcggaagggtgctaccttgttggtcaacacctggtaacgtttgacaaacatggtctcttagaatatgccatgaataatagctaggctaacaaacaattgtaaggcattgctgacctttttgtcagtaatatttatttctaaaggaaatgcattgattgtgtccattgataatttgtttatatttttctttagatgtttatctcgtgttgttttactcatcttttctcactaaaattgtctatgatgagatcatgaaattatgtcacaaaatgcttcacccttgttttatacattcaattgttttt

SEQ ID NO: 185008 - DNA, 2449 bp, Cannabis indica
ttttgtacccatgtcactagactctgttgtccacgtggtaatgtatgatcaacaggctttctcccagtcagaagttcaagcaggacaaccccaaaactgtaaacatcactctttgcattcagctgtccagtcattgcgtatctgccaaccataatatttttttttcaccttagtgattagattagagatatatctgaaatttacaacctttagaattgtcagtaattaaagacgcttgtgtatctcatcacccatgtacactacaaacatgtaccatagttctcacatgactttggatgctcaaacatgatcaaatatgaaaatcatatgagaaacaaattatgagttatatgcacctacagacagacacgactatatgaatccgtatatattcgaatgtaagataattacatgcgctcacaaatatatgtatagttgtatatatactagtatgcatatgcatccaaacatacagatacgtgtgtgtctgcaattgtaaagacatttataagaacttaagaggaagaatccataaagggcttactcaggggcatgataaccaaaagttccaagaacacgagtggagtgaagacgtgctgccatatctggagcttgattagacaaatcaaagtcggcaatcttagcaacatcatcatcaaatattagtacattgctagacttgatgtctcggtggatgatatgagggtctgccttttcatgcaaatattcaagcccttttgcagcccccacggcaattttcactcgttgtgcccatgtcagaacaggaccaggctgtgcccctttaacacctttccttcctacatggacacgcaataaagataaaaaaacctttctgaaatttggagaatccagaattcccatttgaccatattgcaatcaatttaaggttggtactctcattaaaagtgagtgaaactccaatcaagattatacattatttaacttgaaagctgtcaacataccatgtagaatgtcatgaagagatccattagatgcaaactcataggcaagaatacgtgaatttccatcgatacagtaccccagcaattgaacaaaattatcatgtttcagccttgaaaccatagagacctgtaaatttaagcattaatatacaaaatgagttcaaatctacaagcttatgcaacggaaattcaaagaaacaaacaagaatctgttgctaaacctgggctaagaattcttcgtctggttgcttgctagcatctagtttcttgattgctgcagcttccccacttttaagtgttccatagtatactcttccatatgatccctctccaatcaaagagttagttccaaaattatccgtgatttccttaagttcatctgctaataaagcgggaacttcaatgggctgaaccttcactgcttgagaacctgggtacagtttctgaggcatggtaacccccatcatttcctacatcaagaaactaaactcagtccagtaatgataaaatcattgaaaatgagagaaattgaggcatgaagaacaccaaataaggttaaacaatatattccaaagcaaaacgggtgcgtagtaaaagaggaacaccattgtaaatgaagaaaataaaataaaaaattatccaagtcggcctgactaaacaaattctcactgcgaaaaggcatgcatagtacattggaagaagggaatacctgctgaactgcgagtcgggtatgcacctccactttcagctggtttatgcatatcatcatcttcacaacagctgaagcaactcatgattctttaatctcgattacagctgcttgcttacctaaaaaaaaaaatccaaattaatccaataggtcatttcacatataaatgcggaaaactgatgacaagctcaagtgtttcgactaaaatgcaaagctaatatatttgagagaggaaaaagaaaaatcaactcaaatttccctttcttctccaaactctctcatctgggcttaaattctaagtttattacaaagcaaaaccaacttttcattccgtttgcttaatccgtaaacttaatactactctcatagaacagtgggatattcgatttggatcgcacctcaggaaaatatgacaaattattagcaattttattttaactttttctgttttttaaaaaaattttcaagcaataattcattaaaagtcttgagtattctctttccaaaaatcatttaaaattctactacagacttcagctacgagtcagctttttcagataataaagaaataaataaataacaaaatacagaaaaacaaaaatccgatgagatcgctccagctgaccagaattttgacgatctaaaacacttacggcacgattaataaccagataaaagtttgaaaaggcaaagagagagcataccagagtatcagaagctgaagtctagaaaccagtggtcgatggacaagcacggt

SEQ ID NO: 185009 - DNA, 2299 bp, Cannabis indica
aattaaagtgaggtgagttatacatgagaattttataatatttattttgacttggtaatagttatagtattgatatgtatccaaatagcacccatcataagcctaatcaccaacgtgtcagaaagtggggtaaagttacactcgtccacaaatactatatcatcaacaaaattttctcaaccatcttcaataactctaaaaaaaatgttctggtaaagatcataccaacacattttcttcactgtagttctatcattttcctgtgccatttgcaatgtttttcttatttttttattattattttgtttttttttttggactaaaagcatttcacaaaacgagaatatataattagaaataaaaaaaaaggcttacttgggtcgtccgtgacgatcattgcggtccctccaaaatcacaggtgccaccagcaagcttggccttctggaagtaactgttgaaagcgtaggaagcgtgggccagtaacgtattgggtaggtagcaaggcccattgggctgaattgacttgcaatctgctcctgtcccgcacgcatagtccaacgccggttgcatgatcgagtcaggcactgtgggcttcccaacgcaccacactgcagattgtggcttcttgtggtcagggggtgtcccgttattgggtcctgaagaagacggtggtggtggtgggactggcccaactggataagtcatagggggagtgttgagttgtggtgggcttgggcttgggcctgattttggtgggcttggcccataagggggtggtactggaaccgaaagtggagctggtggggtaggagggagtggagggtttataggtggggttggaccaggtggaggaggagttgggattgatgagggtgtttgtggtgaaagtggtggaaatgctaagaaaggaggagagttttggggtgagggggaactgtagggtggtaaagagaagggagaacttgcttcaaatgtttcaaattcaaagcttgagtaatccaatggctcaccaatattaaggtgattttgtattcctacataagtcttgccttctttcgctttctctgcatattttcttccttctgcatatacacagatgagtaactgagttgtttttagttcaagaagttaaaacagactaatacttaccacattgaatgaagaatgttgttgctgaaactgcaaccaaataagcaattaaaatgctcatttttgagtactgtgatcttctttttgactccatttatgaaagatgagttaatctaataaatgcccccaatgagcaaaattttccagttgaggatttgctgcactactcattcttttatatgcacttgggaatttatttatggatggagtgcatatgtaggtagctaggaaataaattaactagcaaaataggagaaaggtatcataactgaaaactaaaggggattcctttagtcactttttcatttttgtttattttcaacattctgcatattgacacttgtatattgaatttggaaagcagggcacacaaagatttggaaggggagagcgtttagaaaggttcacaggtgtatttttattagtattataatttattttaatgggatgaatatattcttacttgtcaatagagctatatgaaatatttttctttttgtgttaatgtttttggcactttttcttttgcttgaattctactcaatggattgctaactagttatttcagattcttactaatgacactacctcaaaacattaaaattgcatgatctagtaatataggccacaaacaaacaagatattcatagattgttaactgggtaagaaatcatttagtttcaagttcagggattgaaatttgcatatttaagcactcaacacctttaatataatgtgatctgtgtaatgtttgcattaagttcctttgggtttaggttgtcttatagaaaaattgtctttcatgctttggaaattttatgtctgatgacattaaaccttagaaaattacgaaaaacttatgatgtaaggacataacacttctagtggttaatttgtaagatattttgcaattaaagaaattcagcattattagaaatgtttggtacgggaagaactttggtttataaaaatttaatatgtttattcattttgatttgtgtctccttacatctaactatctcagtgctgtgcgaaattaataaacgtttaatgcttgtttttctaagattcatgtgtgaattactaatcatgccctatctccagtatttttgttagaataaaagggcttaggtgtaacttgttttatat

SEQ ID NO: 185010 - DNA, 5671 bp, Cannabis indica
agtggaattcataggaaagaaactatgagcatcaaccaataaaagggtgccagatgagccaaatgacatagttgatgcgccaactgttattctgacgtacagtatgcgtacgatggtacaaggcagtttcgaaaataattatttaatccctcgaatcaaatctctatcaaaatctgattacaaattattattttcggattaatatattatgaattattaattttcttgaatcttaaataattaagttgaacttaattaataattttaaaaagtagtgagagacggagaagccactcctaagtcctaactcaatctcgatgtgggacagagacaacaactgttgaatctccttgtttttctctcttattagctttaaattttctcgagaaccaaacggaaaatatttaatcactcctttgaactttgaagaagaagactcaagagtctctttctttattctcttatatattactccgattcctcatccttcttcccctgacatttccaatcattttggatttttagtcttcgtatacgatcccctgctgctagctagggtttcgtttgctgtaacgaaaatggggaagggaggtgaagattacgcggccatggagagctcgtcctcgtcgaattttagagtgtctgataagaatgtatacccggcttgggccaaagacattggggaatgcgaggagcggtttcgggtgagtgtgagatcgggattgaaaaccgaggagattgaggagcggaggaagattcatggctggaatgagttggagaagcacgaggggcaatcgatttggagattagttctggatcagttcaacgacactctcgttcggatcctactcgccgccgccgtaatctcgtttgtgcttgcctggtacgacggcgaggaggaggagaaggagatcactgccttcgtcgagccattggtgatttttctgatattgatattgaatgctatagttggtgtttggcaagagaacaacgccgagaaggcgcttgaggctcttaaggagattcaatcggagagcgctactgttattcgaaatggtgaaaaaattcctaacttgcccgctaaggaacttgttcctggtgacgttgtggagcttaaagttggggataagatccctgctgatatgcgggttgttcagctgattagctcgactttgagggtcgagcaagggtcattgactggtgagagtgaagctgtgaataagaccaataaggctgtttcaggcgatgctgatattcaagggaagaaatgtatggtttttgcagggacaactgttgtgagtggaaattgtatttgcttagtgactcaaacgggcatggaaaccgaaatcggaaaggttcatactcaaattcatgtagcctcacagagtgaggaagatactccattgaagaagaagcttaacgagtttggggagcttctgactctcataattggggtgatttgtgctctggtttggctcattaatgttaagtacttccttacctgggagtatgagaacggctggcctacgaattttaagttttcctttgagaagtgtacgtattacttcaaaattgcagtggcgttggcggtggctgctattccggaaggtttgcctgctgttatcacgacatgtctggctcttggtacccgcaagatggctcagaaaaatgctcttgtttcgaaattgccaagtgttgaaactctgggttgtactactgtgatctgctctgataaaacaggtaccttgaccacaaatcagatggctgtctcgaagcttatagccatgggttccagaggtaacactgtgcggacattcaaggttgatggaacttcttacaacccatttgatggcgaaataaatgactggcctactggtggtatggattctaatcttcaaatgatcgctaaaattgctgctgtttgcaatgatgctgcaataacagagtccgagcagaagtacgtagctcatgggatgcctacagaggctgctttaaaggtgatactttattttggttatatacgtaattgtatatattgtcatacgtcttcgtgtaatcttttgctcttgaatactttgggcaattaaagttttgcatctgatgttctcatgctttggaaaatgcacttgttttttatttaattttgttgagtttttcaggtcttagttgagaagatgggcctccctgaaggatgtcctgatattggacccacaaataatttactacgtaagttgaccataaaacttgggcaagctttgtgttcagtctctccattttctgtctttttgctctttctttctttgttttgactgttgaactaaaataatttatctcttcctcatttcattctgcttaaggttgttgccagaggtggaatgaatgtgaaagcagaattgcaactcttgagtttgaccgtgataggaaatctatgggtgtagtagtcaactcctcttctgggaataagtcactactagtgaaggttctgtctttttctcttccttttccgctttcttcttgaaatgctacatgactcgggaagtttgaacaaaacaaaatgcaatctcactgaaaatttttgttttttacaataaaatttgtctatcgtattcaacagggtgctgttgagaatgtgttagagagaagcactaaaatgcagttgcttgatggttctgttatacaactagatcaaagtacaaggaaccttgtcttagatgtccttcaagatatgtcaagcagtgcactgcgctgtttgggttttgcatacaaggatgagcttcctgagtttgaaacctatgatggcgatgaagaacacccagcttataagctattacttgatcatactagttattcatcaattgagagtaacctcacttttgttggttttgttggactcagggtgagtcctgttttctctttctgtaaatagtattgtttatcacaattttctttcccaaactaactctgtatggctgtattttctataatttttaaggacccaccaagaggggaagttcgccaagcaattgaggattgcagagcagcaggaattcgtgttatggtaattactggagataataagaatacagcagaagctatatgccatgaaattggtgtatttggatttcaagaggacactagtttaagaagtttaacaggtaaagagttcatggagctgtctgataagaaagctcatttgagacaagatggtggccttttgttttctagggctgaacctaggcacaaacaagaaattgttaagttgctcaaagaagatggagaggttgttgccatgactggtgatggggtgaatgatgcacctgctctaaagcttgctgatatcgggattgcaatgggcattgcaggaacagaggtacttatcatttcattattataaattgattgtttttattgtatcgtttatgagatgtctatcatgttatgaggttagatgctggagcatattttttacaatttgaaataaatggtgaaccttgaattattgaaaggagaaatttaggacagtttatattgattttagttatgtttttttacgagttgaatatatgataaaaatggtattaaaaaaaattaataaaaatgtcatgaccagaattcaagtattgtcaattgaatctttgtgctgtaaatgggctccttgtttttctttttaatgcaagtgtatgacaaacatatttttattttcctttatttctgcttacgattttgctaacttaacggtggtctaacttcctctaggttgcaaaggaagcatctgacatggttttggctgatgataattttagtactattgtttctgctgttggtgaaggtagatccatctacaacaacatgaaagcttttatccggttagtctttgtttcaccatgggatgtctgtctctttcattgaagcaaaacaaaataagatagtatgaaataaactacattaagaaattttacaagtttctcaagaaaagctaatataatgctggttagatttatttaatttcacaactatgtaatacaattgaacacatgctttgagtttcgactttgcaaattttggcaggatgatactgtagtgtacccccaccatgtacttgtagtttgtttggattgaatgaagtaacttcattaataacccctaactgttatgctttctcaactggcagtgagaatcctaagtagattagttcatttcgcatctcgtgtatgccgaatataattttgatgaatttcattaccctatgacaaactctatcaggtacatgatctcttccaatatgggtgaggttgcttccatctttctcacagcagcattaggtattcctgaaggtttgatacctgtgcagcttttatgggtaaatcttgtcactgacgggccaccagcaacagcattaggatttaatccccctgataaagatataatgaagaagccccctcgtagaagcaacgagtctctcatcactgcctggattctattccgttatctggtagctttttgctccattgaaatggctttcatttcactaacttctttgtttatattatacacaaaaagcgaaactgtgcagtgtatttatttgattattttgtctcaggttattggaatgtacgttggagtagcaactgttggcgttttcatcatttggtacacacatggctcctttttaggcattgacctcagcggagatggtcacaccctcgtcacttactcccaacttgcaaactggggccaatgctcatcatggaaaaacttcacagtttcacccttcacagctggttcacaggtcatttcttttgatgacaacccatgtgattatttccagaggggtaaggttaaagccacaactctctccctttctgtactcgttgctattgagatgttcaactcactaacgctctttccgaggacggaagcctgttgacaatgcctccatgggtcaacccatggcttctttgtgccatgtttgtctcgttcggcctgcatttcttgattctatatgtaccgttcttagctcaggtatttagtatcgtcccactgagcctcaacgaatggctcttggttttggccgttgccttaccagttgttctcatagatgaggtcttaaagttcgtgggaaggtgtacaagttggtctcattcatctagaaggagcagaggaccaaaacccaagtccgagtgagacatttcaaacatttgattcaaacgaaccttacagatattgggcctcacctatagcaaccctcttcccattttttcctactgagaggaattgtttgggccttagaagaaagttcatctctttttacttactgttttaccatttttgttttcgagtctttagcaagactggaatttttctgattattggaaaatatgaccaaataagttttcgtgcacccaaattagatgtgccaggagcttttagatatttatattattattatgcaatttcactgtacaatgaaatgcattgatttttgtaagggaatgataggttttagtaaattatttatcagtttattttaccatgtttgaagtaatttatgaaaatagactattgtttaataaactgttgaataaacttttagcggaacgatattaccgaatgaaaaattttgggttgagttgcggattaagtcattatctttaagacgttcgcggtactg

SEQ ID NO: 185011 - DNA, 6352 bp, Cannabis indica
gcaactattttagaaacccaaatcgtaaatttcaaaaaaaaaaattaaaaaataatatataggtaattctcctattttttatcatttcaaaagtaaaaccatactataagtttataaatatgtaatcgcattacataaataatataattaattataattttttttttgaaatcaattaattataatttaaatagaatatatattaattttagtttgtaacagtaaatatgttctgacaaaaaaataactgtaaatgtgtaaataaaaatatcaaaaggatattttaagaaagaagattttttttttaaaaaaaaaatagagaaagaagaatttctaaaaatataaaatctcacaaaaataaaataattttatttttgcaaacaactgtcagattttactatctcatcaaaatttaaaaggattttactatctatttacataaacattgaaaaatatgtccatatataaatgtattgaaattaattatatattattgtatgtaatgtaaatatagtatatataatttgaattgatttttgaatgtatttttttttttttttttgaaagaacagaatttgaatgtatttaaattgacacaaatggtaatttattatgtattatgtgaagaatgattaatgaaagacaagatttgtcttgagacagatatgaaatgcattatttagaaagaagaaaattcataatttattacaagagttaaagaatcacaaatcacaacccttcaaacaaaacataattggtatttaataatttcacaggcgggctaattcattaatgtttatgcaaaacatcatttcttaaactttttttttatatcttcttcctacttcttttcaatttttttcttccatcattaattattacagaaagtcaactttcatattgatttgacaaatcaaataacacttattttaaaccacaaaatatttacaaattttctaaataataataatattaggtatgttcgagctcttatatcaggtaaggacacattggttaattcgctctgttattgttcattgaacaattaaaaaaaaacatattatatttttgtaccatattaataaataattaaattcgtagatcttgattgtgggaaaaaaaaatctcacaaaatccagcccataaaagtaacgaagaaaataagtattgtttacattcaaaaaatgattcaaagccctttaaaaaatgattttattctggaaaattagttagtagatttaatacattattaatttatattaattttgattggtaagaatactaagtactatactttattgtgtaattacagaatcaccctcaccaccactaccttctcacaaaattaaacatatatttgttaaaaagacagtaaagcccttttgatcgattgtggacagtggacactgtggcaattttttacttttcacgatataatggataagactcatatgagtagtacaacgtgaaattaccaaaaagggtgtctttatcatatgaaatttattttatttttttttctttactaattgttgaaaaattaatgactttctcaataagtctgtctaatatttatttatataaatattaattaataatatattgagtgattagactactaccggggtttaagaatgcatgttttttctttcgagaattcttatttgttttcttttgaaagatttgagctttagtttttaaatcctccattaatggccatgtgaagctcctacaccaaaatattgaggaaaagaggatttcttatggaaatataggtagctacgacgaagatcacagatccgccatggaaggccaactgagaaagcttgttcagaaagatcttcttcttcttctcattgttcttgaagcctcttttctttcagtggttttaggtgccacagacccagacgacttggctattctgaaccagttccgtaaagggatgaagaatccggagcttctcaaatggccggaaaatgacgacccatgtgggactccgaaatggccccatgtcttttgccaaggtgacagggtaactcagattcaagttcaggaattgggcctcgaaggtcctcttccccagaatttgaaccagctcgctatgttagaaaacatcggttttcagaggaacaagttttctgggccggttccgtcattttccgggcttaagaacctccagtggctgttcttggattacaacaactttgattcaattccgggagatttctttgatgagcttgactctttgatggttttagcattggatgggaacagcttcaatggcagtattgggtggatgttcccgcctcagctggcggattcagctcagttggtgaatctcacttgttcgagctgcaatttagttggtcctttgcctgattttctcgggaaaatgtcgtctctacaagtgttggaactttccgggaatacgttgtccggtgaaatcccggcaagttttaaagacctcacattgagcaaactttggctgaacaatcaaaatggtggaggaatgactggtccaatcgatacccttacagcgattgaatccctcagtgttttgtggctccatgggaatcaattcaatggtaaaatcccagaaagcattggtaatttaacttctttgaaagatctcaatctcaatggtaatcagttagtagggttagttcccaatggtttggcagatttggagttggataaattagatttgagcaacaaccatctgatgggttcaattccaaagtttaaagcagctaattattcctatggttctaatgcattttgtcaaactaaagaggggcttctttgtaatccggaagtcatggctttgatagagcttcttgatgggttgaattatccactgaggctagtttctgaatggtctggtaatgacccttgtcaggattggtttggaattacttgtgatcgtggtaaggtctctgttattaatttgcctaagctaaatctaaatggtacattgagtccttccttgtcaaaattagattctcttaaacaagttaggctacagaataacaatttgagaggttcaatccctgaggaatggactagtttgaaatctttgacattgttggatcttagtagtaacaatctttcccctcctctgccaactttcagtagctctgtaaaaattgtcattgatatgaatcccctgctaaatggtggtccagctaagacagttccatcaccagagagtagtccagctggggccgccccagccggagccaccccagccgggtctgggggatcaacatcttcacccaaatccagtaataatccatcttcctcatcatcaagctcacggaatcctaatgctagttctgtgccacaaaaaaattctaataggtctagcttagttcctattgttgttcctattgccagtgttgcagtggctgcgattttgctagtaattccattatctgtctactattgtaagaagagaaaagatgctttgcctccaaattctcttgttgttcacccaagagattcatctgatccagaaaatatgtataagattgctgttgcaagtaatacaaatgggagtgcttccaccgcaacagggagtgattcgacaagcagaatcagcagtggaacgggtgagtctcatgtcatagaagccggaaatctggttatatcagttcaagttcttcgaaatgtgactaagaattttgccccggagaatgagcttggtcgtggaggctttggtgtggtttataagggagaattggatgatgggacaaaaatagctgtgaaaagaatggagtgtggggtgattagctccaaaggtgttgatgaattccagtctgaaattgcagttctttcgaaagtcaggcaccgtcatttagtatcccttttgggttactccgttgaaggctatgagagacttcttgtttatgagtttatgccacaaggggctctcagcaagcatcttttccattggaaaagttccaagattgagcctctctcttggaaaagaaggctaaatatagccttggatgttgctagggggatggagtatctacatgatcttggtcaccagagcttcatacacagggatcttaaatcatccaacattttactcggtgatgattttagagcaaaagtctcagattttggattggtgaaactggctcctgatggtgaaaaaaaatcagtagtgaccagacttgctgggactttcggttacttagccccagaatatgctggtaagtgttcttcttataccttactattttacttttgctaatgctaaatgtgtttatctgaaagtttctttggttagtactctgttttattcgatgacactttactttgaattgctcagtctcaacttgtcacttatatatatttacatacacatgtttgatgattaaatattcaactgataccaacttttcacatgctctgatatatttagtgactggaaagatcacaacaaaagcagatgtctttagctttggtgttgtgctaatggagctattgactggaatgatggcacttgatgaagataggcctgaagagaaacagtacttagctgcatggttctggcacataaaatcaaacaaggataaactaatggaggctatcgaccctgcgcttgaaataaacgaagaagcattcgagagcattgccatcattgctgaattagccgggcattgcactgcaagagagccaaaccaaaggccggacatggggcacgctgtaagtgtactatccccactcgtcgaaaaatggaaaccacttgatgatgacaccgaggaatactcggggatcgattatagcctaccccttaaccagatggtaaaggattggaaagaagcagaggaaatagacttcagttacattgatctggaggacagcaagggtagcataccatccagaccaactgggtttgcagagtcttttacttcttctgatggtagataaaagagaaactccatttccattggcctttatttttgttttttcctttacttcttccccaaattgttgttattttgttaggtgtagatattatgtggtgttcattctgtttgggaatttaagatgttgataagttttagtttttattgtttttcttttgtgggaagaatgagagtttgtgaattgtgaaatctcaaaaaccttcaagtttcatgccaagtggttatgtagatacaaatcatcatgaattgaaaaagaccggttattgattatggttaagatcaattttcttgtatttgttaccttttaatttaatttttttttcttaaaaaaaatgtgaaatataattaaaattttgaaacacttgccgacaatttgaaaaatgagaaaagtaagatcaattgtgtaggattgtgaaatttcctttagaattgattttgacatcttctttaacaataactaattagaaattagcactagtatttggggacaaaaagttgttaatagaataataagaaaggtgagacgtcaacaaaaatcttctttcaataaaaccaaaaacaattaattaacataataataaatttatgattcgtgattagagattccagttctagatacggtgcataatttagcaagacattacaaattttgtcaataattctgttcaattctcaaccttacacttcttccatgtgtcccctctcttctactgtccacttcaaattaaaactactttaagatcataggacccctgaatattattattattaatatttgtattattttttttagctatggctaacgcctaacgacaatagttaatattgaatgaggcttggtttggattattacaaggtcaaatattacttgcatgtctctcattccgaatagtaatgcagagagaattgtgaagcttcacaaagctccaaatccataccatctaatttctaccaataatctttctttttttactgagaaataactgtgtaattatgaccacactttattgatcagactcaacaaaaatacattggttacccacaaaaacaaatataacaataatctaaaattcgttaagtaactctaatggtatatttggtgtcggtttaatattaaaaaagtataatttcaatactaattattttttttttattccaatcacaacaccaaaaattatactaaaaagtacattctcaattattatattattttataaaaattaaatatatatctttatatattaaaagtgtctatctaacggcatttcttggtttaacattcttggtttaacagaatatacttaaaaataaaagaatattctgttaaatttaacgattaggtttgatctcccgttaaaaaataaacccaataattaaaccaaaaaattaaacaatcttttaaataaacaatc

SEQ ID NO: 185012 - DNA, 5079 bp, Cannabis indica
attgcaccaatagcgatattgaccagtggtgccctctagcatttctcccattatatatatctgtatgtgtacacaaatcaatagctcctgctttgttaacttttggagttgtttgatcaataatggtgtaccatttgtctccaaactaacttttggggttatatataagttttagtcgttcattatatattaaagaattgatagtgggcataataatattataataatcatcattagtcattaatttttcaaaagaaaaaaaaaaaagcacgcctaggaaaaaagcattggaaacatgaaaagaatcatttgaaggaattaaagattcagaaattactaggaaatttaaaaaaagagaaagcatttgattggatatgatttgtaattgtacagaaatcaaaattaatgtttttatataatacacaaggctagcttgagtgtttttccatcgagaaataggaataggaatgaaaatggtactagagtagtgatatttgaccattggacgtgccatatttcaaaactactctcactgattttctctttctttttcttctttgtttgtatgaagtttattaattaagtgggtaagtgggtaagtgggtaagtgggttgtattatggaatggaatacaacctgtgcagttttgggccttgattttgggcaacacaaactcagcacgatacgaaaattatgagcttaaccagacataacatgaaagcacgaaaattaaatacataaattttttttttaatttttcaattcataaaatatagtttagttaaaaagatatataaatctgtgtcttaattgaactgatgtttgaactgatgttctagaccaaaaaaaaaaaaagaaattctagttattttcaaataaatattcatatatacatagtcaatagttacttcactaattttcaaaaaattgttagttggacgagtatgaaatgaaacagttttgtgtgcaactgactggatgaatcttattcgagcactgtaaaccactcatcatagagaaaatataccataatatagatgtacttcaaatactatgcaacaacttttaaatgagcacttttagaaaggactaacaacttttagtttatcattagctcttgtaggaattcggacaattcttcagatgaagtgatttaagaagagagaataatatttgaccatcttcaaaaatagcttcactattaaatgaccaatctttcaattcccacatatctaaaatatataacatttctagacatctgaatagaggacctttgtcaccaagaatctcatcacctattgagaccacactatcacatcctctgattgtaagatctttgagaaacggtagctgcccaagtgggagtaaaatacacccaattaatatacctctaattgtaatagtttttaaatgaaaatatatgggattcgatattaaatcaatatacctcttaccaattttccatttaatatacacaaaatgcacaatgtaacaattttacaccattaaaatttattcatctcatggatggtacaaatgcagaatcttttatgtgtgtatttctgtacttaatccttgtttattcaatactcaacacaaaattgtcttgtctttgacaactgcaaaatgggataattagtaactgaaacaagcagcctcattacacatttagttccccaatactactcatacactcaccctatatacctacttattcagccatgactaccccagcaacgtcacatttggaatgttcgaccacgaccacggtcctctcattgcttatgaagatatgaacagtgatcttcttcttgctcgtgatcttaattggtagtaagtaaataagataaggctttcgaaccagagattttgttgttcagactcacacagtgtctgctaagcactgcctttcatcatgatacaaatataacagttgtactttatttcaactctaagttttcatattcatattcatattgcagtggttttccaacaaaatctgaatttaattgcataattcaacaactcttgatgacaatgacatgagtactgagtactgtactctactaccttaataataataaataaaagaagcaactgtaatgagaaagagagagatcaatgcagatgcagacacagcatttagttgatatgttcattcatcatcatccaatcttacttttgtgatgttttgaatcttaggccaatcttaagagtccatttttctggtgaataattaaatggggagcctgcacagacatatggcagaagaaagtgtcatgttttctaaatgagaatactactaaaaccctaccctcaaactctataagcttaccacttttttcactatctgaaaactcagcacccgaagcaaacacattaaataaaactcagtaatgagttataaagacaatttgaatgtgaatttcatgattggattgatcatccatcattgatgataaataaataaaactcaatttctaataataaattaaacgaacaaacacaataaacataataaatgtaatcttaattacctatccagttaaattccacatgtttggtgtgttgaatcttaggccaatcttctcctttctctctcttgcaccttctttcacaaagcaaaatgttttattttattttgtattgtatttccaatgggtgggaattgtcatatctaaaaagacaagagtgtttaaataatcttctttctttttcttactttttgacacattgacttatatcatttcacattttgagtagtctctccaagttattttgccaagcttacaaagtttaacaacacatgatatagcagtacttaactagatgagtaatttgttcatttggggcctttctttgtatattgtgacattttaccttctcagtattattcaaattttatgatgccattacagaacatttcttggagtttgatcatcaacattttaacaaaatttcttttactgactaaaagtcatttgagctgctgtgaattcataaactaactaatgaagtatttgaagttgtagaaaagaatgaaatgaaatgacaacaaatctaatgtcccttcatcaatctgagatctttcattttcttaatcccaaatattaccaaaaaaaaaaaaagtagggaatactaaaacgaagtagtttgatttttgaattatgatacattgaattaatagcatttggtagagcatgcacaaaatttaattaatacatttccaatcaacttccacttgtttgatgtgttgaatcttaggccaatcttctcctttctctttctcacaccgttgctttaacaaaggacattcattgatacttaaacgagtaagagatgtaggcagcccttcttctggcaagcaccgcaacccttcacaattacgaatatacaaataagtgagggacgtgagttcttgaaaggcgttgctgtttaagctttcaagtttactacaatcaaaaatcataagtgtagtcagagtggttggaaggatccctttgtcatcgggaaaagtatcatcttcccaaccactgatatttaaaaatttcaaacacgagagtctctgtagatcccattgcttatggttctcaataagctttttggagttgggtaatgtaagactctttactttggagtgtgatccccagtctagaagcgattccaacactggacagaaatgtatacttatctcgacaagagagggagctgtgccttcgactgtctgttgagtacttcctgttctaggcaccaaacccaccattcgttcacatttaacgatttctacagattctaaggatggaagataacaacacggtaacccaacattaagctttggacatctatacagactaagatttttcagaagtggaaatatttgaccttgttgcctagcttcactactaaatgaccaatctttccactccaacatatctgaaatacgtaactcttctagacatctgaaaagaagaataccgctgtcatgaggtgtttcatcacctattgagatgacaccatcacatcctctaattaggagatctttcaaaaatggaagctgcccaagtgggggtaagatacaacaattattacagttgtcaaacctgattgatactaacttaaaaaatgcagagtccccaatccagtatgacaatattgtacctctgtaaaattcaatactaagatgttgcaagtttgtatgtggtcgaagtgcatcaagtatatcgttttctttttgtgaattagcagccacaccaccattacgtttatgtttccacctcaaaatcagcttcgaaagagacttcttatccttcaaattagcctccgaagcttctcctgcatccttgatattttccaacccagatatgctatgtaaattctcaagttctcctacctttttcattttcaatcctccagtgctatttctatcactactcaaaatcacatcagataagaaatacaagtgttttatagtattgagttcttggggaagctctttcaggggtacaccctcaatatctagatatcgcaagttgattaaccttcccatcttctttggcaattcatgaagccgttcacacccaaataacaataaagtctgtaaattgtacaaattacaaattgaatcaggtaattcttgaattccagtgtgagacaagtccaggtacctcaaatgctttagattgccaattgaatgaggcagcttcttcataggtcgacattcactaaaagaaagaactcttaaacaacttccacgtgtaagcaacatatcatactttatcatccagtaatacctgtttgatttgaatggcagtgctagaaaggtacgcaagctcttcacttcatgcaatcccttaacttctttgtccttgtcgtatttgtccttcatatatgataagtgacgtgtctttgttgaaagttcaagtaaatcataactcaaatccaacctaaaacaaaaatcatttgatacgagtatagctaaatcatgtaccaagtcatggatttggagcaatgatttttctttatttgaatgttgaaacaaagaccttgataaaagatcatcaaggtattcctccccatgtt

SEQ ID NO: 185013 - DNA, 4266 bp, Cannabis indica
gcaagaggatggaggttttattgtagtagaaatactgtgtgtgcttcctctttacttctctctctctctctctctaacatttgcgaaccagaatgttggaatccgagaagaacccattgcaggctgtactcaaatgtatggacaaaatttcctctttcatccaaattcacctctcaaatttcatgcttccatcacccaaaccacctcttttctctctctctcactcttccaaacaaaatccttggagcactcactctctcccttccatacccctcaaaaacaccaaggtactctttttcttcgtcttcttatttgtctgattgcctcagcttttgattcttcggtttgtttactaagtgtttgttggaagtcccgactgagttacaacgattttgtctgctcttggaggaaataaacatgaattggcttgtgggcattgcaattctatattatcatgtctagtagagcagtagattaaataaaggattaacttttgtttctttctttggcaaatcaatatgggaaggaaagtttatgaatttttagaactaaaatgatagtgatatcttcaggaaaaatcaggtggaccggtttcgaaagaagagcttggaagagcaacatggacatttcttcacactcttgctgccagggtattcttcttcttacatcatttcttttccctgttgttttgttcagagtctaaatacttgtaaaattggagattttcacatttgatttaactggaaatgaacagttttctcactttccaatgttagttgggaaactgaaatgattacatgttggccatttgcatctttcacactacaagatgcagttaaaatagaataaagcctcgtgtagaatgctttggtgattcaaggattgtactcatcaaacttttatttttactatctattttagtatccagataatccaacaaggcagcagaagaaagatgttaaagaattggtaagatacatttcccctatttatgtcctggacattatattcttgaatctagaaactattcatgaggaggttgaaatttaattaatgactaagccagatagtgatatgcttgtaagaatttgtacttttggaagaatttagaaaagtgtttagatttatttggtataatcaggctttttcagtggttttatattttctggtggcatgcagatggcgatactaactcgaatgtacccttgcaaagactgcgcagatcacttcaaaaaggttttgaggtattatccttcatgccattctgggagaggtccggttatgctttgagggtttttttttccatattttctcccatacaaaatttcatttctgctgagagctctgtgtgtaatgtgttaaattatctttgtatgtgtgtacgttctactatctccaagttttttcatattcgtttggcttagcacatttcagtatggtcaccatattttcgccacttggggtaaaggtctaagccttatgcacatgtttttggggggcctttatcagcatcctggcttttatgaatttgcaaatgaaacttctaaaacattgtatttaaacacagatggtaaaaatgaattaccgtgtttacttatgaaatgagtttgaagccatctatataatgttatttttcatgaatttggtcatccctctgtgttgttttttttgaacaatgaacattcatttccctgtgttgtcttatttgctcttaacttcttagttctttcatcatcaactgattattttggtatcacacctttgccttattctcagtgaaaaccctgtacaagttggatctcacaccgagttctctatgtggctttgtcaagtgcataatgttgttaacagaaggtatttttcgtttctggtccttatgttttaaaatgtcaacacacttttttatcacctgtccagaaaatttgggcaagttaataattttatggacttgtattgcgcatttttgtctttctagatttttgtttcatagtttcaattattagatggcactagttgttgctacaggtgtaagagtaagggaagacgatgacattgagcaattaaataattgtttcaattggtagaatttttgtaaagaaaacagaaaaggagtaataaatgacatgggcacgattataacattgaaaaacacctagatacttagctttctcgcaatattattgtacctcattggatttggatacaaatgtagattgatacatgttgttcgtagtcaatagttataccactaacttgtatgagtttatcagtaacaccaagttgcattgtgtgcaagtgttaagagtttatcaatatatgtggtgttttgctgatattctagattctatttggttattctagattctatttggtttttctagattctatttggtttacatctatcttcacaaacaaactactaacattatttcctattgctaatactgaatggctgcagtcttgacaaaccaatattcccatgtgagcgggtcgaggctaggtggggaaagtcagaatgcccggagcgcgaatgtgatgtactaggtagtacaatagacttttcggatacccgactctaattccagaatgactgaaattattgttgggaatgtccatggcactattattttgtaaattactatatatatagacatttcattgaagtggtagtaattcctccagtttttcataaaggcagttgaaacaaggatagaaacctatagataggcaacaatgttcaaatgtacttaaacgaaggtacacattttgattctaacaaagctaaatggtcaaatcaaagcaacaacctccatgaaccctgctctgattattgtccattcctgtcttcaaaccgatctaaagggaggagcctcgccgaatttcagtagataggctgtttcatagactggccgcagttgctggatcaactgtgcatccaagtaggcctcacaggagaagcaccaaactgataaatcactgtcataattatagatttaagaaaccacatgagccaagaaaaactcgaatttagaatgtacagaattgacaaaatagagtaagtttgggttgaacctgtagctaagtacaagagaatggtgtgtttggtggtaatgattgagcatgtgcttgttcacaaaacggctacacaatacctccttgcagcacaaacacagccaattctcttttgggtgttggcaccttttatatatataaatataattcaataattaaaaacaaaatgaattaatcaatagaaatgtgggaagagaagaactgggttggtttattacgcacgtgtggcaaggagtatgaggtgtggggatatgagcgagatcggaggagagggaaggcaagtgatcgcaggtggtcttcgcctctacccaacctgattcggctccgtacaacaactcctcatcttcttcctgataatgaaaatgtttatggacaagtcaggtgaagactccatatgtatgttaattgggaaaaagagagaaagaaaagaattatgatgtttaccaaaggagcagaagaagaggaagaagcagctgcggcctggttcgccatggacacacttattttctcagaaaaagggtgcaagtgaatgaagcaacgaaggtgtttgtctttacggattcctaaatattttggttttttcactaattacaacgcctttttttaatttttcactaattacaatttgagcctgattttttttaaataacattttatctcttgctttgggggtgcgggaaggttttaacaagtttcagtttgtagaaattacattatatacctattttactttatttgttttcatttttacattcatttccatattctttaaaatacatttacttttataaataacatttcttttctaccctttaaattaatataaatcatgtgctacgtggagagaaatgatatactaggcaacccacttataaaaataggtatattttaatgaaatataatataagggtatttttgattaatggatataaaaaaaaaagtattcatcaacttatctctttcagtttcaagttcgggtgtataaaatctatagcccaaacttgcccgtttgtgtgactgggcttttgggtttcgggctcagtgggtcgggtgcaggttggttcgggtccaagtgggttggaaatggattttaggttgggttatttttttttttttttttggaaaaatatcaatttttatatttttttcataaaacttctcaaattttagcaaccttttcactttaaaaaaaaa

SEQ ID NO: 185014 - DNA, 4392 bp, Cannabis indica
agctgcttcatgtatagcccaccaggcaccagccaaattattaactgaacaattcttctcaagagtattctcatccactttgacatccaaccatttaacattggcaccaaagtttcctgcttcttcaacttgatttaaaagactgtcttttgaactacgacaaccattaattaagcgttgtatccaagatgaaagaggaaccttccatctttgtgaaatataactcaagatagaaacaagttgttgtgagtgaagttgttgacaaagttgcttcaaggcaaaaatttgcttccaatgcaaattagaatcattgccaaatttaacaaccctggaccaagatgatgtagttgtctcatagtcatgcagcccacatgaatacattgtaattggtaatacatgagcaagcaacctcataaatgcattttttatctcattatctggatcaccaagtttgtctaggaccatttcagctatgtgataaaagtacaaaggatgtacaacccttgcttgcagaagcaacttcaaaactaatgcaacatgtgacctcacttttggttctctatctgatgcagcattcaaaatagagaaaagcacattcctaataatccccacattttcaaaagcttcatcaaaataagttttcgggtttgattttttgtaaatagcattgatattctcaaaaaatctctggatccaacaaagcgttgcgattttaactgctagaggagaagaatagttgagacctttaacatagagaggactgtacttccgaagatgctcaataatgacagttgaatgttcatttatgaagcagttaagaataatgaaattttcagcagaattgtccatagaagatttttcacagttctgatttcttgtagagcacttgttcaaaaattcagcttcagataacctatccaatgtcttgagaacactaacttgcaactctacatcagtgcgaacgggtaaatcaaaaggattcaatttctcaataataaaagaaagtaattcttcagacctcttaagatataatggtggaacatctaattggccaatcaaactggaatccctacccagtaaaacacaagtcaataaaactttcaaatcaaatttaatcaatgcacacaattcaaatttcgaacagactttagtattttcaacactattgaatccatctactttacccaaacttttcactagcaaatccttcagtagctctagctcttcaattaatgaagacactgcttgttgaacaacttcattgtttccgtgttgaagtagaaaaatatacgtggcagctgaactccctgtaactaaatgatttggatgtaaacgcagctgagatattggtgcatcgaactgtagtatcttctgcacagctgatgtgaggagaccaaacttttgcaacgatagtaactggaggttagtttttataaccccatgaacttgatatgaggtaatgttcccagctccaactgttggtgtggtagaagtcatttccaagctttgaaataagacatcaactgtaggtgtataaaaggtggaaaatctttcacacaatatttctgctaaaagagttaagcacttccatgaatctccaatccattctgaccacccaaacttctgaccaaacatggataggcatcccaacaacaacggaaccattttgctgagtgggtcacttatttgttccaataaattcagttccagtaacccagatgcagtagactgcaaaactactgagaaacaagaaagaagagcaagcaaccttcgaaactgttgtggagttccaggacttccatcttgaagcaaagcatccatgtcaccaagaaacttagaaagcagtccaagtgagaattgcaagttacccacccaatgtttctggaattgcaagaaactttccataatgattcgtctatctgatacagcaaggtctggcaccaatgcccaacccaatagcagatccacaatgtcaagaaaatgaggctgaaatgtcctagaaaacttcaatgaaatcagagttaaaacactcagaatctggtgcaacaaactcaaggaggttctctcatcctcaagaagtacttggcacgctttaagaattggcaaagcaaatctctcaattgcagtaatgtctccgacatttagaaactcccttaggctgtccaaagccaattctgcggccccatcaccagagatgacattgctcagcaaaggcaatgcccaaccaatgaaacgatcaaccaacgttccaagtaaaacatggttcggtctaccatttgacgttacaggagtcgaacatataacagcacaaagagcgccatagcctacagcagcttccctccgcactgggtatgacctgagatccaatatatccagagattacaggacgctcaaattctaaaataaatatatatatatataatgattatctagcttgtttaacaaatcaacgccttactttgtgatactataccccaaagtgcaaattacagagtatacatgaagctaaaattcccctacagaaattttacaaggcaaacccttcttccatgaagctgataacccatttggcctctaaattttcaaataaatatttgataaaaacgcattcttgaattcccgctttgtctcatgcatttcagattgaatttgtatctaaatatagtttaaaacaaattgatgaaaagaaaaacaaactggaatagattgaagtgtttgtttacttgtcagagagaagctgacagaagccctgggcaagaaaggtagctgagtgggtgacgaggagtgagttgggcgtgtagagaatggcgcgatggagtgagttcaaggcggagattcgaccggcgtcgttgtcttcggagttaaaagcggtggtggaggtggatgaggaggagggatcgtctttggggagggctacggagagaagccccgctagttgctgctgctgctgttggtggagtccctgcatcattcattcaattcgaaatcgcatctcttatttctaattgttatgctctcaacccatgaccgccatagccagagagtattgagagttccctcccttttctggttttcgtttcaggaaaatatatatacaataaacataaaataaaataaatctcaaaagtcgaagactaaacgtggagtggagaccctcaaactagggatggaaatgaagcctttttttttcttaagaaaatagttcatagataaaaagtttagacaccgccgtcattacacaaaatgtttacctagatagagaatacaaatacgcagctatattgattgtgggtaaaagtttattttgccacattttaagcaacaaaattacatgatcgaccaatacaagaaaatacacaccccacaaaataaggagaaagactattacaaaataaagagtaattttcaacttcccattgagtctccttgccattgagaaaattgatcactacccttaagtcgctctccacaataatgaacatgcatcctttttccttggccttgtctagggccaaacaacactcagccttttcacaaagggcatcagaaaagtccaactttgttgttcttacccaagccacctcaccttcatggtttctagttactatcgcaatactcatgctttccaaacccacttttacgtcgcagttcagtttaatccaatcatgagggggaggatgccaagcttccaccacaatcgaagtaggagtaggaaggaggaaagctctataatctgcaaaggagtgatgaatatagtcgatacagcgcttcacattatccaaattattattgtgtaccttatcattgcggaccctccaaatagtatcaacgacaattgaagcatacaaaaagacctcatcagcatttactcctttagaatttagattccagatgaatttgacccagtcccacatgcggacacctgtacctaaaacaggaaaaataccccacggcgaggatggccacagatggaaagccaaatcacacttgaggaacaaatgttccatagattcttcctcaaccccacaaatagggcaactcgcatcatcaatatgaaactttttatgaataatagatcgaattgggagggcattagacagaatggtccaccaaagaaccttatggtgttccataatgttactattccaaagcttattccaaaggaacggagcaacttcacactgagaggccctatgcaaagcttgcaagacaaacgcccactactctctttagtctagacccatttatcctctccatgacctgcaggtcatgatggtagagatattatctttttcaaacaggcagtttaacttttgggtgtcccaatccccatcttttgctaatagttcaacaactttagtaaaaccagaagttgaggatccattagatttt

SEQ ID NO: 185015 - DNA, 3139 bp, Cannabis indica
ccttttctcattaaaacccacactctctctctttcaaaccactttcagttttaacttcttcttcgtcttcatcagactcctttctttatttgttttttttttttttgaaacaggactcctttctttatctaaacccattatttttttttcttttcattcttttttctttttgcttttatgtccactcaagtctagccccttgagtacttcttagcgtcttacatctgattactctcagattctttgtttgattttttatttattttccattttattatatggatactgtgagaccaaaatctgctgtgtccaacaagagcaaactagctcggacttttcagaaagtgatcaatcttagaacgtccactagaatctcctccaacaatggcatctgcttgcttactcctcaaggttgtagagttaaagaacatgaagatgatgatggtaatgttaatggtgcttttgataataagtcaaagcactttgataagaccaatgacgacattacaagggctcgaaacagagcaatcatggaagctctggtggccaagctttttgctggtataacctccatcaaagcagcttatgcagaacttcaaatggcccagaacccttataatagtgatgccattcaggtggctgatttggccgtggtcaacgagcttagagccatatcagagctcaaacgaagctttttaaaaaaagaacttgatctgtcgccacaggtaacgataatgctcgctgagattcaagaacaacagggcttaatgaagacttaccaaataaccattaaaaagctcgaggccgaggtcaaccggaaatgtttgaatctttctggcctcaagaaaaaccttgaggactctgtttctctgaacaagtccttagagaaaaagctgaatttaagtgggccactttcgatctttgataccctcctgatttccgctctgaacccaacccattttgttgagtttctcaacgacttgactctcagatcagtaaggagcttcgtcaagatcttggtacgggaaatggaatccgcgaattgggatctcgaggccgccgtcaagtttatcgagcccgaagcttccttctcaaaacagagtcaccggtgcttcgttttcgaatcgtttgtctgtaaaaccatgtttgaaggcttcaacgacccaaccttcaacatccgcggcggcgattcccctgtttgctctgactccgttgttttcttcgaccgattcaagaagctaaaatccgtaagcccgaaacacctctttacccagaacccaaactcctctttcggaatgttcttgaggaccaagtatctccaactggttcatgctaaaatggagtgttccttttttgggaatttaaaccagaggaagatgatgacgtcatgcgggtacccggaaacgccatttttctcggctttcgccgatatgtcaaagcgagtttggcttctccactctttagctttttcttttggccaagaagatggagaaagttcaatttttcaagtagaaaagactccagattctctgaggtttatatggggtgtgtgaaccaagaagtactattccctgccggcgaaatcgacgccaacccggaagtggagctcagagtgaatttcacggttgttccgggatttaagatcggcaaaacggtgattcagagccaggtttatttatcgccggcaaatcgccgccggtgatttctttcttcaaccattattttgtttatttatttatttaaaaagaaaaaaccttccatttcatgttcttgaaaggatagcctccacgcgctcattgcatccttcggcattaaatacttggggactctgcccacttgaatgtgtgccgtctgattaaggcaagttgttatgatcagacggtgtaacggcggtaatagttagtgaaaacggaagtgtatataacgtggtcggcttctggaagttgggaggggtaactaattcctacgtgtttggaggagtgcggcggcgcgtgagctgcacgaacttggtgtaggatttgagtagctgtagagttttacttgagtaactattgcggttggagaacaggggctacgtggggtccacaatgtgacggggcataaagacggtatgatgtggggactataattaatcctttaataaaaagaaaaatcataattaatcgaagacactggtttaatacggtgtggcctgctgtgggactaggggtctacattgtctttttcttttacaatatttgttagtggaaaatggtggggaaggatattaatgattaatgtaacgttgttgtacaagtatctacttataataatatataatgaacaacagaaaaaaaaaaataatagggaagaccactttcacctcttaattctcttttatgcaatagttttttttttttcttctttcttttttttttttcttctttcttatgtactgttttaggatgaaaaaaaaaaacaaatgcctttttttttgacagtttttcctatcggaaaatcaataatgaatattgaacttaaatttcactcaaagagagatctagttaacagaatgaaatctatcatatcatctatggttgataattaaatgcataaattctgttattatttcatatattatgttgtaatagaaataatgatcacaactaacgtgactccatgactatcctccgtccaagtatataaatggtgaagaagtcaatattcacagcatctctaatgagagaaatgagaatatagttgacaaaagtaacatatcatcttaattttttttctgtaagatttgatacattttattacaaaagtacttaattaacaactttaaaagttacctaccatagtgacacatatcacatttaaaaaattaaatttataaaatttcttgataaaaataactttttttcctaaaaaacaaaggatgacataaccattggagatgctctaaatgacagtcattgagtattgtgagtagtataatatagaatttacagtatgaaaaaaaaataaattaaaagtttacttttttatgacataatattttgatgtatttggattataagtttttgttttgtttatatttttacatgttttcccatatcatatttgtaaagtccttttttggtaagttagttgacaaaat

SEQ ID NO: 185016 - DNA, 5109 bp, Cannabis indica
aaaataatatttacccttattataattatatgatatgatgtgtctaactaagatattacatggattttagtctgaaactacgtattagtatatatataaatggtacgtatattacaagtattactaattctaatactaaatctaagtctgtataggaagaataattgtatattatttgttgtagaattaaaataaacatgctggccagtaggccactaatacaagttttttttgtttgtttgtttgactttgattgttgttgttcaattccaactcttttaaaaacgaaaaaaaagtgaactttggtgcctaaacaactgctgatgataagattttaattttgttagctaaaaaggatatatataatactaagatgaaaaggacaaaatggaataatcgtgcttaaaaacttattacccacttccacccacctaatcctgttcatccgttgaaaattcttggtggcttcaagtgattattattcatattgtgtttaatgacaacatttgaccaaatttgagtgttgattctaacaagtactaaaatgctttccatgtttatcttttcacagtttagtttcaggcttatttgatttccaggcaagtaagatgacagtgttaattgcctactttctactgatttctgcaactttggctcatgctcagcgtcaaataggttggtataatttttggttattatgttcatgttaaagggttgtgatgctctttctttcatttttgaaaaaaaacagaatttttattgccttgacaagatgaaagctttttcttctgaccttttaatgaaagacataatcatgcatattttagtaaaactaatttaaagtgtttcttaattaggatacataagcatagattgtggctcttcttcgaatttaaattatggagacccagacactgggataaattatgcttcagatggggcttacatagtgacaggagtaaacaagaacatttcttctgaatatgcatacccaatagttcccaacctaccatttcctctctcagatctcaggagttttcctcaagcaaacaaaaattgttactccctgaaacctgcagttggaattggaggtttgaatttgatcagagccaccttctattatggtaactatgatggaaaagacaaacccccagaatttgatctttatgtggatgttaatctttggtccactgtgaaattcaacaatgcctctgagatagttactaaagaaattaatcaccatggaaacatcagacaccatacacatttgtcttgtgaacaaaggcttaggtactcctttcatatcagccttggagctcagacccttaaacagttctgtttatggtactgagtttggctccaatgcttctttagtactctttcaaagattggatattggggaaaccaatggaacaggccgataccaagatgacacatatgatcgaatttggtcctcatacatgtccaccagttgggattcaatcacaacttctcaagatgtcaataactatgagaatggttatagagtgcctttagaagtgatcatgactgcagccaggccaagaaatggtagtgaggctttagagttgaaatggaatgcaactgatttgagttctgagttttatgtttttatgtactttgctgaacttgagcaacttgggagaaaccagtcaagaaaattcaatgtaacttggaatggaaatccattgtttggaccctttgttcctcgtcatttgtatacaactgtagtatcaaactcgaaagcgttggttgggaaagagcaccggatttctattcataagactaaggattctactctcccgccgatcctcaatgctgttgagatttacatggtcaaacagaaggatgagttgccaacatactctgcagatggtatgctcttctactaaacttgcattataagttcatctgaaaaaaacagacaccagagagcatcatttataactcaaccaattcatcaaaatatttactttgtgatatcattcattacatacagttgaggcaatggaagaagtcaaaagcacatatcaaattactagaaactggggaggtgacccttgtggaccaaggaatttctcttgggaaggtttaagatgtagtaacaatgcctcgtctcctcgggtcatttctttgtgagtacttcctggtgatcttctgtactatgatgattagtatattcatttcaccatccatttttatcatagcaaccatttatttgtataggaacttgacctcaagccgtttgagagggaatatagcttcatccatatccaagctctcattgctagaattcttgtaagcattccttatctggtttcacagcataaagtttatgatatttactaataactaacaacagctcttctgcagggatctgtctcacaacaatttaactggacctatgcccaaatttctagaagatcttaaatctctcaagttattgtaagttgttatgatgttggagctgtggtaatgtaattaggatggccttaaataatttagtcattttacaactgatttgcagaaatttgaaaggcaaccaattgtctggtgttgttcctacagctcttctggaaagatcaagggatggtttgctaactttaaggtaataatgaggagagaagcctctttccaactgagcatgatgtataagttcaaatgtagcatatgttctctaatttttcttttctcctttctttgatttcagtgtggataatcgaaatctttgtagctcgggttcatgcaaaaagaagaacaatattgttgctccaataattggatcattggcatgtgttgttttcatccttgtagtagtgattatcgtactgaagatacaaagaagaaagaaaaaaagaggtttgattcttgttcaatacttctttttcttccatagtttatgccaaatgtcactgatgtaagtattatgtttatgaattcaagaatagaattccaatgtaaacatggaggagtataactgattaaatttgggaaaagattgtttctgaatgtctataaaaacaccatgtctcatactgcagatgctgcaaatgctgcaaatgctaagaaatcaggaaccttggcactaaagaagagtcagtataaccatgatgaggttgtagagattacaaacaacttcgaaaaggaaattggaaagggaggatttggggctgtgtaccatggctatatgaaagatggcacacaagttgcagtcaagaaattgtctccattgtcatctcaagggcctagggagttccaaactgaggttcttggttttttcttgttcccttttaatcaatatccaactataagatcttttcacttgccttaagaaagaaactgaatatatagaagaaattatgatgagtttcttctgactgcaggctgagctcttgatgagaatacatcatagaaacctggcctcttttgttggatactgcgacgagcatgagaatttggcgcttatttatgagtacatgcctaatggaaacctaaaagaatgtctttcaggtactaatccattcaaaagtattgtctttatcaccatgttatctcccaataaccgaaaaaggaacattcaaaaactgtgttgtgtcatgtttgatggttgcagataaaactctacatttgagttgggaaaccagacttcgcattgcagttgatgctgcacaaggttagcttttgcacacataattttctatcagcaaaactaagccttgaacattataacaatattcttgatgatgcacagggctagagtacttacatcatggatgcaagccacctattgtacatagagatgtaaagacagccaatattctcttaggtgaaaatttagatgctaaaatagcagattttggtctttctaaagtttttactaccgacaacaatgacactcaagcagaaactgcagttatggggacagcaggatatcttgaccctgagtatgttcccaactctttctttattgttatgaacaaataaataaagtgattaatgagcatttgtttgatcaatttaattcaggtactaccgttctcaaaagctaactgagaaaagtgatgtttatagctttggagtagttctattagagctcataacaggccaaccagcaataatcagaagcgatgaaacaatccacataatacattgggtgaattataaacttgaagaagatgatataacaagtgttgttgaccaaaggcttcaagacaactttgatgtgaattctctaagaaaagtcttggaagttgctatggcatgtacagcatgccactctgaagatagagccacaatgagttatgttttggcagagcttaaacagtgtttaggggtcgatttttcgagggaacaagaaagagttccagcaccaggacagagattaatctttcattcatatggtagtacacctgagatgtcttctatttatactgattccatgaacatggaatctatgacagttccattgggtaggtaatgaaatcccatcccacatagcattgctaaatatgaatagctttagtcatagtttttcaagtttgtacttagtttctttaagattgtttttttttgtacaaagaaattgtgagtaattctacaaattttattgattgatttttaagaataggtcagttgttttatatcaaattaattcacgataacaaaaataaagataacagttgttttcaatcattatttttgttgagaactgttatcttttcgaggttcgaccatagttaaaaatccagaaaaaaaatatttattcctactttaaataaaaatataattattttgtaaagataaatcaatttttttagatttaattattataaaataggctaattaggatttttgtcccataaactttgacatgtactaaattatgtccccagaacttttaaggtcgttaaaaatgccccctaaactattgagattgttgaatttaaggacttttttccaattttagtaaaaaagtctaacatggataaaagttcagatgatataatttagtacatgtcaaagttcgagggacgtgatttagtatatatcaaaatttgggagcatgatttagtacataaacaatcttcaaaa

SEQ ID NO: 185017 - DNA, 7639 bp, Cannabis indica
taaaattgacacataaaagagtagtagacactattttaacatttctcataaataatttttaatttgaaaaagttagaaaaaagttaaaattaattacttgtttttttttttctttttcatctaatgaaaataataaaattaattggtgaagaattatagagcgtaagagtcgtgtagcaacccgatagccacactacagacaatagactaaaattgttattagggttttctttctctcttttcctttcctctctctctccaccactccctctgcagagagctccagcaatgacgactgtggttcctacctccgaagaagatcttaacctcaccgtcgtccgattcacttccgagctctcctgggccgacgccggtcctgaggtttttcttttaatcttttcccttcctctttaacccattacgattcatgatttcaggcttttatgcccatgcgtgcgcattatttatgtatattgattgtcaagactaacttttcttatgtaaaatagtctgatttcaaagtttgaatcattcatttattttctttataagttggttctgttcttatgtaattgcaattggtcatacattatttagatgagtggttgaacatagtgagtatgaacgagttaggtcttcggtgttcatttcttttttccttgtgggagcttaatttgtctattttgaggggcaaaaagactcttcttgcttttgtttctgatacctaatcgttatgccccaaaaaaactaggttttcttttaacatgaataattctctccaattgggctgtttgttggtataatttgttacctgattagacttttctggcccatgagcaaggttgccgagccccaagtgactagactatgtcttgaagcacaagaatgtgtggcaatgggcaggtggtttgatttggtctcactgatgctcacttcagctgaagttattgtttcaaaagtttctgagaaaggtaaacacctctttttttttaaaaaaaaaaatttatttgtcttaattgttctttgctagaacttaaattgataaagaatcgctgtactgtgtggttagagtaagcatgcatactgatgcatacgtaatgtttaatatgggaaaagtaggaaccagaatatttaaccatgcatgatacctcattttaactactcaatttgtttttctagtgttcttgttgatagtcattgaagttgttgtatcttatctgctctagattttgagtgcatctacactgttatttgcaacattgttacgaaggcacaaagcgtagatgaagctcatgagatggcagagcttatttctacaaagattgctcaacaaccaaatgacaagtctgccttgcgtttaaagatgtactacacaatatgtttgtaattttagcttttaaatcttggatttctattcttaggtttgtgccttttttaagtttaaatatttttttacagtttgttcaatctgtacaatctattggagaacccattcagccaataccatgtttacatgaaggcccttcaacttgcaattggtggaaaggtcactgaaaatgttgtgccgtcatttaaaaagattgatagtttcttaaaagaatggaatgttgggattgtggaagagaggaatctttttcttgccatctcaaatgttttaaaggaaaacaaaaggtatggtgaatttgcatgcattttgatgtctataaatttatattatatataaatgatttttttggtaattagctttaaatacttatctaatgagattctgtgctgtttctaattcagctcagccaaagatacttttaagttcctgaccaagtacctggaaacattttctgctgaagattcacatactctgagtgaagctaaggagcaagctgttcagacaattgttgaatttgtgaaggcaccagacatgtttcaggtatcatggtatccaattaaattttcatttgatgtggagctatattcttaaacttatttatgatgtttattactaaattgatggtgtttttagaaaattgatatacgttatgttatttgtagtgtgatttgctagacatgcctgctgttggacaattggagaaggatgctaaatatgccttggtatatcagcttctgaagatctttctcactcggaggttggatgcttacttggaattccaagctgcaaattctactttgctcaaaagttatggtaatataaaagcttagtctagtaccaagatttttttcttgacaaaaaatcagtttcttgttttgttttttttttttaaaaaaaatatacttctataattttgtaggtctagtccacgaagactgtataactaaaatgaggttgatatcgttggcggatcttggctctgatgaaagtggccaaataccatacagtcttataaaagacacccttcgagttagttttctttgcctatttaccttggtattgcatttcatatcttggtcaatcatgtgcaaagttttctcgttgcagattaatgacgacgaggtggaattgtgggtggtcaaggcaatagctgctaagttgatggactgtaaaatggatcagatgaatcaagtagttatcgtgaggtagtttcaattctcttgtaatacattagttctttgggctcatgggcatgtatatttgtgttggtagaattacacatcatttgaaattttatcgtaaactttaattgaggagggctggttacacctcttaatccgaaacatgcgtttagttagttcttttgttttaccagtgtcaatcaattgtcctcgtactgattttcatttgatgtgcagtcgttgcactgatcgcatttttggtcaagatcagtggcaaacacttaaaacaaagctagcaacttggagggtaagctgcttgcgctagatgaatttttgtttacttgttattttcttttcatccatctttcgtatggtataactcaattggttgaatcttcatttccagggtaatgtggccaatgttatcaccactattcaggccaacaagcctaccgaagacgttgctcaggcaacacaaggattgatgattcgttgagagtttttttcttccaatctatattttcttgttgtttttagaccaccatcgttatctagactatagggttgagagactgattgatagctgtgctacaatttattgtcctcatttgtttcattcagcttgaacacatcaatatattggcaattttgacaggctttcattaatagtcttttgatatttgttagatccttcgaacttgccacttgattaatgggtgaattcttgattattacatggcaagtgacactaccttccctttagcatattgataattttcaagctcatataacgccaaattaatttacaatatagttccctggggccactttcatatctgacaatctttctcaccgccacggattagcatagcacctgcatttttcaacctttcattttagatcattgtaacgtatggtagtcttgactcttgaaaggggagtttgagctatgtgtcgtccatctatggagagtaaaaaaattggggcatgttattctcacttctaaacaccaaggggctgtttttggtgggaaagtacccctcaattatttgtaaagctcgaagttgtagtgagatcacaaaccaaaggctatttaattaatgcagtaagttttgagcagttcttagttccctagtcaagttctctatggattcatagtttatatgaatgaaagcaagaaaatcatattaagtgtgggaaatctactaggtttttcttattcagtaagttagtttacttttactcattgtcgagtagccctatttggagctagtcgggccccatctgaatgatcagtaaacaaaatcactggagagagtggtaattggttacatgtttgtgattctcaaattgagaaaaattgtattccattataacctttcttgttgtatctagtaactgtcatcagatttaaaatattttgaaaaataaatttaaatatataaatccaagatttaacctaaacatctaaagttttttcattcgattgagaaatgttaaaagataccaatggtgtctagcactattataagattttataccgttattagtgtaactaaatatcagatcacacttattttaattttaaaactatagtggaatatcactaacatttataattgtgcctattaggaaatgttctattcaactcactataaatattgagcattgttattttattttgcagcttaaggtgtttaatactatattgatatgacatcttataattagttagcggttttttatattatttattaaattaaaatgtatagaactcgatatcaaaatgaactaatagcgatatatgccacgttttgtattttaagatgctccccaaaacatttctcataaatattaggtagagcgggctacatgtgtttacactaatgctacttttgttaataaaaaaaaaaaagaaaaactaattttagaaatataactaaaaagattaaccaatatcaataagttaataagattatattaggatagtgggaaaattgaaaaaagtatagaaaaaagaaaaagagagatgtcttcatattctcgtagatattagtagtctaattttcttttggttgttaaaagaagaagagaatatattcacactattttgagtgtaagagtaacgcaccttataactgtataccaacttttctaattcttcgcacgaatgcatgattcatgaaggagcaagagtagcgttggatttggatatgtcatatttctgtttgtatacaattacaatccattcaaaaataattattttctttttattttattttctcctttttatcttttatcttaaaacagtctcgaatttatgaagaagctccaaaacattcaaagctttgacattggtggctttaaaatataagtagctattatttgcaaaaaatatatacaatatcactgacgacgacacacttttataccatgcaactaacatcgacacttaaaattacgaataagagcaaacaatctctcatcacacaagataaacagaaatggagacaaatgatctctttgacgaataacgcgcatagggattataggcccactcatgtccatcacaaataatactataggaatttgtagtcaagtcattaccaagtgaaccaaccaatcatgaaactccatttttttagaatttcttggagataggaccagtcaatcctatcataagtcttactcatatcaatcttacatgccatgaaaccaatattaccttgacgctttctcttcaaataatgcatcacttcataagaaactataatattatctgagatgagacgctcaaaatataaatacactttaagcatcagatacaactgcatccaacaacctttcattttgttactaaggactttagggatcactttcactaatacattacaaagggatatcaacctcaaaaatcaccaaataatggttgaattttctttttcgtatataagattaagagccacatttgtcttgttcaacccatcttgcaaaatactttcattgaagaatgtctgcactataatcaccacatcacttccaacaaccacccaattcttctgaaaaaaaacattggggtcatactttcggaccaagagatttatcagggtacatttgaaacaaagcttccttaacctcctcctctaaaattgacttcatgagttctaaattatgggctgccgtaattgagctaggattataatctatcacctcttcccaattcatatgtgagtgactaaaaagatcatgaaaataatgagtaattaaagtagctaacccattatcctagtcaactcaattcccattcgaattctgaagcttatgaatatggttcgaacgcttacgaaaccttgcagtcttaatttgatctctagaattaagctatagttgtttcgagtgttgcctccaaaagattatttcccatttgatcaaaaatagcaaacaacaaattctttactttttgaaaccgttcaatattctgagacaaattattagttttttttgtttttgttttaagaaatattaattgtcggcaaactatgtcttcttttagcaatttacaagttaaaatgtaacgatcaatatttcatcctattctatacataataaattcatataatttggaattaaaaagatggaaataactacgtacgtacgtagacgtagttaagcaagattcaatcaaatcaagaaaatattttttgttatagagaacaatctaaacaagtggttaagatgttcaaacactgtgaagaaaaaacgtcctagaaaaattaaccttatttattacaaaagaaaaaggggtagaacatgctgaatggaacatgtcgtatcttggtggcttaaactaattcataataaaaaatggacgaccaagaaagaccttaaaaaaacaagaaaaaaaagtcagacgaaacctgagaggcctaaaaagacatgagatcgatattagtcaggtatttgtttggacgttagtggggaaggaagactcgtggtgagtgagtacgtgcatcataggcataggtgataggtggggaagtaaagcaaacccaatctttctttaacaaacacaaacacaaacaaccacttcacctgtgcttttgggggctattctcacttccatttcccgccttcactacggttccagttgcttctttctatatgggcaagagggatttcaattggacctccagctctattgtctctggctctcacagagctcctcttcttaacaaacatgttggtttattcttcttctaatacatgctctttgtttttcttcttttgaaatgattaacaaactgttctacatgcccagaaaagtatcatatttaatcttaatgttcgtgttgggttgtggtttttaatatggggaaaagattattgattaattgaaaacaaaggatgtttattttctttaatttgtgtagccaaagaggaatgaaaatgaagagggatcaactaatggtccagccacggaccttgaacatggagatgcggtagaggtattgttaatcgtgttttatttatagatctctctctctatacttgtctccttaatttgagtctgtttttcaagaattgttaattttgttctggaaaattcaggcagcaaatgttggatatcttcgaatattatcacttgtaagtgggcaattatataatttcttttattactatttttattgttatagtaaaaggtcatgatgattaactttttgtttttgtttttttactcattgaataggcaaaacctgatgctggcaagttaactattgctactattgcactgctgattgcatccaccacaagtcttttgattgtatgtttcttcagctattgattattatgtgcttattctatctctatttctttccctattttgaggtgactggtgttgaaattttcttaatgtgccaatgataattagcaaagtttggcttacttggttcaaatttgaactggggtttttcatgatagatgcttcaatttattgagaaaaatctttctattgaaaactttccttcaggatatatcatagcttgattttcattttcttatctatcttggt

SEQ ID NO: 185018 - DNA, 3450 bp, Cannabis indica
atgaaaactaaaccatatgggtgagagaagagaaccccgtcagtcgaaaccacgtacgtacgtagccacaaaagatcgagaagttagaaaactccgttatatttgacataaccacgtgacagtcatgtcaatataggtcccacagcccacggcctctggttatggatacattcgatggctctctgccccagtacttgcttttctatctttctctctcctaataatcccggtgagagttcttgtcagattccggctataaccttttcttctctttatttatacctgctccttctctactcttcgatcattatcttatcttatatatcttcttttattttttcactctctttcatagaagaactcgattgtaagaaaggcctgatgactagctactactagttaattatcttgttttcttaaggagctacccctgctctagattcattccttttttattattaaaatttctattttgggttgctgaatcttgctccgtaattattgttgtcctttcaaaagaaagagcagacttttcttatttgtttttaaggaaatatactgatgaagggagcattgccggagatgttgcagtactgtctgaacccttcggttaatctttccgggaactgtacggaattgacagtacttgagaggcagagggctcgattgaagtggcaggaagaacagcgtcatcaacaactacaacagagtagttactttcgtgggagtgaactcggtgggatgttcttccaagctaatgatcatgatcaactccataactttcaggtccattcgttcaaagatttggcggtacatcgatcggttaatcacgatcccagatttaaaaatgagtggcctgagcccgagaagtttaatatcccattattggaaaacgtatcgttgtcttcgtcttctggttttgtcagcgattctattaatccttctcctgggtttcaaatgaacggtgccatttctagaacgtatagttgtcctccaatagtggcagtgggtgcggaaacagcggaggttaaagacaaagaaattgttttaccggtgggaaagttttgctcttccggtggaaaacaaaccttcaaaaagaggaaaacagatcaaactcaaaattcagaggtataaatatgtcgagtactcttttctgctttatatttctatttttcttttctgtatttatgagcttgagttcgtttctggattaatgattatatgaacctgatttgaatatttaatatagaaggctggagaagatgacgagtcaagagataaaagggtcaaaggaagtgcggaggacggagactcgaaaatcacagagcaaaatagcaccaaatatgtttcttgtaacgccaacaacagagatcagtcttcctctggtgacacctcgaaggagaactcaaaggcctctgaggttcaaaaacctgattacattcacgtccgggcacgccgaggccaagcaaccgatagccatagcttagctgaaagagtaaactcgctcactctctctctcaatatatatatagattcttggaattatttagtactttcccattaatttttcccttattattaatcatcatttcatcaggttagaagggagaaaatcagcgagaggatgaaatatcttcaggatttggtacccggatgcaataaaatcacaggcaaagctggaatgctggacgaaattatcaactatgtccaatctctccagcgacaagtagaggtatattttaattttgcttcactaaagttttaatcccttgtaaattttgatgctttgcataactacatctgttttttttttttacaatatttaaaacagttcttatccatgaaattagctgctgtgaatcctaggcttgacttcaacatagacgacaacttgtttgcgaaagaggtaatagcatgattctagatcaatcatcagagtaactttatctgtttctcattcttgtatatatttcttttagagagcctaaccatatagtgtaaatgtaaactgtgtaatgttatccgaagctgtctgttactaatagtatgtctctatattcaaaacagatatttccaaatagcacagcgggatttgagacacttgggatcaatgggatgtcagcagaaatgtccaactctgcttatcttgaattcaataatcaagggcagcaagtagtttcttccagtggattagaaatggccatgaattttcctgacatgtcttgccttaaaagaaccactagtgcccctgtttccatccctcatcaatttctcgacacttcatgctacactgtaaatacttctataccatctcatttattgtaaaagaaaaaaaaagtaatacacttgtactaaatcactctcgttaagctgccttttaatggaaatatatttttctatgataaaacatatgatttattataattaaaatcagtactccatagtaattatgataactgttgttagtgatacataacgaggttttttcattaaatgataaagtttagtttgttgcgcttttgttttttttcttcggtacttttttttacatatttaccaaacaatggtatgcagcaagttcaaccaaccacgacttgggattctgaattgcaaaaccttttcatttcggaatataatcaaggaagaacaacctttacatctgatttaccatttacaggtagtctgatgttattcagaatttttttatagaaattagttatatgattaaaaattggtttcaaggcatttacactagatatgtatggatcccaccaaacgcttgatagggaagttagctaggaattgcttgtgggttccatttaaaacaaataaactttgataaattgcatgtctttctttacacgtttttcctcgcgagaacaaacaaattaaagccatagatttttgagagaccacgatattccaaccaccagagcatggataaagaaagagcaatcagggaaaattaaaaggcgcagagtagtggttggtttttttgaccttgtaagccacatatatataatggctatcatcatcatcatcaataaatggtgttatttttttaaaagataaaagtgttaggcgataaagtcatactcaaagttgttataaataggttccgacaattagtgacataattaattattctccatataactcacaccaatcaaaagattcaatattatcatcaaccaaggtcaacatgtactagttgcgatacagggtgtatgaacatatttaatttatactggtccttttttacaccttcggaaaaatcgactaatttggttttattctcatatgtgcaggttctgattgttctactgaagctggcaatctaaagatgaagatgtgattgtgatttatacgatttcttcaaaaagttttcccagaattcttgtttgtttcccaattcatcattttctacgtacataacatatatatatatat

SEQ ID NO: 185019 - DNA, 6372 bp, Cannabis indica
gcatgaaaatgttactcttcattaagttagctggaaaggattatatacacggcaaatgatcataacagattcaacagaaagcaaaacaagaataattgaatacacactaacaaactctaactaacttcaattgaattaactgccttcacactccccctcaaacttggaattggtattgggaccaatgccaagttagttcctgaacagagcgaatctagaagttgaagtagctttagttaaaccatctgcaatttgatcagatgcagatacatgttgaattcttacaagcttttgagatagcttttctcgaacaaaatataggtccacctcgatatgtttagtccttgcatgaaggattggatttgcagtgagtagaatagtactcaagttgtcacaccatattacaggtgttcgaggaagcttgacatgaatttctgtgaagagagaatgcatccaggtgatttcagacacaacttgagcaaggctcctatattcagcttcaatatttgacctggagacagtatgttgcttcttgcattgccaagcaacaagattggagccaaagaagatgaagaaaccagaggttgatctcctatcataaggatcactggcacaatttgcatcacagaaagcagtgagatcaagatcagatagcctttgcagagacagtacccgttagatatcttagaatccttttaactgcatttcggtgggtattaagaggatttgccatgaattggaaaactttgttgacactataagaaatcttaggtcgagtagttgtcaaatattgtagggcacccactattgatctataatgttgtggattttccacaggatccccttgatatgcagataatttcaagccactagtcataggagtaggagtaggagcggcttagtatcctgcatttaagctctgcataagagatcttgaatgtactttccctgagacgtctattctgagaaagtaatgtaacttcctaagattcttgagagagaacttagtgcaagtgcttgaatcaaagagttaacttgtccagcatcactacctgtgatgataatatcatccacataaaccaacaaaagaatcatggatgtggatgagtgttgaataaacaggttgtgatcagatttggatgacacaaatccaaaatacagaagagcttgatgcagcttgtcaaaacaggctctgggggcctgcttcagaccataaatggccttatttaattttcataccaagtgaggagcgtcaggtaattcgaaactaggggttatgtcatatatacctcttcttttagatcaccattcaaaaaagaattattaacatctagctactgaacgtacaagccttttgccaaagctaaggacagtaaaattctaatagtcactagtttaacaacatgactaaaattatctgtaaagtcaaagccaagttgctggtgaaatccctttgcaaccaatctggctttgaacttattaattgtgccatatggattgagttttatcttgaatacccacttgcagccaattggtgttttccatcaggtaaaggaacataagtccatgtaatatttttcctcaaggtccctatttcatcagagatatcatgtctccatttttcttattgaagggccattttcacactggttggttcttgaaaagtcaaataaaccttaggcttgtatatcctaaattttgctcttattttcattgaatgattgtttgtgacaggggctttaggctgtgtcacagtatgtgtagacacaggtggagaaagagataatggttttggtttaacaatagactcaaatgactctgagttatggaggttgctagactcagaagagagatttggaacaagtggaatagcaatagtttgaggcttagcagttgtggcagggtgaaacacaggagtttgaggagttggtgatgagatatcatcaggaaataagaacttagctatgtacatatgagatgatttaggaatagtggcaaggggcaaaggttcctcaaaattgttagacatagatggagattggatagactgtttattgtaaggaaactttgtctcatcaaaaattacatctcgagagatgtataacctaacagaagcatcaagccatttatatcccttatggtttagactatatccaacaaaggtacaaggagagaacctaaagtctagtttgtgcctgttataaggtcttatattgggataactagagacacccaaaggtccttaagttggtatattcaagtttgatttgaaacaacaattcaatagtagattgttgttgcaaaataggagttggaagtctattgtgtagataaacagcagatctaaatgcctcatcccaaaacttgagaggcatagatgcttgagcaagtaaacttaaaccatgttcaactatttgtctatgttttctctcaacaagaccattttgctcatgtgtggtgggacatggatgtcaatgcaagattccaacctgttttaatggttcagtaaatgttctaaattcccttccccagtcagtttgtaagactttgatcttttcgcctaattgaagctcagtttcaattttgaaattttgaaaagttttgagagcttcagacttgtttttaagtaaatatatccaagtaaatctagtgcaggcatcaacaaaactcaaatagtgcttgtaaccattataggaagtaatatgggaaggcccccaaagatcagacactataagttgtaatggctcagtatagacagttttagatgctttaggaaaaggcctttttcgaattttcccaagaaaataggcatcacaaatagaactttcacttttattactagcagaaatattacatgatttcatcacagagtgaaccactctttcatttgggtgtcctagcctattgtgccataagtcaaagattgacatagatggcttattacagggattacaattgtcactagaaaaatgagaattgctattactagatgtaacaagataggcatgagtttgatctttgaagttgaaagttgaacagggaggagcaggttgaaattgcacctgaaattggcctagatcaaaagtatataggctattgtggagagtcacagtcaggattatggctttggtcttcagatccttaacataacacacaaatgggtgaaattcaaagaaaacactattatcaagagcaaatttagacacacttaagaggtttttggtaatttctaggatatgcaacagattcttaagaaccaaagttttatctgaattttgagatttaaagaaagcagaaccaatgtgttgaatttccaaacctgagccatttcccacatacagtctttcttggccattgtaatcatcatgctgagccaagttgttcatgtttggtgtacattggttagtagcgcctgagtcagggtaccattttgtgtcttatccttgtgctgagtttgaagcttgtgcagcatgagcttggataggtttggtactgtcttggccaggaagaacaccagtatagcttttgtcaaatctataaaagcactcgagagccaagtgtccaatcttgtggtagatttgacactgaggcttgttgagagctggttgtgatttgcctccaaactgatttgtaaagtgtcctcttccaggattgtagttgtctgaaggtcctcgaggagtgaagccagagttatatcttctattgtaatattgattaggaaaagtagaggagggatattgggagggatggaaagaaaactgacctcgaggaggattagaacctctaaaatttcgattgaagtgtgcaagaaaagcttcataggaacattgattctccagatctgttccttgattcatagcagcaagattgacattcagatcaacttcttgatctgtctttttcgattcttgactcagaagcaaggagcaaggcttcaatttctgttactgaatatccttcatttcgagtgttcgaggagataatgaatgtatcatattcacttgacaatccttttaatatagcagctatatgatcacgatctgagagaacctccccaactgaagctaacaaatccacatgttgtttgactttgagtaggtattcgtttagcgattgagatcctttcttgagattttgaagtttggttctgaactctaagattttttatgagacttgcagagtgaagtgtttctctagggcattccatatctgtctagcagtattacaaccaaccattctcgttagcaagctttcagtcatggaggagagaagccaggacactaaaagctgatcttgaacttcccattctaaacacttaggattttgagcacgagctgcttgatctgcatcactcaaatattgaggtggtggagcataatcttgaatgtacttcagaaccctgttacctctaatggcagccaagacttgttgcttccataggaggaagttgtggtcattagcctaatcgacagtgtgtgattgaagtgaaccggagaaatatcatcatctctggttctggttcgatttggagcatagaagcctagaggaggtcctggataagtagagctcgagtttgttgctccaacattttccatattcgccccaaatggtgggaaaggctctgataccatggtagtgttggaagcttttctcaccattgatacagagtatcaagaacaagtaaccaaaagagaaaggagaaagaaagagaattgaaaggcatgaaaatgttactcttcatttaagtgagctggaaaggattatatgcacgacaaaggatcataacagattccacaaaaaacaaaacaagaataaccgaatacacactaacaaactctaactaacttcaactgaattaactggcttcacatacatatatttctcttttagagaaattatccacccatgtaggtaaattattactttaattgtaattaaatcaaattaccattatatcgtcatttattatacagacaaggacctacgtgcaaagtctcaactttattttattttttcaatatattataattcatttaataatttaactcaaaaaataagagaaaaataataataatccactaaaccaaattttaaattctaacttcattactattattctttccaaaaagaacttctttcctgttacacactaccaaacctatccattatttatatttttttgttacaatttagtctttgtttttttaaatttatactcttgttttgtaaaatattttacagtctctatttttgtaaatatttttacatttatgcttcatttttttttcttatacattttgtaccttttccctaaattatttttcattttgaatttttgttttctacacttacgtcgtttataacttattttttccccaataaataaaagtctacaatattatttcggcatataaaagcttttctaatcaattttttgtatcgtgtatattataattatataagattatttgtaaatacttaaaaaaaaattgagtagtttacaggaaaattactttatatattattttcaatttttttttctaaatttatggttcgggttgctctagtagtttttttggtaatttctatatgaattgctatataaattttagttgcgatttaagttgttccgttagttgctatatgaatttttatgtggaattccgtaaatttgtagaaaaaaaaattattttgaagtgtaaaaataaaaaaaaaacctccaaatttataataccgaaaataaaatttttatattttattgtatctatgactatttttttatatgcgcagtaagtaattgtttagatttaatttttatagcacggtaaactgtttgaaattttctaaaaattttcaaataattttaaataattacaacgtatacgattataaaaaaaatagaactaattaaataaaaaatacaaacaaaaacaactactacacaaatttccaatacattatacaatataatacataaacatatattatatataaatatccatctcatctatacatgacatgagtacgtagtgtcggttggaacaaaaaaatgaaattaatacttggtgtgggtgcgccgtgaggacccaacatatctaagatcgagattgttacatgtctttttaatgtaaaagatttaatttaattttcataaataaataaaatgagagagaggaatataattgtttgatatcatttttgtaatagatttgattttttattggtaggaccattcctacagattcgccagattttcttgtaatgctactatactcacgtcatgagtagtgaatagttaattcatttggaaacttctctaattatttatttttattcaaaaaaaaaaggatagtcattcaaataataataaaa

SEQ ID NO: 185020 - DNA, 3959 bp, Cannabis indica
aaaaaaacattacaatataatataataatttatatgccaatgatttagaattggaattgcaactgaaatctatccatagtcggtgcagtgcacaaacctaggcttatcaagaaggatggataatgcaaaaaaacttggtttgtgagtttggatattctttttccccaatctccaaaaagaacattaatagaagtcaaagaaatgatgaagttcccccacatccaaaggacttgggaatgttaggcctaactccacaattgatgaaaatgacacaactggttttgagcttggtctacatcttttcatattcctaaccagatttagctctaggcttttaccattctaagacaacttttcaaaaatatcaagagcctttgtcatcataattaattacctaacaagtggcctagtagtggcaatattgttaccccctaatgcttgaggtggtagaacaaacttaggtggctccttctcgtcttaaacgccaaagtattatcttttggcctagtgtcttacttatttcttcaggtcatcactggggatacaacctaccactgccaggtcttggcaaatatttccaagtagttgacttgagatgtctagaaaaacaaaataaaggagagggaagggtgggggtgtgatcattctaatttgagtttcaaacaacttcaatggttttaaactgtgcttgacattattgaaaaggatactacaaaaacaaatgggatagtatcattattttataaagagatatttacggcaaaaactcgttaatatttacaattgttatacatatgaccctaatcaagaaaattgacagcaaaagtaccttatcttacaattttgttgcagtcgtaccatattttagctgttaagtatcaattaagctcgttaagtgtcagttcagaaacacgtgacgacatatttctttagcttatttaatatgtagtttaataatatgtcgtcacttgtttctgaattgatgcttgatgatcaaaaaatgataccactgtaataaaatcgtaagataagtacttttatcgccacttttttttattagggtcaatatataacaattgtaaattaagattatttagcagcaaatatccctttcataaatttcctccttatctaataaaatgaagtatatgtggagttttggagttagaaaagaaccttcataacgcactaagcctgtccacatcaacagaccaacccctaatgaaaatcatgcttctaacccttctgagtacgtgaacaacagtacaataccaccaaaagaacctttggtcattatatatttctttagttatataaaaaaaaaggtgtgagagaaaaataagataatgtttttatttttccaataaaaaaagaaggtaaagattttctaaagggtaggagagattataatgctttgaagtacatctaggacctgtagttcaactatatcatatcagactcgtgcatggagtcaaaggtcactaccagaaagaaacctataaacaaaattctaatcacaacaacatggagcacttttgttgtctcaaatgttctacacgttaataaatcacaaggggcagtagcggaatcttaaactagtatatatttcatgtatgctataagctataaccctgtacaaatggccccattgataatgagattttgctcagttcatacccgttgatgatgcagggtgcaacagagcagcacgtactattacaaaggcctgagaagagggtaatcttcaagtagttcgcgctctgacagagtatcattttcattttgcggggtccacaaaacttctaccgcctacaggaatgaagaaaaaaaaaaggaaattcaagcacgaattatttataagcactcgaattgttgtatgtgtggatcagaacattgtaaaaaatcgttcttacaagtattttgttggagggaattgaggcaagcttttgcaaggcttccttcagatccttaccgccgttgatagcaggtagcttatgtactccttcagcagccaccaaaaccgttatctgatggaaaatcatagaaaagaaaaatattatttcaaattttaattcctaacaaaaattcatggagacaaaaccagccatgacatgattttcttagttttaaggattcttttgagggcacaaccaatgatctaatttcgatgtgtgatcatttcatactgtcctgtacacccagatataaagaaaacaggcagagagattttatcattcttgccatttacactagtaatactaagataatttattttattttttatttagaaaacacacacaaaaattcaaacagccatgcatattttactaagcagaaaatgttagacacgatcccagtcaacggaatatgagttatgcagtgcaatctaccattaggtaagctaacttaccactatgtactcattgctaaatccacttgccctctggctttggtgctgtgcctttttaagttgttgacattgacaagtgtctcttcatcaaatttcccacgttcttcaatagaaagttgattaaagcgcttctctccatcctccatactcttctttaaatccatctacaagtacatcaaaactcataattcatgctgttaacatgtatacaattcaaaatttcataatatagaataaaagaataccacaataaagcgaacatagtttaaaggaatacttataaaatgattctttgaagaatctatcttcacacaagtaatttgcccaaactaccaaaggaatgaacatactactaaattaagaagtgcaaccaatctacttctataacgcacaaaaatacgagcatcatgtactccaaattatgtgctctacaggaggaccaattcaaaagtgtactcaagactttgtgccatcaatttggcttgtattagttgccattacttatttcacataaattactaccttatctatatttccctctgtctgcaactcaaatggaacacaaatataacagaatgcatttcaccattacaccaatgaagataccaagagatggtagcaaacttacagatgaataacctgaaatgcagtagtctggatttcgaagtaaagctagcgttgtctctgaaaccaaaagtgacaaattaaaaactctttataaaagaaactatgtaacacaaaaaagttcacattagaatagatggacaaatgagaataaagtaatatccagctcccagcagtgttcatctaaaaacttcaataccatttccatcaattaaaacttcaaatttaatgtataccacacatgatccaactttgaaaaaaaaaacatcttttagataaaccttgtgggaaaatggcattcatgtttaaaaagaaaagaagaatatcactgtttaaatgttttacctgtcagcacgtagcttaagccctgaggagtagaggtatctgcagtttcagcaatccgattaagatccttttgaagatcccgcgccatgcccaacaaccccacctataacaagacaatgttggaacaatacatgataactcgttcatgaaaacaattttaaacaaaaaggcaataaatctttataaactacaggataaacatctacttaggcatgttcaccagacaatgtgagtactgagcatcaatatcataacaaaaatccattttaaatttaatggattttggttctgtacacgttatgtccacaaccttgcaagataaatccttgccaaagtcgaacctatgcagccatttccccttcaaacaattcaagctaatatctaacttaagtgcagcttttttatttctaaattgcttattgaaagattcagatgtagtgccgctcctgcagtgctgtagttcgttctactctggactatttactaaattaatttaagaataattttactgttatacattactcaaactacacataaatagtacaactaactaagtttacacaaagtccacagcaaaaaa

SEQ ID NO: 185021 - DNA, 5678 bp, Cannabis indica
actcttcccaaaaacaatgcaactcagacccatttcatcattagtgcttcatcatcttcaggtgaattgaattgagctctcacgttttcctttctacttctgtctttgtttcctatacattgtttactctagttacgcatggttaatttctggacttgctttacatttcttatgttttgcctgaatacactgaccatgttgaagttgaagtcattcactgattccataagtgtcaattggacatttgggttttagttttaggagttaagttgcaatttttatgatagagaagtaaatgatccatgattttacaagttctacgcatagtttctcgttttctttttcttctctgagaaaatttccaattattatggaattgtatggacgggatactttgttgaattgcgagaaaaattaacaatgaaacttttgactagtgaaaaagtaagggcttcctaagatttggtatctagttggtagtggagaattaaggagagctgaatttgttcctatagtgggacacttacaggggaaagaatactgtatcacaaaagtattaacatgttttatgatttaaacctttccatgtctgcagttggaagtgtagaatacactgaggagccttctaccaaagtaaaatttcagaaaactttgaatttgccaggttgctcaagttctttgtcattgcttggaacaggttagtttctataatatatcgcattgcattctgttaatgattttttataaattgagatccaggttcaatgtagtttagtagtgtttctatttattgtgaaaggaattgaatgtcttgttagtaaggtgcagttgcttcacttattttgtttatcaagaacaccatacagtaatgtctttatatgttgcaatatattttactttaaagcgattgatgtcactttcatacaactaagacagtttcaatgtttcatattcctatactgagattgttacattccaatttttctaatgttgtttctccttttttcctttttgaagactctgtggcattatagctaatgtgactacaatttcaggagtcagggaaaaggtttttgcaattgttggcgttaaagtctatgctgccggcctttatataaaccctgacgttcttagtgaactagattcgtggaaaggacgttcagttgctgaacttcaagaggattcgtctttgttcagctcaatttttcaaggtaataaggaaatgaaaatgtgtacgatggagggaggaatagagtgatggtaattgttgagatatatttttatttgatccagctcatttgaagagagagagagagaaggattagaagacatttgaaacatattttttttttgaatgcagctcctttggaaaaatcattacagattgttcttgttagagacatagatggtaaaacattctgggatgccttggatggtgccatttctccaagaatcaaatcaccaactcctgctgatgaatctgcgcagctcacatttcgtagtatcttccaaggacgacctcttaaaaaaggaacttgcatttatttgagttggctaaacccgtccaaaatgatcgtaagtctgattctagcagtcacatgattaatgatttttctcttcaagtatctaccagaatatgcacttaatgattttcatttctttttgtcattttctattttgtttcctttttgcaattttgaccttctgttttgttacaaaggaaatatatttaccatggactaaacacttaatttctacctcatctgcattctcatcttattatgttatttgtgattttcaggtttctgtttcaacaggtgggcttccatctagtgtggatgctacagttgaatcaggaaatgtaagttcttctctctttgatgtattctttggagatgttccagtttctccttccttgaaagcttcggtcaccaacgggatcgcgacaatcctcaagtagtttctgtcagtaaagttcttaaaaataattatgtgtccggcaaatttcacttcattcaatatgtgtttgtatgatcatcactccagtcttcattctcttttttgtgtctatgaatgtaccttggacttgacctaggatatgtagcatacttccaatgataattcatgaaaattaaaacagaaacgggtaaaccctcagtactagcagacttgcgttataagatctcttatctatcaacttccaacttaaccttgtttatacgaaatttaatctgtcttttgacatgagtggtgattaggtgaatgctaacttctttgccagctactataccattccccaggaagattagaatgcatcctacgaaagcaatatccatggccattatatagatgcaatctgagctctattatctatgccttaatctgggagggtgtagagattcgtttcagagaccctgccatggagtaattttagttactatgcatttttttaataacaaattgtgaaatcagttgagtttacacattttttaataactctcgcgcacttgcagttctcaaatttgtgacaatcatacaactttcttgtatgattttgtctagattactaaacctataaatttcgttacccttttggcaagaattcagtgataatgattacatttatttatttatttttggtgggtttaaagattggttttgctgatgtgattgaagaaataaaattcaataaatggcaaaaataataaattaataaataaaataagtatattatagctctgatgttttaacttgttgttcaagcatcttgacaatgtcagccatggaaggcctcttatatggttctggctcaaggcacattaatgcaatattgaatgtactgttgatctcctcaactgggaaatcgtctaggtttctgtcaagtacaagctcttcccttttctcctgaacaactgtcttcacctgattccaacaaataacaggttaagtttaacacaacaattaggaagaataatctcttttataaccactcgatgatatctacaactgagatgaaatatagcagttctcacccatgttacaagcttggttccttcctcaataaacgcttcatctgttggcctctttccagttaagagctctagtaaaacgacaccgaagctgtaaacatccccttttgctgttgctcttcctgtgtcaaaatattctgcagaccaaaccaacaaacatttaagcttatcatacacatacttggcaaaaaaagaaagtggaattagcgactcaagagaagttcacattgtttttataccaggagctaaatatccaaatgttccagctacaaatgttgaaacatgagtcttatccggttccatcagcgtggctagtccgaaatccgaaactcgagcctccatgttttgatccagtaaaatgttgctagatttgatgtctctatggattatatgagggatgcaatcatgatggaggtatgcaattcctcttgcagcacctagtgctattttgtatctggatggccaatccaaattcttcttgttcatagctttccctgcattacattacaggctctaataagcttaactcttgggatcatcacttatctaacaatgtataccagagcagattattatctttagttaaaatctacgcaacttaacttgaattacaagtaaaactatgagaagaaaagaagtggtatagcatggtttggcttgaatcttcaatgtatcttttttttttgtttttgtagagagagagagattactgcataccatgtagaaatgaatccaagcttccattaggcattagttcataaataagaagattgtaatgagaagctgtgcagtatccatggagattgacaatattcctatgcttaatgtctcccattgcttccaattctctctcaaaacctctatctctttcgtcatttgctcctttgttgagtcttttcacagcataggctgtggactcatctatcatcactttataaactgtcccatagcctccacgtccaattatgtccttgttgctaagtctaagtgttttcttaaacaatgcatttgatttttgagactcctttgttgaagacctaaacataacaattttcccacctaaaaaaacaagcctttcataaccacatcaagcttattatacatgatatatatattgaaaaaaactctcataatttcatttcaattctaaatgtacctgagagtccatcttcatacaccctttgctttcttttccatctcttatagagcagtattgagatgacaatctttgatatacaaaggcgacgacggagatcgtaatgtagaatgctatcagtactggaggatttcccatctgttttctatcaaactgagatggaaatttggacaagtttggtatgaaaagagctaaatgtagtgcactttctgtccagttgtttaatataaaacacatggagaagttgaaaattgaccaacttgaattacttgataattaaactcctattgcatctatagatataagaatagtaattaagaaagacatcatcaatcactacttgaaatctccatattttctggaaatgaaacaatatatacatatatatttaaaaaggaaaaaaaaaagataaagtagagttgaaaacagatcactaacctttaaattagttgaagaaaggagatgaatcagatgaggaagaaactaaagagagaaagttgctaaagccaaaggtattgataagtggtgtctcagaaaaatcaaattaggtggcgggtcattattagtttatcttatgtagctgtccacattttgttggcatgtttttttttttcattaattttcatccgagttcaactgactcacatgagatagtgaccccagagattggatcaaaatgttgtcatctttcataggtgtatttgtataatgtaacatacattataaactacacattattattggttaattactaaggaaacccgtgaatttttgttacgatggattatgagccagcactgttttgaatacgtgtggtaactcacacgagtccttcgtgaaacccccacgtcgatgatttatgttaaatgttatattataattatacacacagttaatattgtaacttgttgtggttgaggtttagccgactagattttcttttaaaagatagtcttgcagtatataaaagttgtgtttcttaaacaattaactgtatcattcgggtcttaaaaacattattatttattttaccttaaaaaaaaaaaagaaaagaaaagatggtggcatgcgccttgtgaatgccatcttctgtacccatatattctgcagttgcaccacttggcaatcattatatttgtgttgaagtaactggctttgcgaaactttacttataagattgaagctgcatacttggttttgttctcatattatgtggttctttctctctcccaactggcttaatgtgaaagaaaattagtgagaattgcttagtcaaagactcaaaaggctcttttgagagttaagaattgaaaagtttggcattgtttattattattttttttattattttgaagaaagtgatatagtattgatataaggcgaaacccactaattcacatgcgaatcaaacacatgattaaaaactgtactgattatggccaaagacaaatagttagccaaggccaattttgctaatgaatgagccctgttac

SEQ ID NO: 185022 - DNA, 4169 bp, Cannabis indica
tgtttcttaatttggcgaagctcagtctctagcatctcgacccattgagacgcccggtgatgtgtagcgtgaacaagagaaaaagcctgaggagaaaggacaaactgaagttagtaagaaaggcagagtagggaagagtaacctgatgctgaagctaatgacttcttttggtcaggtcctcggtattgctatgaatagcgagatcccaatcgcgagacccaagtgtcaagaggttgcaccaactgtttgtcgcgtgttgcgagctcacttgtgacccctcagtcccaacttcaaggggtaaggtacaggagggctcgaggaaaaccatctccgaacgagaaccaaagaacttgacttggtgtgttaactcggtaggttgcttctcgacgatccctgcagtagagacatcaatccccgcagcagatacctcattctctgccttaggagatttatcagcatcaataagaagctggttcgaggatttcctcatattggcctttgtcgacctgttaacttttttcttaccattgtctatgcttttaatgatagacatggtaggaaagagttagggaagcatctacaagaaattgtagaccaggaagcttggctaatcatgggagcttttaatgacatccttaataaggaagagaggattggtaataaagttagctatcatccttttgatgattttattaactgtattgctaattgtctcttggaggatgttaagtcatgtggaagttttatcacttggagcatcaaggaacaaggtgaagagagaattttctcaaaaattgacagggtgttagcaaacgtacaatggcttgacaaatatataaacactgaagaaaattttctaaatgaagggttatttgatcatacttcagctctacttactatttatctagaaacacctaatgggagaaaaccattcaggtacttcaggatgtggtccacacatcttgagtatcatacacgaattaaggaagcatggcaggcctcaataacttgcaccagaatgtttcaagcggtggccaaatttaagaagattaaaggagtcctaaaggagttaaacaatcaaagtttttcagatattcaagtctctactaaccctgcgacggagaagcttgatgaatttaaaagaaagttgcaagaagagcccttaaaccagatgctgcaagctgctgaattggaagctagaatcagatatgttgaacagctcaagaactacagttcacttttacatcaaaaagccaacctaacatggattaagaatggagatgaaaattcagccttatttcatttaagtatcaaagctcgaagaaggcaaaacaaaatactttccatccttaatcaagataacatcaggatagaagatccacagcaaataatggaaaaaaggaggccagtactgaccaaattagtacaggagggagcagtgatcacataacaacatgcatggttgctcactcaggaatatacaaactaaggaagaaattagagaaactgtgtttgcaattccaggaatcaaggctctctgagctgatgctttttgtagttatttttattaagataactggaaattgataggagatgaaatctatgaagccgtcaaatcatttatgcatacaagaaagctcttaaaggagatcaatgccactgtcttagcactcatcttaaaggtgaaatgcccaaacaaagtaagttaattcagacctattgcttgttgtaatgttctatacaagatagcaactaagttgatttgttcgagattgaagcatgtattacttgatttggtggctcaaaaccaaggtggtgtcatcaaaggaaggtacatagcacacaatataatgatatgccaagactcaatttgtcattatgggaggaatgcatcaaaagccaattgtatgatcaagttggatttgcaaaagacttatgatactattgattgggatttcttggaagaattgctcacttcctttaattttcttggacaactcattaagttggttatgaagtgtgttagaactctgaaatactccttactactcaatggaacattgcaacggtattttgattccaagagaggattacaacaaggggatcctttattcccaatactttttgtccttggaatggaatacctagctatcaagaattatggcaagggtaagcaagaaactagatttccaattgcatgatagatggagccttgaatctcaatcatctcagctttgctgatgatgttttgttattctacaagggagactttaaaagtttattcctcagtcgtatgcataattcagaggtgcaatgaatcattgatgcaacaggatactgcaagcagtaggtccctttcacatacttgggaatcccaatatgtgccaagaggatctcaggtaaagattgtgcacttctagatgagaaaatggctataagaatgaaggcttagagcacaagaaatatctcttttgcaggaaaaacagtgctcatcaatgcagttcttatgtccatacatacatattggatccaaataatgaagttacctagaaaggtaataggagagattgaagcaatatgtaggacatttctgtgaaaaggacagaatcagatgcagggttctggtctaatagcatgggatctggtttgtctaggaaaaaatgcaggaggaattggctttaggaaagtgcaggaatggaaccaggctgcaatattcaaatgtgtttgggcaattgcaaataaagaggacaacttgtgggtcaagtgggtacacaatgtgtatatcaagaacacaagtaaatgggattacaaactccctcctaatggaagtttatactggaaacaagttgttgctgctgaagaacaactcaaaaatctgactgatacacaagtattcactcaaacaaagtaccagatatcaaatggttataaactcttatatcgtaatcaaaccagagtcagatggaatcaagaggtttggggaaggctaaatacaccaaaacacagttttgtattttggttggatatttagaacagattgtgaaaaaaggacaggatgaagaaatacaacatggtgagcgaggatgtttgtattctctgcaatcagcacctggaaaccagtggtcatctcttttttcgaatgcaacatctcactagtgtgtttacaggcagtaaaaagatggctaaatttagcaccggcgctttttaagggcattttttaacaccagcgcttacttttcaccggcgtgatttctcgccagtaaaagtaagttttaccggcgcagttactctacgcgccggtaaaaactcctttaccgaccaagcttcccagataagctttgccggcgcagttagggtacttttgccggcgcaacaatgcgctggcaaaaatggcttttcttgtcgtgaaattagagagctcaaatagtttccttgcaacaaattgtaaggtgaattgaaagcgcaaagctatcaaaatttaggaaatatgtagtttctgcaacagtggcaaacttggtgtatcatatttagtatgctagaaatgacaaatattataatgcacagaaggaaaacacaaggaatataacacagaaagtcaaagaggaagttagaaatcgaattgcattagtatggccgaagaaagttagtttagaggatgctaattagttttattctttgtaaccatatatgtacaacttaaattgttttatgtcctaaaattgaggatgctatttgatgtaagaatcagtttttgagcaatacaattctcttgtccatcaaaaaaaaaaaaattacattaacctaaggggtataataggaacatcatctataaaagtgtgtatatcttaaagaatatgaaaataaagctagaaattaaaacatgtaaactaaagtagatatacaatataatttccttaaaaaattaaagttttgatatatatgagatacaaatttaattaaaatatagctaagttttttttttttttaaaaaaaaaaaagaacttaaaatatgggaagatcatcatagattagaagggatgccataaaaaactttaaaattttgattccttttttttatcatataaaataaccagtgttttacacaaacattgtaactataaaagttaatttaaaaaaaatctacagaaactaaaataatagtaatataa

SEQ ID NO: 185023 - DNA, 3905 bp, Cannabis indica
taaatataatataataagattatttctgaactagtaaattttcaaatacgggcattacacacagttggctccttgttatggggagagatgcaaagcgaaagggcaaagactttgtctgagtttatgtccaagatgcctatcagcaagcctttggagtccctctggctccagctccagccatgactcaagaacacattatatattaataccttaatttgcttcaagaggtcaatattcctttcatcttttattttatatttaatacatgtggagatccttggagtgtggtacaatgataatctaaattatggttcaactgcgtacctgatttagtaccataaaacaagtaaatgaagctcacaaatatgacgctcgtatggcttgccaccaatctattcaagttaatgaggatgtctatagtccaattacaaagagtcaccaaaagaatcactttcttcctcgattctaattgaaaaaatggatgactcaatggatgatgatgaattgaaaaattggacagtattatcttcataaagaagtttgagaacgtcattgtctatctggtgttcacctcccaaaaagtcgcttgtgatcatttacatttaaatcaaaaaagagaggtgagctaccgaatagttcataaatgtttcaaaaacacttatgtcagaccaaccagacaagagacaaaaatcaaaaggctaaaacaagaagacttctactcgaactctttgggtttggaaatatttctagtgtttttgaaaaaaccaagaaacttcaagtttcaaaaagtaggtacatgaaaaggacaacgatgtaagcccaaaaaagttatctaccacgttatttcagaaataacaattgttcgatcaacaccaacacaacacattttatgcaatgaactcaaaatagacatggcagtttcacaagaaacttgaagaaagcatttaaaatttgtaaagaaagcaaaaaaaaaatgagacttactcattgttagctctagagttgagaaggattcaacgctcgaaatagtgatattctaagaaatatcttgaaaaaacttgaaggaaataagaagttttttcttgcgagggtttcatttggaattctaaaaaatggtaaaagagagaaaaaaaaattaaggtgtatttataatagaatatgaaagtgagaggatatgaaaaactaaatgggttatcattacttctccctcccaccccccaaaaaattaagtttccatttactacatgatacttttttggaaattatgtaactgttaaaaacgatcttcaatgcacaataaccaaggcacacaatgttgatgggtagggatttgtaaagacaagaggagattttatatagtacatcatgaaaccctagtgagaggatcacatgaggtcgtacacgcgtcaaattggtcatactcatagaaccgagaaatcaacatcagtccagatggctgtatgcagacttcgagataaatgttatcccaaaaacattctgaatgatgtggcatcaaatggagtgacatgtggcatgacaaaataatctaggcaacatgaaacgagaaagggctagacagtgtatgtttacacgaggagtttagttagactttggaagaagataagtgagtgaccaaccaggggaaatgtctgattttgtaactaagacatggagtatttatctagtcggtctgaccgaacaggaaacatagtttgttccaaatccactaaatcagtttgcaaatccctaaaaactcagtcattatggtttgcctagagatccgggatttgaagaataattaacattaattgtatattttgtaattaatgtattttatttcatcttagcctataattactagctcatttcacagaaatgggaatctgaattcaaaatcagagagctctcatgatgcatatattattgtgttatcttattattgggaaactgatttggcacatatccaaatgatcatcataatttctcttaaagtaataccaattaaagaggagtaagttattattaataattgagacaaaacctctatcaatctcgtgtgttgtttattattcatcaaattcattcttttgttacttcactattatcatacacatttttgtaaatcttaactttgtgtcgttggctaaaaacttagtcaacatgtagaactctagtgaaagtgaaggcaacagtaagaaaaaaagagttacaggagcgttcaaagggcaaaatgtggaaatagtacttgcccagaaccttaggggtgaaattgtccttcacatgctatccagagactgcggggcattacatgactatagaaataagttcctcaacatggtcaaactcatcgttcacatcaccgttcccatgaataagttcacctgggtgtccgtaaacaaagcagaaattaagactatctgggacagactagcggtgacattaatttttattgtaatacttcaaaaaaaattagtacactaataaaaaaaatatatgacttcagtaattttcttcttttgcaaaccaaatttaagttcccacgagacaatccaaacttcgtggaatgcactttatactagatgtcaaaagggctacgtgtttggaaattgaactcaaaaaatgtgtggttgaaaaattgtgataaaatgggagaggcagaggcaaataagagacctttagagggggtgtctctaaaagtatgggtagatgtaaaaattcaaaattttaaaatttattttccattaacttataatttttaactctaataaagtaaatttattttaaattacaggtaaaaaaaaaatcgtagcaagatgaagataccaagtagatagagattcatcaagaccaccgttaaccacatctttgggcaggtatattgttataaatatcattacccaaaaattgatgagttctaaataatatattattgacaatttttattaaataggctaatctcaagacgaagaacttcctaatgttgtggatacttttcagaagttctaccacaagaacaaaacttggcatagtgaatatacgtaacgaatgcatgtaagtaattttgactttaaccatatcgttctatattccatttctattcaattgtaaaattttattaatatttttttaggcccaaatggttgagagacatgaatctcgacttgctccgagtgatcaggctcgtttatacaatgtagataccaccatgttctcacagacttgcctattttgaaacaagtacttggtaagtggtcatgccacctaagaggtattggccctttgcctagacttagggcaagggcaaaaaggaaaacttcgagggcaggttacgttccacctttgggcaacctgctatcaacatcgaggaatatgagatgttgaagtgaaaggtggaagagcaagattcacagaatgattatcaacaacaaaagatgcagactcagcaacgatacctgacgacattttaggagcagttcaggtatttttttcgacatcattcttggctacaacattccaaaaatgtctctgattccaccatttcatcctcctagcgttggatcttcatggcaagctgctccttttgagctagaacgacgacgatgcgaatgatttataatttgattattattttagtattttcaatgtagatattatgattttttttattagactatgacaccaactttttaattatttttctaatatttacttgaattcggtttaattataatatgtactcatgattaggctaatgtataattttgaattattatttatgaaattttagttttaatttaaattaaaattatttacgttatacgcatattacgccggtaatgaaatcataaacaggtcaatttaatttatagattagacttatcacttgtacatatatttacgtaacc

SEQ ID NO: 185024 - DNA, 5095 bp, Cannabis indica
aaaagtacacagctggtgcaatttcttgctgattcaggtattgctgctgatgaggccattgtttgtacacagccccgtaaaattgctgccatgtcgctggcccgtagggttcgggaggaaagtggtggctgttatggagatcgttcaatcacttgttacccatccttttcatctgatcagcagtttaactctaaggtaatctttaccacggaccactgtctactgcagcactacatgctagataagaacttgtctaagatttcttgcctcatcgttgatgaggctcatgaaaggagtttgaacactgatctacttctggcattggtaaaaagtctactttgtaggaggcgtgatctgagacttgttataatgtctgcaacagttgatgctcaccagctctcagaatacttttttggctgcagaatttttcatgtggtggggagaaattttccagttgatataacatatataccttgtatcacagatgcatatctgtctgatgtagtgaggatggcaacagagatacacaaaacagagaaagaaggggccattcttgcctttttgacttctcagagtgaagtagagctggcatgtgagaagtttgtagctcctgctgcagtggccttaccattacatggaaaactgtcttttgaggagcagtttaatgttttccagaactatcctgggaaaagaaaaattattttctctacaaatcttgctgagacatcactgacaattcccggggtaaagtatgtaattgactgcgggatggtcaaagaaagtaagtttgaacctgggagtggcatgaatgttcttagagtaggcagaatcagtcagagctctgctaatcaacgagctggccgagctggaagaacggagcctggaaagtgttatagactttactcagaatctgaattcaagtcaatgcctccttgtcaggaacctgagattcggagagttcatcttggtgttgctgttttgagaatatttgctttgggcattaagaatgtacaagattttgattttgttgatgcacctagcgctgaagcaattgacatggccataaggaatcttgttcagttaagtgctgttaaacgaagcaatgacaattttgaattaacgaatgagggtcgatgcttagtgaaaatgggaattgaacctcggcttggtaaactgatacttgggtgcttcaataataatttgggtaaagaggggattgtacttgccgccgtgatggcaaattctagtagcatattttgcagagttggttctgatgatgcaaaaatgaagtctgattgcatcaaggtaaaattttgtcatcaggatggtgacctctttacgctactctctgtgtacaaggagtgggaggctgtagcgagagacaagcaaaaccagtggtgttgggagaacagcatcaatgccaagaccatgcgaagatgccacgacactgttgtggaattggaaagctgccttgaacgcgaactagctaaaatcattcctacttattggcgttggagtcctcagaagtcaacagattctgatatgtatttgaaaaaggttatactctcttctctgtcggaaaatgttgctatgtacactggaaatgatcaacttggttatgaagtggccttaactggacaaaatgttcagctgcatccttcatgttcgttgcttgtatatggtcacaagcctcattgggtagttttcaatgagattctgtcaaataattgccaatatttagtctgtgtcacatcctttgatttcgatgctttgtccactcttcatccccctcccttgtttgatgcatgtaatttaaagaatcggaagttgcaagtgaaggtattgaatggttttgggcgtactttgctgaaaaaattttgtgggaagggaaacagtaatatgctttctcttgtagcacatattcgtgaaatatggatggatgaacgtattggcattaacgtcaatgttgaccaaaatgaaatttcaatttttgctagtgcacaagacatggaaacggttctcaactttgtaaagggtttcctggaatgtgaacagaaatggatgcattatgaatgtctggagaaatgcttgtatcgtggatctggtgtaccatctgtagcattgtttggagccggtgctgagattaagcatttagaacttcaaaaaaggtgtttagatgttgatatatatcattcaaatttgagttccttaaatccaacaaaggagaaggaacttttgatgtttattgaaaagtttacctccagtaccatatgtgcttttcacaagtacgcccattcagggcaggaaggtgatgacaaagaaaagttgggacagataacatttctttcacctgatgcagctctaaaagctactgaactgaatcaatttaaatttgatgactcgttgctcaaggtgattccatcaaagccaacttttggagaccataactattttcctttctctgctgttagagctaaagtatcttggcctcgtagacccagtaaggggtttggaattcttaaatgtgatccacatgatgtcaattctatgatggatgatttttctaatcttgaagttggaggaaagttagtgcatagtggtgctagtacaaaggcggcagattctttatatattaccgggcttgacaaaaatttatctgaaactgaaattcttgctgatttacgccttcatacaagaaggagaatccttgattttttcctcataagaggagaggcagtagaaaatccagcttctgatgtttgtggagaagcactcctaaaacaaattactccatttatgccaaaaaacaacaaccacagtgcttgttgccgggtgcaagtcttcccccccaacccgaaagacacttttatgagagcacttattagctttgatggaagattacatttggaggcagctaaagctttggaacaaataaatggtgaagtattgcctggatgtctcccgtggcaaaagataatatgccagcagttatttcatacttctttatcatgttcagagcgtgtctattcagtaattaagaagcagttagattcattgattcgaaatcgccttagtagtataaaaggtactatttcatggtaaattatatctttttattgcttattatattggtgcaagtttattttattttcacatttgttattttggtagtctgttatggttttattggcatttttcaagtttaagtatctttgattcttgaaataaaaatattgcattgttctatagttttacctcctctcttcctttgagaacggcttgcattattcctctttaaaagggtctctaactcactttttgtgtagttagattattgtggtatcaattattatgttggtttccttccatattttaaagaagaaaaacaatgagataaaggcttttctttttggttgctacttgacataagtaaaagtaaataatggccacaaactaacatttgagtgaacattgctgtttgctgtaataaataagttattgattgtcatggttttcttgtttgtaggcgtagaatgcagtctagagcaaaatcctaacgggtcgtatcgagtaaagatatctgccaatgctacaaaaactgttgctgaggtgaggaggcttgtggaagagatgctgaaagggaaaatcatagatcacaaggctcttactccaactgttttgcagcttctgttctccagagatggaaaaaatcttatttacactctgcaaagggagacaggaacctacattttctttgataggtatagccttaatgtacgcattttcggttctcacaacaatgttgctgtggcagaggaaaaaatgatcaactcccttgttgctctcagtgatagcaagcaacttcagatcaatcttcgtggaaaagacttacctccaaatttgttgaaagaattggtgaacaactttggaccagatctccatgggcttaaaaaaaaggtacctggggcagattttactctaaatacttttaggcataccttaactattcacggtgacaaagacttgaagccaacagtggaagagataatttataagattgcacaaatgagttgtggttctgttgggagatttgataatgacgtaacttgccccatttgcttgtgtgatattgaggatgcttaccagcttgaaggctgtgggcataaattttgctcgctctgcttggtagaacagtttgattcttctataaagaaccaagatggtttcccaatatgctgtgcacacgagggttgtgggtcacccattctgctgacagatttaaggtctccacttttatcgggcgagaagctggacgaactctttagatcttctttgggtgcatttgttgcatcaagtgggggtgcttacaagttctgcccatctcctgactgccctgcaatctatcaggtggctgatcccagaactgatgggaaaccatttgtctgtggttcttgttatgccgagacatgtactagctgccatatggagtatcatccctacttgtcctgtgagaaataccgggagttcaaagacgacccagattcatccttgaaggagtggcagagcggaaaagacaacgtgaagagctgccccaactgtgggcacatgatcgaaaagtgggaaggctgcaaccatatagagtgcaggtgtggaagacacatttgctggaactgcatggaacatttcaatagtagcgatgagtgctataaccatctcaggaatgtccacctggctattatatgaggatgtcagatcactatttttaacagatgaataatttatgtaaattccaagtaattgtgtctatatttaagatgtctttcatataatatctgtgtatatagttgagtccatattaagtgttctgcaatagtgtctgtaaattttagtgatttgcgacattttaaatcttcagcccacttgctgcttgtatatattattatccacatagtgctgggcttcataaacaaatggtcgttgtgaatcaattatctcgtgttttatgtcacagttttctaggttttggggatcacaaaaaaattagacaataatgcctacgctctttgatatattgatgattatgtatggaccactt

SEQ ID NO: 185025 - DNA, 11098 bp, Cannabis indica
aagtagtatttaaagtctgcaccgaaattttagttcatatatcataattatgaatatataattatatatcctttcaaatcaataaattcttctcttttactaattccctccaaagtgatctcatgtcttcaaaatcatcattaactattattaataatgatgacatgaatgtcatgtaaaagtgttataatttgttttagataaaattctcatcaaagaattaactaacttaacaaaaagacaattctatttacacccaaaatgataaatatacttaatattttaaaaaataaatttaaaataattttaaaaatcactttaaaataatttttaatttatttttcacattattttatattaatttcattttattttatttaaaaaaagttatgtatagccattttcaatttttttctaataaaattttatataatattttataatcttaatttttttttataatatttaacatatgatttatttttatttaatacaagtttaagaaaaaacttaaaaaaactaatataattaaaaatatatatttaatgtaaaataaaaatgattgaaatgaagagcacttatataactttttgggatgcaaataaaattccctcaagaaaaaatttactatttttttttgtttgtttttggtacaaacaatattaatgtcatgatgtagtgaccaatggttgtgaagagcttgaggttgaggttgatccaagtgattctattgaattaaatgactgcaaacaaggtggtgaataagctttacttgcattcttatagttaatttccaactcattgctcttcatatcaagttcatcattttccatagcactctaaaaacaacaaaacatcaaaaaatgaacaatatgagctaaaattgagacttgagacaataaggtatgttttatttatggatttcggttttacctgaatcgggaaattgcggaacgaagggagaaatcgaatcttgcaatactcgttgaacattaaagttaggattagtaatgggattgtggaaattgctgcagctggtttcgatttcaatccgaaaagaccaatcattgtgatttgcataaggattattgatactaagatgtagtggtgaatataaggccaatattttccacatgtttcatacacaatgtcataaacatcttcaatctgaaaacacaaatgaatttgacaatcatataagtatgtgtcataacaaattgtatgatttttttttattttttttctaactaaaatccagcttccaaacataacctaaacgaacaaaattaagaagagtttgagaaaaatcgaaacctggttgatgaacacggcgtagcctaaacagaagtaaccgatgagaaaagggagaagcaaaggtgcaacaactgcatacaccattccaataagtattgatagagataccaatggaattactctgttagtaaggtaatgaaaagaggtaaggattctttcctttgatcgtcgacagaagcaaaatcttatcgcgctccataagagtaaacccggttgaagaatctcgaatgaaaacccggataatccatctgttaagatgtatgtcaagaagaaatctgcctgaaacatttagagaataggattagtatcaactaaagctaagataactgagttcagaggctaaggtaggctaggcctgcgcctaaggctcacctagcccgaggctcccccaaaaatgcccaataatttagttttcaatgaataagactagtatcaactcaagttaagataatcgagtttcaaggccaggcttgggctaaggtgggctaggcctacagctaagaccaccgagctcaaggagacaaggacccaagaaaatatttttcttttaaaaatatacatcttcgcccaataatatccacctcatttcagggccgaccctttataacagagttttcgatgaataagagcgagaagcgcaacttacttgagcagagacagcactagctaatcgagtagggaaatttttcggattagtgaaggattcgcctatttgatcgagtaaagaacccgacaacaaactcaagaagaacacattgcccaccaaaaagtaaaaaaccatgttgcaagtttttatttcctctttgctctttgagatagatccaggtagcttagccattccaagcatagcaaaaggaacaatgtaaatgaaacctttaagaattgcactcggaaggtaaccggtaacaattgaacttaaacctggtctgcaatgtacaatttatcagtttcaaaatagtaacaaaatagtaaccaaaatattctcaaaacttacataaactgtacagccatagctggaggaaaccatgtcttgagcttttcgaatttcgctattccttgaacagcagttactggaataacaaagaaaatggtaagaactgaggctgcaacaacagctccaagtttgcatagcgacgataatctacttggaatcgtcaaatttcgccacgagacatctcttggctctggagccatgctactaatccaaagaagtggattcgaatgctgctgagattgagccactagcgctgcagcaacccgcgtcttgaaagtaacgaatgcaacgggaaattcctacgaaaacacacagtataactatgtaacgtcatttcacaaatagaatatgagtgaaataaatgaaaattatgagtaatcctattagagtttagcactgactcgaagagtgagacccaatactggagacatgaataattcaccttttgtttaagagtattttcgcattgtaattgatgaatcttgagacgaagacactcgagcttttcctcgagcaaagctaatcgttctttctcgcgttcagattctttcaagaggaaaattcccctcttagtttgtctagcaatggatctctctttcaaatcatcaatctttcttgcaatcaattttgcctgactctacacataatatgatctgtagtaagagacatcaaaattcaaaccaacaacatgaaatgtttgcattgtaatgttgagtttatgatcaaagtcataccactaagtcttcaacatcttttccagtgtataaaatctgataagaaaggtaatcatgagggtaatgtttagagaagaagtgatcagcacaacaggcatgagcattgtgtacattacaaaaagggatttccctaatcaaaacagtgaattgatcgggacgatgccttatgtgtcgaagttgttgaattcttatgatcaaaatttcattatattcctgaaaaaagaaaaagtaagaaatcagccttgttaaacttcgtttaagaaaacttctacttttgcttatatctaaaagtataaacttgtagagtttaaaagccgagttgaaagtgctttagaatcgaaaactcttctttaaaaatctttaccagtttctctaaggaagcatttttgaacttggagagaatgaacaacgattgaagctattttagtttcaataacatatattgttataatgattgaaatagcatgataaccttaattgtcacaatttttaaggagagccaagatttttcgaagtataagaaaggcaaacctacatttttctttcaaattcggaaagctataaattcttataagaaaaacttaaccaaacgaggcctatatttgagagttcaaagtcgaaaaacaaggtacataatgtgacattcaccatatataaaaaacttaagccaaacaaggtctatatccgattttgagagtatttccgataaatgtgacaatcaccttaaggagtaaacataaaaattcaacataagacaaacttagccaaacgaggtctatattcaaactcgaaagtagttcaaaatcgaaaaacaagacataaaatatgacataattcaccttatgcagtagatttataccattaaggcattaaccattgcagtagatataaaagttcaacataagaaaaacttagccaaacaaggtctacattcgaattcaaaagtagttcaaaatcgaaaaacaaggtacaaaatgtgacattcaccttattcagtagacataaaaatttaacataagaaaaacttagccaaacaaggtctacaactaggtagagaatgtgacataagagaaacttagccaaacgagaccaatattcgagagttcaaagtcgaaaaacaaggtacacaatgtaacattcaccattgcagtagacataaaagttcaacataagaaaaacttaccgaaacatgggatctacattcgaattcgagagtagttcaaaatcgaaaaaaataaggtacaaaatgtgacattcaccttttccagtagacacaaaaattcaacacaacacaaacttaaccaaacaaggtctatattcaaattcaaaactagttcaaattccaaaaaaaaaatgacataaaatgtaacataattcaccttatgaagtagatacaatccataaagagatataaaccataaacaagcaaagtgtatccaaagcctgtacacaatcaaaaaacacaactataaaacattattacatagaaaaaaaaaacagaggaaataatcaaaagagtgatgaaacattacttgttagaacctcttgaaatatttgatatagtgaataaatccatagagtgatgattattactagtcatggaatttttaacatgaccattataattaacaggaagaagtatgacaatcccaatgagagaacaaacgacaaagaatttgataccaaatttaaagagtctaataacaacaagagcatcaagaccacttgtgaggagtatttcagtttctgaaacatgaaaggctttactaatccaagacacagaaggaagaaaacgacaagattggttttggtgatgaaacgactcgtcgtttgagagtgagaggcgtttagcgtagtagataggtgcttttgaaggttgttttttgaggatggagaagagtgagaggactaccatggctaatcctatgttaatggatgctgaagctattagactttctgggttcattgagaaaagtgttgttgatgatgaattgagggtgatgatgattgtggtttaaggtatgaaactaatgtgaaacgaaaactgttgttgtgtatttttgtgttgttgaggttaggcggtttcgagtgtttttgagaggtgtgaggggacacgtggcgtgtttagagggtgagagaggtttatttatatgtttgcaagcgcatgctaccttaatatagaggtgatgtgatgtaattgtaagttacatatttttgctacttataacttatctcattatcatccttaactaaacttacgttttttgttttgtttttagggaaaaaacaaaagacaacgcacatggattacaatgaaaagggaaaaagaattcatgtaagggagaaaaaatgtggttgacagaaaagtgaaactagaacttgagattggtctggttaaagaatttgctgggacatgttgaaccgggatctccttacgcatcactttgttccgaaggtcaatttcaatatgtttcgtgagagaataaagaacaggatttgcaaatagatgcatgacactcaggttatcacaccaaagagaggactggaagaaagttgttgcaattcagagagcagagattgaatccaacttaattcaatgaccactgcagcaaggctgcgatactctgtctctgttaaagatcttgaaatagtagattacttctttgattgccagcagattaagttaccacctagaaagatgcaataactagttgttgagtgcggatcatcaagattaagttacttctttgataatcttaacccactgtttattggagaactatgagttttgacaccttgcaacttgactttgcataatatatcttgaatatacttttgctgagatagaaaaatttcttatgttgtttaagacaaatttggaactcagggctgtgattaagatggtgacttgatgagaatcacttctagtgattagaatatcatccacataaatgagaatgtagatgacacatggctgtgagaagagtaaacaacgaatggtcaaccttggtaggggtgaatccgtgttgaagaagaacagtggagagcttttcaaaccaagctctgtgagcttgtttgagactataaatggccttatgcaacttgcacactttgttgggatgattaggatcaacaaaacctggaggttgcaccatgtaaatgtcttcacgaagatcaccattgaagaaggaattattgacatctaattgccttacataccatcctttggagaaagctatggtgagaacaattcggattgtgacaggtttcactactgggctaaaagttttatgaaaatcaaacccagcttgttggtaacccagcttgttggtaatacttctttgcgaccaatcttgcttttaatttgttgattgatccatctgagttttctttaattctaaaaacccacttgcaacctattaattctctgttaggaggaagattcaccaaggtctagttcttatttttcttcaaggcattgtttttatcagacattgcagcatgctattttgcatccttgagagcacttttgatagaagcagggataagagaggccatgagaacttcaggtttttgaatgcttgatttttctcgagttgtcatagaatgcttattgaccacaccaacaacatgtgcattagtagagacagtgccaacagatgtaataactggagcaacaatatatggtgtttagcagagacagcagtagtggaattcacttcatttattcttggaaaagagagagtctctgttggagcagtgtgagcaccatcttgagtggaagatgtgttactagatgttacatgagctgtgttatctgcaagaagcacattagtaggagcaatagcaacaagttcagcattattcaaaatgtcaatttgggtgggagcaaattgtagagatgcagcagtagcagtctagagtgtgtaaaaccaggaggagggaaaggaagagtggttctctgaggtaaaccagaggcagatgggggaaaattgtgggagacagaaaaggatgatgaggaatgagatgagttttgagcagcttcaacaacatatgggaagatcagttcatcaaacaggatatctctaatagagtattaaaataagaaaaacaattgatctataagcttcatcccaaaacacagtgcactctttaaagtctttaagtattttaatatattcctaaaatattttgatatttaagaaaacattttagtgtttttatttttaattgtaaaattttttaaatttagattaatttataataacaaaaataaaatttaaatagttactttgcatataaaaaactgcacaataaactatttgaacattcatgtgaaataaaatttaaatagttaggaaaacagtacaataaactatttgaactttaatcataaaatttaggttcattgttaatgagtggagtaccatattatttacaattaattttgtgaaaattcagtgaaaaaagtttcatactttgaaaactttgctttgcaagttagtctttttattaccttttcttaaaaaaagagttgtctttctatttttattggtacaaaacaaactgataactgatattaagccagttagttaagcttaagctgcgagccacaaatgagccgatcattaaacgtagctgtgatcggagccggagtggctggcctctgcgccgctcgtgagctaaaaactcagggccaccgagtcaccatcttcgaaaaagccaatcaaatcggtgggacgtgggcatacgacacacgtgtggaatccgacccactgagtctggacccaacacgggaaatcgtccatggcagcctctaccgatctctacgcaccaatctccccagacacctcatgggatttctcgattacccttttgagaagcgcccaaatggggactccagaacattccctgctcaccgagaagtgctctgttttctcactaagttcgctaatgaatttggactcgttgagttggttcggttcaactcggaaatcgttcgagttgagcgagttggagagaggaatgatgagtggctcgttgagtcgattactcggggatgtgactcggtgagtggtgaagtgtttgaagctgtggttgtctgtagtgggaacttcgtggagcctcaaattcctgttcttttgggtgagtcagttgactttttgtgtattttgactcagccatatatttataggaacatcattataaaaattctgaaaattattgttatttcgaaaatttttatcagccaaataactattcaaaatttcttattaggaaaataatcacgaccaaaaattacaatgtgccatcataaaacgatcataataattgtttttacaactataaatttacacttttgcaaattttatactttaatgttgttagtttggcaaattcttcaaattgattcaaacaatcgggtgtaattttttaaatttctgtaaattattttaattttattgaaaattggtaggatgtgtaagataactataatgtacatagttatataaaaaaatttggactgaaatttcactatataccgaaaacaaaaaagtccctattatgttttatcaatagaattttccaatatttatttgagcattttgactcaggaatagagaaatggcgaagatatcaaattcatagccacaattaccgtgttttcgaacaattcgaggacaggtatgttgttttatgattgattaaacaagtcaaacactcttgttttatgtaactaaacaagtcaacacttaatagaataatagattgtggttttgattggatttggagctagtgcttttgacatctctagagatatagcaactgaagctaaacaagttcatattgccacaagaagccctgatgtgaaacttggaaagttggaaaatcacaacaatatatggcatcatatgatggtatgtatgtaataatcattaggtatgtttttgtgtttttatctctgtttatatgatgatgacttgaacaatgtgtaattgaacagatagatcatgtttgtgaagatggtagagttgtttttcaagatggatcctcagtttgtgctgataccattttctattgtactgggtgaacttcaaattactaattttatttttgaaacaatcttctgtggtttctctttgcttgatagtgatggagacttaaacatgttatgcaatttcagattcaaatatcgttatccatttctcgaaacaaatggagttgtaactgttgatgaaaaccgtgttggacccttgtatagtcacgtctttcctccaagcttggctccggggctctccttcatcggtatacctgtaaaggttggttagaattctttttagactttctcagctgaagatttaatgttctttcttagttggtatttgggatcgaaaattttaaattcgtttagttggtgttcagggtccaatcttcaacacaatagagctgcaatccaagtgggtagcgcatgttctatctggtaaggtgatgttgccgaaagaagaggaaatgatggcttccactaatgaattctacaagaaaatgcaggagcttgggttgcagaaacgctcaactcatttccttacaccatatcaggtatcgaattatgactacttgaaacggttgtgattatagcgcttttacataatttggttgttcttaagttatggtagcatgtgtcaaaccctgaaattcaacaaagtacttaaagtacttaagtgaggttactgtgcaatgcaggttggataccaaaattggttatgtgctcagattggattgcctccgctagagaagtggagatatcagatgtacgaagagagcgtcaagaacataatagaaatgcgggatggctacaaggaccggtgggatgatgcttactgggacggaatcatcaatttgtaattcttatgcattaacatgtttctgcttaaattcttgtgtcaaatctgagctactatcgaccaaatgatcttgatcttgtattgtggagctaaaaggccacatttgctattcttttagaggaatggaatagatttttattgtagcaattgtgttagaaggaataaggataagaaatgatggaataataatacaagtaataaagtgtgtgtaccaaaaagaaaatgacacaaagtgagagataagcctaggtggaaagaatgagaataaaaacaccatacatctccattattgaggactttgtaagattctcatctttactatttatcttatctgccttttatttttgaaatttctagtgttctctcaataaagtttagtgtaaaataattagctgtggatcaattgaatatgacattcactacaaaagttgattcttgtggatggtcactagtttgatttttgcaataattggtcacaaagaagataaagacaatgtattttttctctttcacactattatatgttatcagcatggaaataaaagaaaaagaggtatcattagtcataagaagaatacaccaactgcagtagtaattaaagagtgtgctatagctttttattctccttcacttcaggttgtgatcatggcagccgaactggtagctagtgctttgctttctgcttcacttcaagttttgtttgaacgattggcctctgaggagataccccggctattccagggaaagaaagtgatattggatcagctagatgaattgaacactgtgttgatatcagctaatgtgctgctcaatgatgctgaggagaagcaacttcgaaacgatgaggttaggaagtggctgttcaagcttcaagatgtcatctatcaagctgatgacttgctcgacagaattgactatgaagctctaagatccaagcttgaagatgatgatcagtctagcagcagtagtgccagcaaggtatttagccagctgaaatctttgtcattattcatgtctgaatttgataaatctgttaagcttgattccatggagatccttcttaagctgaagattctggttgatcagaaggatgttcttggcctaagagaattaggtgcactgaacaaacactcaccaaggccgcttgctcctct

SEQ ID NO: 185026 - DNA, 3528 bp, Cannabis indica
cagagattgaaagccttttttgaggaaaactctacccttcacgagttcctatcaggaagctatgggcacagacaaagcaattgggagaatcaggtattttgttaatggtttctgtttgcaaatatagggttgtgttatgctcattgctctctcccttctaatgatctgaattgaattttctttttttttttgtttgttttttttttgcgtaactgcataacttgtgtttttctgatacttcccaggtgaaggattgtctccaacaaaatgaagagctccgtggaattctcgatgagttgagaatcaaacaggcaaagggttttgtggaaccacttgccggtgtaaatgaggctggttctcctgcatatgcggctgaaattatctccctcaaggttagttcttacttaactgctgtaagggcaagataggcaccagtccgatggatttgttgtctagaaacaagtataaatattacatacaaaatctatgttcttaccctataatttactgtgtttttcaataacaatgctggtctggtttgtggtctgccccctaatagggtcaagttgcaaaagaacagagccgagcagagaatttagctgcagatgtattgcagctctcagcccgactacagcaaaccactcaagcatataatagtcttgcacgcctgtaagtctctttctctatcgctctccactgaccgtcttagctgttatcatgtaacattgtttctgtctaattttccaggtatcagccggtgctgcggaacatagaaagcagtctaataaagatgaagcaggatggttctgtgactgtgaaatgagattagagacaattttaatatttaatattataatttgtatagatttcatgtggatctggcacacacacaagttttcttttattttttccccttcatttgtactagggcaaggcaagtgtcaaattgttgagttaaaaagcttctatagaatgaatcactgttaacactattgcaagtaacaaaattctaattctttaggtacaacaaaggttctataaattattagaagctctattttcgcattctttttaaacaagatcggataaaaaagtaagaggtgcattaaagaagttgtcttttattattgcaactgtttgtttacatgaacttcttcttgataatctggttgtattgtatctatctttttttcgggttcttctccacctgattggaaatttgaatttctctcaaacctggtcctagctgattatttatatatataattgttgctgaaataggtgattatataatacactattaaccacttggaagtgtcattaaccacttggaagtatcgttagtgtgattcattaattttttctttaaagtatttgactgcattaagactaacgccatcaataatgagtaatttaataactctctttcgtacaagctacaacctcttcaaatatttaattaacatatttgtctaccaaattatccttttaaaagcagaagatatcatcttatataactggccaacagtttgatcatcgtgattaagacatgtgcacttgcttagcatatatgtactatatctgttattcatcaatatattaatcccgtgattactgcctcataattctaattgctaatcatgagaacattgtctactttattaaggaatcttttggcttattgggaaatgcttttgaagtttttgaataattctgtggccttatctttcatacagtttgccaaaggccaaaatagatattattagctgtttttagatattaaaatacacatcgacatttgacgttttgcttggttggctagctagaccacttgtacaaatcattcaaaagatggtaaaagcgttaaaccgttttttactttaacacttgaacatacatttgttctttaatttgttggttaaaatcattatgcttgttaactaagtaatcatgataataattgaagactttatcttatctcttataataagagtcagaagaaaaatgataaaaaatataaataaaccagtgtgtggtctgctcttctctactgagaaaaaaaaagtactctcatgagcaaaatgacaagcaaaaccatttgtttctgcattccaagccgaaaaaagaaacaagggaagaaagagtcctccacatctcatggacgaagcaagaaaagagagcctgaagtagttggtcccgccggcacccaaaatgaaggcaattatgatggtgccaccacaagcagtgatgctgctgacatggctgctgttatggtgaccactgcagccaccgtgtcagccatgcacgccaacgatggcggcagtactcatggtggtggagatggtggtagttctcatggtggtggtggtggtgatggaggaggtggtggtggcggttgatgtcattgaaagtggtggcacctttttcgtatctggttctattctataaataaatcatcatcattatcaggcgtttgattggtcaattgaattggaaggagtgaatgtgtataataaaggctaatagcatctattttttttggtttggtgtgtggtgattggtacagcttgttgaaatttctaagagtttatgagattataatcagttttcgatagattattttacacctcatgcttttactagatttgctctattggacttaagcaaacaatgtttttttcctttttccattattcctctacttcttcatctcttggtggtctttttcaatacattgtatttttatctctttcgttacttaatttgtaccaatatatttgaagtagaggaataataatggtaatgtcgaggtttgttgaagttaaatctttcaaatttgaattccactatccaataaatatttggttgattggtttatatagggcttggtaaaatgatgctagcggctagcgcaatcaacagctttttcctacttaaaatctttttatctattcatttcataacacttgctcaattagatttagaaggaagaaaaccatattgttttaagctctggctcaccaagagatcattactcttatataggaatacttttgggtgggaaagagcattgatttgagtttgtaacctcagacttcttattatacatctcatcctattctattttcttaattagagaagattatttgtatctttatttcatgagtttgtagttgcataagtaagcatatcttcttcgtagtggaaacatttttggaaaaactttaataggttgtaggtcacattgacagagtcaatatgcataaattaattgttgttggaaatttatgcactcaagatccaaactaaaacaatcagtcactacaagaaaattagttttgcgccagcaaaagtttagaattgcaggtaaactttgtcaacgaggaacctcaccgacaataaatgggcgggaaaagggtttatgctagtgaatgtagtgatttcatcgggaaaagtcacttgtctcagcgagtgaagttgccagtgtaaaaagtgtcgctagggatgtacgaaaatcttggtaaaccg

SEQ ID NO: 185027 - DNA, 2516 bp, Cannabis indica
gatctttttacattctaattgagattcaaagatttggccctaaaggtagaaccctatttcaatcaggaaactttgtatgagggaggatggaaagcagcaagtttgcattgtgggcttgcaagaatacagggtgtctgatgtagagaccataaaggagctcattgaaagaggaagtgccaccagaagtactggtacaactggtgcaaatgaagaatcctctcgttcacatgccatacttcagcttgctataaagagatcagctgacggcagtgaatcaaagcctccccgtcttgttggcaagctctccttcattgaccttgctggaagtgaacgaggtgctgacactacagataatgataaacagacaaggtaatatccgcatcacagctattaattgagctttaataaaacatctaaaggaataggatggtatcttaaataaatgcagtctctctggtgcccattaatcacttattattgtgtttaatgttttggaacgctatgattgcctattgtcatgttaccccttgatatctgttctttctctgtctgtagtctacttatattactagttgtttctaatattgatgcagaatggaaggtgctgaaatcaacaagagtttgctagcattgaaagaatgtattagagctcttgacaatgaccaaggtcacattccattcagaggcagtaaattaactgaagttcttagggattctttcatgggtaattcacgcactgtgatggtgtcatgcatatcaccaagttcgggatcttgcgagcatactctcaatacgctgagatatgcagataggtaaaaaagaaaaagaatcacactgataaaagcatattcggttcttttattaattttactcgcttgtcatatctggcattttaatgttcattattatgaaaaattctaatccagggtgaagagcctctcaaagggaaacaacccaaagaaggatgtgttgcctccaaccttgaaccttaaggagtcaacaacagtgcccctatcttctgctttacaaacttcctccacgtttgaggatgaacaaggtgagagtgaggattttgacactcctgaagaaacatacgagcctccaccaaaatcgttatggaaaaagaacgagaagctaggatcgtttggtttttcaaatgcagaagaaaaattacggagacccaatggtcagccaaaatggaaagaaacgccaagggttgattccaaaagctcacattcagatgatgatttgaatttccttttacaggtgactgggaagataatgacttttctcatttgacaagtgatgaaaacaatagtaagtcttttaacatgtttttgtgggtggtgcacttgttgcaggaagaggaagatcttgttaatgctcacaggaaacaagtggaggatactatgaatattgttaaagaggtatacaattcattaaaatagaactagtgtttggagtatcaagtttaatataccaatgtaccacattttgaccgtagctcatatattttttggataagaacacgccacacagaattttatttctgggtgtaaattttatcaattccaatctatgctgtcttcttcattttggattcttatattcttgtgcaggagatgaatcttttggttgaagcggatcaaccagggaatcagctagatgattatgtttccaaattgaatgccattctatctcagaaggctgcggggatcatgcaattacaaacccgtctggcacaatttcagaagcgtctgaaagaacacaatgttcttgtatcttcttctggttactgatttgatgtggaatttagtattattttctctgatcaattggtgctgcttaggaataatagatataaaaatttggcatgatcatagattcagcagctcattatcataattggttggtacttctgtgtattgttgagaaactctactctactagttggtagctcggacggaggggattggattgttttccatggcttggcgcacaatacgatactggtgtggtgatgaagattggttatcatttttaatagccatatttcatgggattaccatgccagaagaaggctgcttttgtatagctctgcatcgttgtaatttgattattgaataggcggttcgatggaccggaggtgtttcatttcatgtggatttatttggttgattgattggaaatcatgtatttctattcattttctttctatatcaggaagatttatacacaccctgttttttcatggttatcatgtcttataattctttctgtctttacattgttttgaattttatttgaaatggctttttggaaaatgaaaaagaaatatctttttattattgtgacatttattattaatgaaaattatagagattggcttatttatagacaagaagtttttcatgtttaaatttgtcaaacccaagcagttgttacttattagtgatcattacagttggtctattttactacaaatatttttttggagtttaagtattattttattt

SEQ ID NO: 185028 - DNA, 2862 bp, Cannabis indica
tttttttagttttttttttttgcataacgtattagaacgaagtatcaaaagacgtgtagtattaaattttcaaaaaatgatgtagtaaaattcatcaatgccctattttaatcgaaaagtaactacgacggagtttcgtttccatgacaacgttgggtagcgcagtcatcttttcagtcgaatatgtacaccaataagcgaaagacacagcagtatgtcagacagtacaggggtaattacgtcaaatcaattcaattcctaacaaaggcgcggtaaaacaattgtttttaattaataagtaaaatatttcaactgagactcttccaattaatattagttatgcttttactccgaataattaattaattaattaatctatattgttgtaacagaatcaatttcttaacccatattaaagttttgaatattgctaaaagtaggcaccaatggtgcttctgatttttctctaatactttttaacggttacgataatgaagagcgtaagatttaacgactgagatctattattggaaaatcttggtgggcgagttgcaagactcagctgtgttgactcgttaccgagtcgtctgttatacttgtagttggcccaattgtagtacaccttacgggaattggaatctataaactgcccgaaaaatatctgatagttgccctggcgctgacacggtcagcttctctctcattctctctcctccgggcagctgttccaaactcgaatactcatctctttctctctctttctctatatctagagggcctagtgaaacgctacataaatgtgagcctctctttttacgagagagcgaccgaggccaccacctccaacggaggaaaaggtggcgcacgattgagggttgagggcctcgccggagaacggtggtgcagtgaccgagtagaagaagaagagaacgatgggacagggactgagttgcaggccgagtcatgagcatggcctctttaccgccgtacagtttggggacttggacgcagttgagcttattttagagagagacccaactcttttgaaccagaccaccgtctacgatcgccattctgttcttcatattgccgctgccaatggccagatcgaggttcgctctattgtattgcttcttttgccgaatttcatctttctctgcttgtctttctttttttaattatggaaatcgggtttttgtttgtttcctgggaaatcaacgtttttggttgaatcgtcatggtttgactaagtcgacttttgtgtttttcctttttctggttggattttacagattctatctaagcttttggaacgatctgtaaatccagacgtgttaaaccgtcataagcaggtaatttttttttctctttttgaagtaccaaattctcttctaactggaaatgtttcttccttttttttttttggtattcgttcgaaatttctaattggtttatggtttgtgattgtgaatggttcagagtccacttatgctggctgcaatgcatggcaagatctcttgtgtgcaaaaactccttgaagttggagcaaacgtatatgtatacttcttcatcttcttctcctcttctctattgagttattctctaaactatgtgattaatattgtgaatgctttatcagcttttgatgtttgattctctcaacggaagaacctgtttgcattatgttgcatattatggccattcagattgcctccaagcccttatttcttcttctcattccagccctgtcgcaatttcttggttggtctcctttttttccctttcttcttctctgaccgagcattttagtgtctgaatgtgattaacatcatataattgattttcattctaggggttttgctcgatttgtgaatgttagagatggtagaggagcaacaccgttacatttggcagcgcgtcaaagacgccctgaatgtgtacatatattgttagttaatggagctcttgtttgtgcttcaaccggtggatatgggtaatgattcgacatgttttcttcttttttctaaaagatgatttttttcattatatactaaagattttttctttcattacagctgccctggtagcactcctcttcatctggcagctagagggggatctctggattgcatccgggagttgttggcttggggggctgatcgttatcatagagattcatctgggtataattctatcacccaaattccttctaagcttgggaacccctttaaataacaaaaaaacgtcatatagagtttagtgctgtttgctattttttttttttttctttttgcatcttcttactttttctcaatgaatatgtttttattagtctacatgtatctactagtatttatattgagtaatatattagtttttcgaagcttcttgatattttgtcttgtgatcttatatatacgcaggagaatcccatacatggttgctttgaaacacaaacagggagcatgtgcagctttgttgaatccttcatcggcagagcctattgtctggccctcacctttgaagttcatcagtgagctaaatccagaggcaaaattacttctagaacaagcgttgatggaggcaaacagggagagggagaagaacattctcaagggaactgcatatatagctccatctccgttacattctgatgctgggatggatgatactatctctgaggtagtttcagaattcattaagtttttttttttttatatatataacatttgaaacagcataattgttgttttcaactgttcttcaaatgctaatccttgttccttcatttgacttctgaattaaaacatttcccttacgaggaccacaagtcttttaaatgattctttttctgaagcttta

SEQ ID NO: 185029 - DNA, 3904 bp, Cannabis indica
tagtcactagaatcagattcttccgagcttaactcactctcttcttcattgctcatgttagcatactccgatagtgttatagcttcatcccctaggtttgcagagctttcatcatctcggaaaactactttccccaccctatgttcatcgtcccacgactcaagctcccctcctctccaaagaccaccgctaccatcagagactgcccaaacactcgatcccacagctgactgttcccatattgttgggatatactttttcagcgaggataatggaacatcgattcctgtacattacatagactcaaagtcaatacccagttgacttaaaagaacccaaaacaaaataacagaacatcgatggtgaactacttgtctgctattgcacattaagaaaacagtaaaagaaccgaagataattggcaaaaatgtcacggcgaaacactacacaaaacagaaaacacgaaatagaataaagagaatgtgagtggtaatagaccacagcttgtgcctaaatggttctcaaaccgccatttgcgtttatggcaacaaaaaggtagaagagcgaaataaaatgcttgctctctaggagaagcaaacattatcagtacatttcctgaacgctgagccagaaccagaatcatcatttgaatcaaacattgtttaattcatttaatagtcatgctatttcttaaactggacaaccattgctagcaatattccatacccgaacaaaggactctaagcactagtgagctataattacaggttacaaatgattttgttgcagcataccatgtgataagcggcagttgttaccaaaccgacatctttgctgcagaaagaagttgcacatctgcagtttgtttgtgatctaatgttagtttgtggcgcgacaaacactataatttcaactcgacaacttacatcatgaacaaattgaattttcaacaaaatgtcaaccaaccgaaactaattctcattaaattcttctacacttaaacgtgttatgctaatcatcaataagaccttattataccaatatgtacgaaatgagagtcaaatcgttgatatcacatgtagctacctatgtttctcataaatccataaacaagatttgccgaatgagatcactatcaagccaatagatattaaaactaggatagaatttgcggtttaccagcatactttccgaagtggggttgaggaaagaaacctttgctgaagagctagaaccatctaagtcaacaattacaccattataccatcttccattcgtgtaccgaaatctacattttgatccaattttgtagcattggttatcctccaaaggttcaggttgaacctctgttggatcaagaggctcaaccttggcctcattatcagtaggacatgaagttagaagcactgaatcaacttctctaagtaaccttgcacgttttaaatgtagaagactctcctcagcatctttaattgcctgaacaacctcctcacaaacctgtgaaattacaaaaccattcctatcaagtttaagcttaaatttataaaaactataacataacacaaattagaaaagaccataagtagtgaaagagatcaccccaaaataaattatataaataaaatcaaaggtatgatttttcaccaactaaatatgtctacatatcataacttgcaaaagggtagtttttcaataatcaaaagtacccaaattctgagacattttgagtttaagctaaaatttgaaacactttacaccataaaccagaattaatatgattttatttataccaaattagaaaagaccagaattagtgaaagagatcaccccaaaataagtaaataaataaaatcaaaggtatgatttttcaccaactatatatgtctacaaatcataacttgcaaagggtagtttttcaataatcaaaagtacccaagttcggagacattttgagtttaagctcaaatttcaacccaaaactatagataaataaaatcaaaggtatgacctttcaccaactaaatatatcaatatatcataatatttctatagattaaccccaattttcgaattcttgtcctgattagaaaattgaaaaattgattgaggtgagtgggtcaaagaaatggcgtaccgagagaagctcgggattggcaggatcaaaagctagggcatctttaagggcagcgagagagtcacgttgctcatgcaattggagctccaattgggtctccagaaccctctcttcttcgtcgttcgccatggcctcttcttccctccagttcaggatttctgcagcgactcaccaaaaagatcagtcttttaccacttttatttggcggggaagctaatatatgtaaataaactataaataagcttttttttttacttataaccacatttactaaattatatattgttttagcataaactaaattttaatataatattatctaaaaatataatatataatctaatttaatttaatacaatataataaaatatgacgaatttatcgaacaattaagattgttaaattcaaaaaatttcgtccaattttactaataaatgtttggcgtaaataaaagttcaaaagcacgatatgttacatattaaacaggtctaaccctcgagttgggcatgcacctaagacccacctaacttagagccacaaaaaaaaaatctttttaaaaatacaaagtcaaaatatgaatcgttacaaaacaaaacgacttaagattgtgccttgttgatattctacttcatattattgcattagatttgaggtaccataaccaattgttactaatagctcgctcgagtggcctagggtaggttgaagctcaaagacaccaaattttacccctttatcaatctaaagtttttaaagtgtaattagcgaacggttagtatgaattcggtacatgtcaaaaattctccaattccaagttaaagactacaaatttggcaaaaaaaacaagcacaattgctcggaattagaacactctcactagtatatctaaatagtcttgaattagctcaaaatataaaaacaataaaattattaagaatgaattaaatatatgttctatcaaatgcttcaaaatttcattcataatagctatacacaaaaatctaaaatttctttctccacacaggcccaatcctgaacataggctgattaggcctgtgactagacccacttacacagaattccccaaaaatttatctttctaaaattatacattgttttattgattttaaaattattacatttatttcaaaagatcaaatattttttttttcttgatgacctactatattgtaggactaaccctctagccctgtgacctgtctccataactaaatcatcaattagagcttcttcatttattatttgaacatattgtcgtttttctcattctttcatatacataaatatatagtattttattaatatttaaataattaagaaaagaataaaaaaaatataaattttagtaaaatattttaaagaataaaatagaataataaacgtaatttcactaaatcgttttagataccctgagatatgtccatgttcattactcatgtcgaatacttgtgttacaacaaccataggttatgaagttgggtcgaggcgatcacctccggtagaacctaggttaggaaatgggcgtcgtcaagccaccttcccaatttcgaaggactttgttggcttcatgtatgctgaggtacccacaatctcgcctcaataccatattgaaattttacaatgaacaaacgtattatagtggttacatattgaaatttgcctataatcttcttactcaaataatggaatatatttaaacttttatctacttccaacataattacattctcatacacaaacaagatttta

SEQ ID NO: 185030 - DNA, 3185 bp, Cannabis indica
atttatcttaaagcttgtataataatatcaaaatataattaaacttgttattaatgttatctattttaaattaaatatagttgattatttccttttcgggatatttattgccgttatctcactctccttcattcaattcaaatcgatggcaatccaaaggaaaattcggttattttaccgacaaagtcatccgatacttaattggttcttctctatctatctctattacactcatctcaattaaaaaaaaaaaaaaaaaaaacggacaaccatttattttaatttttttttttttttttttttaatgatgtaaaatgaagataaaaaaaagaaaaacaaggatctgccacgtttatcaatcatatataatatacctctataattcaattgagagtgtcacgtggcatattctttgaattataatactatcattattggagatagaacaatgcaatacgagatgccctaatatattcactataatgaaatctaaacctcaaaggccacatttttctgtatggggaaaatagtaaaaattccccttatttatttatttagtaaaatggaaaaacaaagtccaagttgcatattcatataatgtatatagctgtaagtgttaacagttgaaagtatgatccatttgctttcctctatatccaattgttataattcttttttggctataggttatattgtatatacaagaagctttcttctattctcttctagtgtcttatatatattccataaaatttatttagaaggaccaaagctgaaaataaaagattggaatttaattggataaactcttatcttcctccacatcagccatatccaactccaagagcaaagaacctagctcaacaaaatgccaccccagcaaataaaataaatatatatcatatcttttcttcaaaatatactctatttacttcttttgggtttctttcaaaacagtcagattttcccatattaataaaaagaaaaaaaaataatgaagtgattctcttcctactactataactccatattggccaacccatgtcttttattctaagttttcagaatagcaaatgtcaacacctggacaactgaagtgattctcttcctatactactgtctccatagcctctgactttctaattaatagtatttattattattatttggagtattaaaaatattaatttgaagggggggtgtgtgtggcctttccttaacttggaatataataaatatcatatcatgtatgagtagttttttttttaggatataaagttcaaatcttcacttgttcctcttgtcttgctaattgaataaatattagtgctaattgatgctttgcaacctataccgaaagttgtgtttggctcctaaaaattaatttattaaaagaaaaaacaacattattccaactcttctaaaatcaaatagacacattcccagaaagaaagaaattttttaaaactaaaaggaagattttgaatgatatcactaattagaagaacaggggattagttgatgctgagaatttgcaacttgtgttcttatgactcaaaagggtcaccatcaagcaaatcatcagggtggggaagcatttttcttatccaaacaaatatctaaagtgacattctctttcttatccattatatgttattttattgtattaatttttatataatatacacaaaaaaaaatatatttcttttttctttattttttcaaatcaatatttttctcttattcttaattaaacaatgaaatctaaccaacctttccagccccttataaatagagtgatgcaacacagaatcaaccagaaccaaagcctcaaagcctaatcatcactacacacatatacaaaagaccttgttttggttacatatcatctatacatacatatctctcctttatttatatagtaagtactgttatattaaatctatacacaaacacacacactaaaagaagaagaaaaaacacaagagttttaggtgaaatatggacaaagtaagagacttggcatcacaaagagctgctgtgatcttcaccaggagctcatgttacatgtgtcacacagtgaaggcactcttctatgagctcggggctagcccggcgatccatgagctcgatcgcaatgccaatgggaaggagatggagtgggctctgcgtgaacagatggggtgtaaccctgctgtcccagctgtgtttataggaggaaagtttgttgggtcagctaaagatattatatctctccatgttgatggctctctcaaacaaatgctcattgatgctagagccatctggttttagctagttaacaaaattatgtacttataaggaaaccaaagaaaacaaaaaagattactaagttaatcttatatatatatgcttaatagttaattatataatgagggctgtgttttttggctcaattatctggtgactgtatttgaaatgaagccagactacatatagtatgtgatgaaaaaaaaaacatacatatacaaaaaatgtagccttctgttttctgagatgagagtctcaacatggaaatatatagtttttctttttgttataatctttttaagagttttatgaaataagctagttatgtataactttttcatggcaactcattaaggcatgcacaatgctaaaaggtaaaagacatgtcaactaatttactaaaataagttacctgcattgaactatatagaatttcatgataagagagaattctcttatggggtatttttttttttctctctttcatttgagagtaatagaaaaagattgtttgttcctatacaaagccttaaccacaaaaagaataaagaaccccatgaagctttggtgctttagttttttaatcagtgaacagaaatgttccaaacatgaaaacttatcctatccaccaccttattgaaacaggtcactatttgtatgaattgacattcacatgagtctgaggaactatccctttaccactaacaaagtggtataaagtgttcatagcataatgtgcattgatactgccttttagttttaaaattttgagttttatttttttctcttctatagggggatcaatggcaagaatccaacccacacctatgaatcacttattaacttaaatagtttcatttttctttctttttttttttacaaattaaaaacccaaa

SEQ ID NO: 185031 - DNA, 1932 bp, Cannabis indica
aaaataatctaacttaatttactctatgagatcatgatggtcacacaatgtaaatttatagtcgttttgcgatcaaataattatttgtagtggcacaaagtaatttatgatcatttccaaaatcatataaatttattttgctaataaatttttttataaaattattttgccaataatatttttataaatgctatttttacaaaattgtgaaaagcaaaggggtagtagagtatttttggtaaatatcatctgacgcattttcaagctgtatagcttatttacggattgtgccatttgccccttcttgtaagagtaatccgattacgacggccctttactccttttcttttcagttcagttcagttcttctctgcaaccaaatccaatccaaatctacaccctccaatgttaaatccctcccaaaatcctaatcttctccgacccgatccatccttcgccccatttcttttccagaccatctgatccaatatcactcccatggcgctcgtctggtacttacctttcccctaattaaacctcctctcctagactttttctttgttttttcatggtacagttttgttgagtttctgattttattttctttggtacagatttggaggtgaattttgtgaggctgtagagaagtttctgattgaacaggcatgaagagagaattggctcgtgtattggaagccaagtctgagctcgccgaatcgctacttggtgggactcgggcttcatctgcttctgtgtctgagtcacagacgagttctggtgtggaaggttctgagaattttagcaataagagatttaaaggctgtattgtgaatggcgtaattgtgtatacccgagctaggaagtctcggaacaacaatgcgcgtgtagatgagcatgttgagcggcttaagccacctcctagtgttgatgcgtgtatacaaagtgagttggttgaagttttagtggaagatgatactattggtagttcggcaattcgtccggttaagcatgagtcgacgagtgagcttcattcctctctggcagcccctttccccttggaaggtggtgctgtggaggttccagtactaatggttgagaagaatttggcgcaagaggcactacggcggtttactcgctcggcattcaaaccaaagtttgaaacagtagaggtaaagactttagtgaatgaacgtgaggctgtgggaaatgaattgatgttgactttaaatggggaagattcatcggcgggagttagcacatcagctagtacgatgaataagttagaattaaagatgtcgaagaagattgcgcttaacaagaagcctaccacggttaaggaactttttgatactggtttggttgatggggtccctgtggtttacatgggtggaaagaaggttcatttttgatacccatttaaatgtttttcattttctgcttcagaataacttagtggtattactattaatttcaggcatctggtcttagaggcataatcaatgatggtgggatattgtgttcatgtaccttatgcaaaggatgcagagtgagaattgcttgttaatctaattttttactcgcatattaagtggttgtggtttcgcaaatgactaagggggcttaatcattggtttctctcctttttgtttttaatgtaaggtaattccgccatcccagtttgaaattcacgcctgtagacagtacagacgagctgcacagtatatctgcctcgaaaatgggaggagcctccttgatctgttgaaagcatgcaggggggcacctctgcatacattggaggcaacagttcagagtttcataagctcttcacctgaagaaaagtacttcacttgtgaaaaatgcagaggttagtgttatgcttgtcttttttttttttgatgaatgacagtgtcctgcatgcaaacagagcagtta

SEQ ID NO: 185032 - DNA, 1038 bp, Cannabis indica
ttttttttttttttagagtaaaatcaaagctattaaattgttttgtatttttccaattttttttaataagattaactttaactaatataatgaatatatattattatttatttgggtaacgttttaaataacatatataattcaagattcttgtagtaaagaattccacaaaattattttgaaatagaaaaacattaaattaaaaaaaaaataaaaaagccagaaatcactgtctttccccaccgcctcatgacctcccaatttatataaatataaatataaaatacatatatatatatatatcatatatttaatttattttcagataaaaagggcaaagaaagaaaacaaattgtgaagagagatacaggaatttcgataaactggtttggtcttcctcttcccccaatcatttcacccgactctgtttcctctcatttcttgcttctttatctctctctcaccgtcaccggaccttgcttggatcagaggcggagaggttctgctcatcttaaacgattaacttaaggactcaaaccacaccatggttgaaactaggcggagctcttctaccaaacgatccctttcttcttctcctcctcctaaccccaaacgatccaaggtaattgtgttttctttcgttcttgttctggtctgtgcaggtttctttgtggttctcttttttgtgtttgtgaatttttgggattttgcatgtgggtttctgattgttaatcgatatttgtttctaaaccctaggctgcggaggcttcttcgtctaccaatgaggttcaggtttcggaaccggctgagctgttagctccggttaaagaagctgtttctgaatcagcaggtttggagcttcgttcttctgatctggcgactcctgatcctttgaagactgaaagcgcttttgatgaggccttgcccgagaagtctgctgagattggtgctgatggtctggctttggtttcgccgcaatctttaggtgcgatcttttgtacataaactgttcttgcagctacgaagttattggatttt

SEQ ID NO: 185033 - DNA, 2897 bp, Cannabis indica
acaatttgaattacatttatttttaattatttatacatacatctaagagagaaaactcattcttgatgagaaaaccacaattttgatcagatcagctaagatacacccccttaaggggagaaggattacaatatcccaagtttgggaagaaaagaaaaataaaaataataaacaaatataatataattaaaaatacataaatctttctctggttgtttaacctaatagtagtaataataacttgttcctcctctgcccagaatttgtgggcattttcctccttacatctaactgaatatttataataataataagtttccaaataatgaatgaccagtaagtttatgaaaaagattaatttggtgaggagaagcatagagaagcaagtacttaataataatcatgccaccatttgctcctgctctatgtacagctgctccacccatggtgggagaacttcacgatcccctttgttgagattatagtgtccagacctgtcagatgatacatccttaacaagggaattgacccaagacacatctggttcatcaatggttgatggcctcaaggatgctgctgaggcaattccaccattgttgtttctgaacccgaaagaagcagactttctcagcttgtttaactcatctccttgaactgcccaatccagtttcccattgggtgagctccaatcggataaactggatgaagacatcatcgatgatgccgagttggcagccgctgtgtagcccaggtgcgtggcagcaccgcggtctacaaagctctggctccgcttggcaaaggcagaagacctcgagttcataactgctgcagccatggaaccagctgagtcaaacccaaaagttgtgggctttctcacgggagaggatgacatgttcatgttgttggttgggtagcttccacgaagttggttcatgttattttggcgaatctgatgcccagttggagattgcaactgggtttgtgttgaggattttaatgaaaatccctgcatttgagacaatacagaaggatcaagggatccaaataaatcgtcaaggttagtttgttttgagtatgatggagaggagagacgagatatctcatccaataaaaactgttgctgttggtgctgctgttggttggcgtgactttccatcccaagcaactccatctccaaacccaaatctctagcacacaaagcagtctttaatcggctaccagggagctgaagagcaggtggggtgttgtggttagctttgttctgccacaacccaccattcttgggtgatgaagagtttgccaatggagacattggcggtgttgaagttgcgggtaatggcatagacgatggaccaagagctaaaggactcaaagtagccatgtcagaggcgctgactccaagagaccttggtgaaggcatggctgagcctgtggaggcataaactgggcgcaattcgtcatgtttgtgagcaaagaagcagacttttcttgtgcagccagtctcatccttgcaaagccgagttctgtactgagctggatgaagccatgactcgaaaactccatgagcgtattcacaagagtctcccttctggcaagaccctttcctgaactcagggcaaggaacacagctgtaagggtatttcctggggtccctcctcctggcgttctccccgggatgaacaaatggacactcagtccaatcatgagagtaggcccttgaacaaggcttaatcttgaaactatacatcctgaaatcgtctgaaccgtacatcccattgtttatgtctggtaaagatacatcaatggggtattctttcttctcacctccgtcccttgaggacaaaggacttccaaccctaaattggtcctcctcatcttctgtaacagagttagtctcccctctaagcaacatctccattgccttcctcctcgaactgcagggccacttaaagccttggccaagcaaatcaatagccttgtttccataagcgttgaccaagtcaacatcagcggaggcttcaagcaagagcttcacagcctcaagtgaagaactcgaggctccggacgtagcacagtgaagggctgtgactttgtccgaaccacaaaccctgttgacatcgaccatgccggagtcgattatgtactttaaaaacctttgtgcttccaaacatggcggctatcataagaggagttctctcttcaaatcccatctttttggacccaattcttctgccgtaccagaaacccgtctggtcaacgttgatacccttttcttcgattgtacttctgaaggcctcgagatcgtccgaggcggacaattcgagcataacagagcacttactgaaaaccccattattctctttgggaaactcgctctccatgataacctctgaagggttattattaactttattctttgaaccactgcacatacccaaaagtctcctgcaaaaatttgaagcaaaaaataaaagggtcagaaattttatccatagctcaataaaatcttgtgaaacgacatggccaaattaaggaagaacaaaattaattgtaaccaaaaaaaggatataattattatttgaatctagatttagcctattttctttaaccccgaaaaagattgtttcaaatattactataatttaacaattaatcccaccaaccaagaggcataacaagcatagtttaacccaaaatactaaaaaaaacagacaccaaatttttggataaatgaaaaaaaaacaaaaaaaataaaaaccagatttaagggtctaaatttagaagagtaagaaattcggtttagtactgtacctttagaatagttattgttgggaaggagagtggtattttcgggtttatcttcgtttttgttattctttttaaagagcaaaaaatat

SEQ ID NO: 185034 - DNA, 2132 bp, Cannabis indica
aattattttctttttgttttttttctttcttagtacttcttttttggtattcagcttcatgttctatttggtgtttctaaatgatcaaactaatatttatataaacatgtatgtcaaccttacagtgtagttttttgacattacattaggttattgtagagattttaattttacaattaaaaatagtgtaatctcttcttgatgaattgtaatagtagtgaaggggcaagagttcatgttatacacgagccattgttattaatgtccttgaagtcttaaactgtgaacatatgtgatttcaagtgaatataggaatttttttattagtgtaaaacaaagactattatattacaaataatgtaccaaaaacataatattccaaaaacataatattcatatcattaaattattgaatgtaatttacttaaaaatatataaaagtatattatatcatataatgtattaaaagaggtcactaagtcattaataatatttataatgtgtaaaatagatatgatactgaaaaaagatagagttgttcatcaaactgctcacactacggtactacaacgtctaaaaaatgcaatttgaaatctttttgcattgcgcttacagtttatgtttttgtcataccacgcggtgtagtgcggtttgcaattttaaatttaataattgtggttcaaatcgcaccacattacatattacaaaaatactaatttttttattttaatttttctttttatatatgagtaactcatatgccaagccatacaattaaatttaaggaacatctatataagttattctcattttttttttaacttcttattgttcaaatattattattaataatatgtataatatgtataatatataatatatatatatatacatattatataattttttagagacaattcaatacaataatttgattagcatatatattatgacattaaaagtttgattagataattttttttgtttaatggttgaaactttattagactatttttttttttttggtgcaatgcagattttgtggatttaaggtcttgcagtgcagttgcgatttgagaaattacaaaaaccgcatatgcggatcggtttgaaaaatagtctaaatctgcactacccgcaccgcgaactctcctaaaaaagattatagcatttaaagatgctttcaaaaaaaaattatcactaaacaaagattcatggaagaggattatagaatcaagcaaggctatcaacttctacgtttagagtaggggaagagtgtgttggagtaaagaggtacagggaagatttaatattccacaacatagttttatactttggttggttgttgagaattggatgaaaacaaagatagattgcgtaattataatattatccttgattctgcttgtttcaagtgtggagagcttgtagaaatagtacaccatctgtttcttgaatgtgttatcagcatgaggtgtcttcaactcgtaaaatttggttgggttggcatgcggaagtcattacacttcaccagctgatcaggtagatttcttgagcaaaaaatgagtaaagtccgaagagtgactcacacgcaatcttccttccgaaaggtatctaacttataatttttcctcccgaagagtgactcacttgcaatcttcctcttgaagagtggctgacttgcacttttcctcccgtaaagtgattcacgaagaagacttctctcgaagcttgatgaacaatatccaagatgttcaacctacacaatttcaacaagaaacaatacaaaataacacaataataaaatactaagaacttgttagactcaagttcttcacacaacaaagaaaatactctctaactttgaaagtaatttaggaaatgatacatcaagagagctaacccataccagcgacctaagagtgtatttatacactagaaatcctctatgtcgtggtcaaacaactaagaaacaattaggtcaataaatgaaaaatcttcccaaacaggaaagttaaaatttgtttaaatagacactcaattcgttcaaacaattaaattgaacctagacagttttcagcaaagtttccataaataaataaggcaactttgacaacctttacacacacagt

SEQ ID NO: 185035 - DNA, 2156 bp, Cannabis indica
taggaatgataatttataattagcataacttttttacttttagtaattttatgtgactaaaagtaaaaaaaaattatagtgtctctccacttactgataattatattttaattttggtaattggattgaaatatatgtatactagctagtaaaattattagaaaaaacaacaatgttctatattttattcttaatatgatgtaatatatactacttcttcaataataataataataataataataagagtaatttgcgacataaacatttaagttttatttctccgttgtgaataaacttaaatttaattttttgcggtaataatacttaaattatatttttagaattttgtaagtacatgatgactaataaattttaagtcattatattcacgtatcatttttttattagtatattcaaactattttttaaaaaaataaaaaatttaaagacctaaactgatcaaggattatcacggaataatttacttaacatgcacttaacaattaggtacctacagaagtttcagaattataacttagttattattatcgctaaatttaaacttataagtatatatttatttacaaccgaaatttaaaagtatttataccgtaaattagccttaataataatctgttcaaaataataataatattaacaacatttctatagaagtttaaaaaaaaaataagagaagagaatattaacaaactaattgataaaaacaatattatacttcataatcgatgatcgagtaaatttacaatttattcaacactaaattacatgaaacctatcaatattaattataataaactgatacaaataaatttctataaaataaaaaaaaaaaaaaaaatgaatgaaattgtacaacaaattgacttttgttacatatgtacggatcaatcttgaaatagatcaatctcacaatcttcaacatatatattgtgttagcactatttattataacactaatatacaacacatgtgtaatgttacattaatttcttcaatcacttatatatatatatacaacaaattaattaattaattaattaatattcaattatataaataaacaaaagaattattaattattaatactactctacatgacttgactagtactatcatcgaattttctgggaagtactgatcagttaatatatatttatattaattaatatatattatatagaagtcaactgtatctatatattatatatatttatatatatattatattagtatatttcatctccttctacttcaattaaattttcaatgacagcatctgtagctgtttgtaaaaactccgaccaatccctgaaattattagagaaatttgataattaaaacttaattaattaataataattaaaaatgttattaactataattaattcatttatttgcttacccattaatggtgtcaaaagtaagaccaacggtgaatttagcttcttcaagtgctttctcatacctttcgagctcagatttcgaataattcccattagggtttttcgaaaccctaagctcggaaggcttaacatcacaaaagacgggaataactctcttttttgtctccattaaaagagataattcatggagacagaaaggagagtcacaatatctaggcgaaaacacggccacaccaatcttacaactgcgaattcccgcattgattttgtcatacaaactgtccccgggcttcatgctcttgctatcgagaaatgggctaaaccctaacccagacagatggtagtggaggagccccgccgcagtttttttgtgtcaatgccacggtggtttatgaaaatgtcgcacggtggttgtagtggcggtgatgatgacgaccgaggcaccatcaccggggatgatgatgaccggctaattagcttgtttcggttagccacaaaagtactattcttggctagggcatgcaccgcacgctgcatggctatataaattattttgtttgatatgttatttgttatatggtattaaaaaaagaaagaataaagaaattattttcttgtttttgtgttgtgttatatatttttttagtgagagagagagagagagagagagagagagagagagagtagttgtgtactttgtttttcgttttaggtttaagttatacgtaa

SEQ ID NO: 185036 - DNA, 6731 bp, Cannabis indica
tttttttttttgttattttcatacaaagctggaaggaattaaaatcttctcattttttgtgcattttctaaaaagttctaatcaacttttttatatcctttagtgggattggcctttcttaaataaagtagcatatttatagcctttagtttagcgtctgagacttccagtgttctaaaatatgtatgaaacttcattagtcagttccaatgcttttttagaactggttgtatgaggatttgaatgaacatgcccttaaggtactcaataaattagtcattgtttaaatattaatctgagttctgagattaaaattcacatccaggtggtgccatgatatcggtcgggagcatgctgcaaacaaacctttacttaaaacagttttccaggtatttgacattgtgctttcgctgcatgtttttttacggagcaaagatgtattaacaaaatatgatatagatcatctgagttaacataaaatactggcattacatactgtatcttgcctcatataaacaaaactaacaaatacattgcacaaccatgacatcttacagccacagctgctaatcgcacagaagcatagaaaaggataagttatttaatcttccccatatgaaacccacattctcattgtagtgctttcgctgtatgttactagttaccacacaattacgccgacaatttgttgtactattatagttttaatctgtgataggtcatgatgcgattatttagcccccgcaaaacgacactgctatttgttatacgtgacaaaacaaaggtgtgtttttcttttgttttatatatcttatataatatctactgtgaaattgagggtatattttggtccaatattagttaacctctttctggtttaatattttttgggtatagactccacttgaacgattggagcctgttttaagggaagatatccaaaaggtaattttatcttttgtttgcgatgactattctctcctgtgttccaattctctggtctctttcttctgcatttctcatggaccaatttgtgtagatatgggactctgttcgcaagcctcaggcccataaagatacgcctcttagcgagttttttaatgtaagttctcactctgattggtgatattggtttccctgacacgtgataagcttgatgcacatctcctacgaatattcttttccatttacttgcaggtagaagtagttgctttgtctagctatgaagagaaggaggagaaatttaaagaggaggtaattccaagaattataagtgctttattaggtcgtggaacttgtatagattagttatctgattacatgtttgtgacagtcttggaggctgaataaacttttgttcatttttttttatctaaggctgtttgggctattctttttgcacaatgggtatatttggcagttatcatctttgtgaatttgttatgtcaaggaatctttgtttctttggttttcttgtctaagggtgttcttttgaactcttgcataatcagactttgttctttgttcttcgttcttctagttctttctattctttgatcaataactgtaattcacattttttccctatctaatttaatttagaaagctattgtctattaaagataatgtaatgtattttcttacctttatttttcctcttggaaagctcaatacgtgtaatgtttgtctgacaaaggccttattgattttcctagttgtatgttgtgggaattatgatggtgagaatgtaaaatcacttcttttttggtactattgaatgagacctggataatattctggattttttcttttttagtgtggaaagagtagaaaagtgttgttgggcttgtgctatgtttttttttttctcttccttggcaatttttcaataggttacgctggaggagttaattttatagggtttttttttagtaaatttcttataggagattaaaagtacttgccaagagattaatattgatgtcagtttcaatctctaaagtacacttttgaatgcttaatttatttgggccaaagtaataggtggtagggttcatcactaccaccatgcattattcttattattaataaacttctgtcatctaaaattcttaagctcacttatagaatatgttgtatgaagctgagtatgtcccactgaagaatttatgtatgttgatgtttatgaagaaagttggcttcaacagaaatgtttcattattttatattaacttccacctttttatggtgatattgaccactattcattgtatacaggttgctcaactgaggcagcgcttttttaattctgtctcaccaggagggctagctggtgatagacgtggtgttgtccctgccacaggcttctcttttagtgcacagcatatatggaaagttattaaagaaaataaggacctcgatcttccagctcacaaggttcttttatctctattcgtactcaatttcaaataaactagaactttaatatgcatgccatattccattcagagataatatttatatattttataggttatggttgccactgttcgttgtgaagagatcgccaatgaaaagttcaggcaattgacctcggatgaggtattcatttatgaatattcactctcttaaacacttgccatatgattgagataattgttcaataattcagtggacatttttgtagggttggttggcattggaagaagcagtacaaacaggtactgtaccaggttttgggaagaagctatcctcaatattggaaacctatctctctgcgtaagtcctttccactctcttcatattgttttatgtattttccacattctgaacacggaaagaacttagtgtgcctacacatgctaaatgcattgccttttcctttcccacagatatgacatcgaggtaaactactttgatgaaggtgtcagaaatgctaaacgccaacaattagagtccaaagcattggaggtaggaatgtatatttgttgcagtgatcactaatttttttagtcattcaaaatctctagaggttaattgttctggaaaattatgttaacatgccctccaaaaagaaattgaatggggaaaataaaaaaggaggaaagagatctttacatgggcaggaaataaaaagttcctattagcattgattattctcaaaagtttatttaatttaaacaagaatggtgatatgtttaagaagttcatgaattccgttctcaaaagtttatataatttaaataagaatggtgatatgtttaagttcatgaatcccatttaaagatgaaattggcataaaaagattgacagtggatatacttgtttcattaaatgcttaaagatgagattggcataaatagattgacagtggatatacttgtttcattaaatgctcctatttgtcctaactacaattctctcatggtattttcagttcctataccctgcatatgcaaccatgttaggaaacctacgctccaaagcacttgaagattttaaaactaagctggggcatttattgaccaaaggagaagcatttgcgtcttctgttcatgcatgtgctgagtcttgcttgattgagtttgaccaagggtgtgcaggtaatgtcagaaaagatattgattttggcaatcatgtcattgtcatcagaggaactgcacatgtactttgactttcttgcgatcacgctttttgcgcctttccactgttcagtagtttcggaccattggtatatttgtgcagataaaccatgttagaaactcatatattgtcttaatggtatctactataatttatcatcaatgcacttagtagttataggtatttgacatgatgtttttcatagaattttctttgagtagaaatattctatcagcagtcaagatacaaataatgaaatccttcaaagaaatgtttattaatttgctgaaacagtacaaaatcaagcattcgagaggcttgtctctcctattccaatctttcaagaggaccggtctctccgcaagaatctactcttatctaattccattcccagctgcccttacaaaaagaccccttccctatttatagacaatagttagaattttttaatgccaactaggatccactaagaagaggacaaggcagccccgaacttaacaaaaactgccagcaagataaaaagaataaaataacaaaaagactacaaaaacacaaagtactatatttacttgggcagtctcctattatatataaaatgtataggaggcttatcagttttgtgatatgttgttgttattattattattattatttttgtaagtgtatggatataatttcttcataatttatattatactggattgattcttgatgtttacaatctatttttgctactgtattagctcattgtaaatttatatatcacatttttgccttaatttattagcctatcctccttgcagaggctgccatacaacaagctgattgggatgcttcaaaaattagggaaaaacttatacgggatattgatgctcatgcatcatctgtttgcagtgaaaaattgtcagaattaattgccaactatgaggtattactctcctcggcgtacaaaatactaagattatggcttactgatatattgtttgtaaatgcctaattgccgatacaacttttcatgcagaaaaaactttcagctgccttaagtgaacctatagactccctatttgaagcaggtgggaagaatacctgggcatcaatacgaagactgcttaaacaagagactgaagttgcagtatcagagttctcttctgacatcactggttttgagctggacgaggaaacaattagaaccatgttgcaaaatttgagagattatgcaagaaatttggttgagaaaaaagcaagggaagaagcaggaaaagttttgattcggatgaaagacaggtaaaaaatctttcaaatgtttatacttttcttttcttgcaaaattttggttatctatttgctggaaaacattttttcaggttctcaacggtcttcaatcatgacaatgattcaatgccaagggtctggactggtaatgaagatattaaagctatcactaaggaagcacgttctgcggtaaatttacttatatttgaataaagtttcatcatatacatgctgctttgtctaaaacgtttgattgtcttttgttcataatttctttcagtctctgaagcttttatcagttatggcggctattcgcttagatgagaagccagataagattgaaaatatactctttttatcactcatggatggagctgttactgtttcttcgtcaagaagtagggagataggaaatccgacagattctcttgcctcaagcacttgggaggaggtactgttcggcggccatttttggattttctatatgaactctaatttgttcttatttgttgtaaattattattcaaattaggttcctcccaaggacacacttattacaccagtacagtgcaagtcattatggagacagttcatgagtgagactgagtactctgtgacgcaagctatgtcggcacaggtgaagctttgaaatattcccatcttaaaatatcattaaagtgtaattcactttagtaatttatggtagagatatattgttgtgataatgggatccttgtgcttgattaatagaaatgtttgaactgaaacgaagagtttctaattgagttcacaaaagtcatgtaattctgttttgacttgcatagggttttggcacattactgccaacttttaaatcactaccgccaaaagggaaattgtgcatataggttttcgtttttttcccctctggttgaaaacaaataaaatattttagattctcaatataggaatttttcaattagtatctaattcaaagtgattgacccacatcaatgggacatctgtttaatatgctgtgtgacaatttgttttttagacaaaattctcagtgccagattgtatctgatgttcaaattctgatatcttttgtgttggacagattttaattttcagccttcacgtcatttatttcagtttccttggcatttgtttgttagagaaggtcactcataatttttctgtcatatgaccgtgttcttcttttattacaggaagcgcacaaacggagcaacaactggttgcctcctccgtgggcaattgcggcaatggttattcttggatttaatgagtttatgcttcttttaaagtaactatggccactcagacttagctactgatcctatttccgaaatttacattttcaccattgttatttttttttgttgttgactttaatttgttgaatgatacaggaatcctctatacctcatgattttgtttgttgcatatttactttcgaaagccttgtgggtacagatggacatttctggacagtttcgtcatggcgctgtgagtgttaatacaattgttttgcttttctgtctcccattgtgaatgtttataggggagtcaaatgttatatttgtgcctgctagattgaatgtgcaatagttttgcgaaagaacttatccatctgtatatatcaagcatctaattgacatttcggattcacttcactgtactgcctcctggcatagatttaacaacaaaaataagttggggaaagttaataacgttaataccatgttgtcttgctttctggaattttatcacggaaggaaaaaatgctcaatatcacaagtgtgattaccttaata

SEQ ID NO: 185037 - DNA, 5137 bp, Cannabis indica
aaaaaaaatctaaattacaagtacacacctaaagaattctctcttttgttatgattcatataacttcatgaatattttttaagtaaaaatataacaacttttatgtatagctatatagttacatattatgtgtaaatatttatctaccaaacttagtaattgtccaccaaactcagtaattgtccaccaaacccattatattattgtactactcctatgtaacttttatttaatatgtttagacccaacacctaattattattggacagttcttaggtggagagacaatgaaaaataaatgatcattattttttaggaatttttacaaatttataagagctctagagacatttagtatggttctcactagatcacttaaattattttgtcgctctatcattggtccaattcatattttttttttttggaaaacatttacattatacaaatattttttttagttttcaaaaagcacaagatgggattggttaatattttttaaaagtgatttttagatttcttttttctttacataaacaaaatacttcaataacacaccttgacacaaacctaaacccaacctcgaacccaattcgggctcaaaccctagacctaggcacgaaccccaaacccaactcaaacccctcagcctcggcctcggcctcaaacttgaacccctaacttcgaataaaaaaaaaacgatatgaaactctgcgaggcagaaagtaaaaatgatgataaaaaaaccaatgagaaaaaataatgtgagaaacaattgtttttgaatagaaaacaatatttgtttttttacaaaattttgtttgttatgatgtcaaacaacataattcaaacatatatacatgaacaatttatttatcttttcagaactttgttcacatttttacatagatttttattgtattatatatgtacatataagacaatattgacaatgccatgtaactaattaactaacttatcacaaagtctcattgttcagccttacaatcaatggatgtcatttctctcatcaccatcttttccttctctcttaaaatgtgatctcaatccaatccaacactggtaataatcatgatccatgaatggagactctagcgcccacgagcacactcgcgggattaaacacgattcaaacatgaatgccatggtgtccttgattctgaacggacctgcctcgtttccccgagcaatggtagcctgttcatgacagcagattcccagttgagcacttaatctgagttgatcatttctaatgtgtttctaacttgttatatttcggtatccatgtccatgggtgttcaggtcagcttgcataccccttgacttaatcccatggaccagtggtatatcgatgcaggagtcctgcccgagtggcctcaaattttgagggtatggggaatcaaacttgggacaaccccaacaacatgcttttactcttactctttcggtttagggttatggattataacaaaacaccccttttcgggaaactagcgctataacacctttcttcataattatttccaaattaataactcaatcattcattattatgaaagaacacaaagtaaacaaaagaagcagtttcatgcattgttttttagtgtcatatagcattggagaaaaaccttgcataccaagtcaaattaaaagaaagatagcattgggaatgttacctcgtaagttttggtatccggaccatgaggtgtcatacagctatggaggcttgaaccacccgggagaaatccatcagcttttgcctgaaagaaaaacaagaattcgatttcattccatttccttcctaaaaagaaagtcattatttcgatcaaataatagttcttcatttcactttattttctcgcttgtgcatgagaaaactctttgatttgtttgccaaaaccgcacaaacacagcaccgggaatccataacgctttgatttattttactttctcgaaaagggtctaacttttccttctactaaccccatttcgactcaaaatcataagaaacgtgtagaagttcatatctgattttggaaaaagtttacctcatatccaccatgaataaggcccataaattcactcatgcagttgcgatgataatatggaggtcgaaatgtgtgttctgcaaccaaccatcgaggagggaaaatggcaaaatcaagcaaagcaacacccggtttgtcggttggtgctgtcaatactgaaccataaaattacacaatcagtgaaagctgaactgaatttgtattacaaactacgaaaatatgttattgtaaagcattctgtatacctgtgtttatagacggatcgctgtgatcaaataaaacggtattgtaagggcagaacttacttagatcatactgcaaatacaagcaaacaagataacattcagtatcgtaatcaacttaaaccgaaaatgcatatgaaacaagcgataagatagagttttgaaacataccttatatggaacataattcccatgccaggcaactacattaaagggagaaaaatcttgtttcgccgtgaaaagctcaccgccaaatttttgtacaattgtgtagcctggacggtgactttcgtcaaaccatgcagtgggagcaaggaaatcccttggggcagcaagaccattagctcctgcaatatcaaagttattagtttccttcacttattaacttattacagatgatagtccattggtctacaaatttggaataagaacaatgaaacttaggtacctattggtccaagatcaggaagttgaaaatgggtaccaaagatctcagctacataaccacgagatggaccgtcgggaagatcaacagaaaaacgaaacccttgtggtaaaactgcaatttcgccaggagaaacttgcaacctgccacattctgtagtgatccatagccctacaaagcaaaagaataaatgaatataccaggaaaattctctgctgaatttgcaaaagattgttcagcttcatggctcctttagtgagattatacgaataaatgccagaaccaaactatgttattgctatgtaagcttgtacaataacaggagggatgttcagtaccgattcgtatagtactgttcggagggttgataagctaattcatgtatatgtctatttgaaatattctcattataaactgagtgaggctagtgtttttacaagaaatctctagccaacgggcttcttaattttcagaaattagtgacttcaacagtcttcggtgattattatacaaattataagattaagaataccctgttgaatttgatcatcatctaaagctaagaaaaaatcaaggagagactagttcagttcggcaaacaagtgatgtccttaaattgagaccagaaaccgaattgctgaaacaaatttcaaatcctaaagctactcagatcacaacagtgactcacttcctttttgtggaacaactaagaagtcgccatcagcactacaaaaggcagaattttccattgatttattggcagtatacctacaaacagtaacaggataatatctgttatcgaaaaccacataaagcctttgagtattttgcaatgaagaacatttgaaaaagaaaaagcttcatctctatctcaacaattaaactactcacattatcatatctcctaaacaacatttttgagcagtatttcaattaaattttgaattaaaaagagtccattttgaacatgggcattattttaatccaaaatccaactacttttgtttaaaaaatgggacccaacaaaacagaacacagaatataacatagtaagcaaatcatcatacaatttgataaatgatcaatagtaagatagataaacctttttcaaaaacatttcaacaagaagcatataatttttaatttttatcccctgaactttacatatactaaattgtaccctcgaacagttaccaagtcaaggttcaagagcatgatttggtacatttccaaattcgtgaccacaatttagtacatactaaagttcgagggaacaatttagtacacggacaattaccgaattagtaaaattgaataaaattacacagaaatcctcgaatccaacaatcttaagagttcggaggaattttcaacggtctaaaaagttcaaggatgaaatagtacatgtcatagttcagattctaataggcctaaaactattcaccctatcatatctcctaaacaacaattcaatagtattttcacataaatttgaactaaaaagagtacattttgaacagaacagaatataaaagagtaaagcaaatgatcatacatgtggatagcaaaaccatggcgaagaaaagagcttccagcaccacaaacagtgaacaacccatcaatgaaatcagttggagaagaaggaatatcaattggcttccatctcaactgtgtaggagtagcagagctattacactgattaaactcactcaacagaaaactcttacccttaacccgaggtttaaagggttcatgggtaaccgaaggtttgatccgataaagccaactaaaatcaaaaaacaaaacaccccaaatcgaagaatgaacgaatcagaagaagaaaacgaaaaagattcgatttttattatgaaattgaattgggtatttatttatatatgtgtacatacctgcggagattaagatttcgaggagaagtgaaagatgtaccggaaatttgttcggcgtaaagggaattaggacagagaagtgggctgttctgagtcgccggaagtgagcccggaagagcttccgatgagaaggtgttgccgtagccggactggtatgacaagtcatccatttttgattgggttctttgttctattgttcttacatatgaaaaagaaagagattaaaatggattattatatatataatgatgggttggttgagtaattaatgtatttggatttggattaaatttggattagattaagattagatgattttgtcgtgtgaggaagaatccagcttagtcgggaaaaatgtacacggcaactcgattacccgattttttcgcatgttttttttttttttggctttggttctttttatagtttctatgttttatgttcagttaagtttttttggtttttatttttttt

SEQ ID NO: 185038 - DNA, 1763 bp, Cannabis indica
tacattgggacccaaaaacattattatttaaggaatacaaacacaattcacaatcataataataaacatatcaaatatcaaaataccatttatgatgatgaaacaaaccttcttcatctcccatggctcacccactctttccatcgacgaaactcttccagccaggcactttctccagtcatggaaggaaaccatcttccccaccatacccacctccattttagtcatatcagctcactgggaaacctctgttcccaccctcaattttctcaacaaccgtcctaatgacaccatctatgatttctatggcttccctcaatcaatgtacgaggtcagtaaagtttgcttttttatgcttttttgggctgaaaaccaacctgggttgcctcaaatttcaatctttgatctgattttcctgactttatttattgggggttgaatgaatttgagatttaaggtgattgctccaaatgactattattcataaatttaattatatataattatctatttgctctgtccaactatatgtgctttaggggttgaatgaattgagattgaagatttgagcatttatagatttgtttttatggttttgacttttgaaaatatgttcccaaatgactattcataatatttttggctgtgaattgatcactttgttcattctttgatgttctgtcaatatcataaaatggattttgggtttttgaatttattgtctttgaacttttctttctcatgtttttattaacttttaattagcagatacctcaatttcaactctcaactacatttaaaagggtccctattacttcccttatacagatcagcttgattctaattctcaatctcacatttgattttgcttacaatccttgttttgtttgactctacttttacaatcccttatctgattttgtcaacataattatctcatcattacagctcaagtatccagctccaggggcaccagaactagccaagagagtaaaagaccttcttttatcatcaggctcaacaaaacaagtcaatgaagacaccaaacgcgggttagaccacggtgcttgggttcccctaatgctgatgtaccccgaagcccaaatcccagtgtgccagctctcggtgcagccacacaaggacgcggcctatcactacaacataggcaaggcattggctcctctcaaggacgagggtgttctcatcattggctcgggaagtgccactcacaacttgagacaccttaagcctcaagatggcgtggttccttgggcgatggagttcgatacatggcttaaagaggctttacttaatggaaggtacgaggatgtgatcaagtatgaggagaaggctcctcatgctaaaatggcacatcctcgtcctgaacatttttaccctttgcatgtggcaatgggcgcggctggtgtagacgccaaagctaagctcatacaccatagttggagccttggttcactctcttatgcctcttaccagttcactagtgctccaacttcatagtaaatttgttgtgtgaaaatggattattggtttatacatatgtaacaaaggttcttaaataataaggtctctctcaaccaggaccaaaaatattgtaagtaactctatatagaatggttatcttatcttatggtgttttcttctaaaagtaaattgttattttaaagaattatttaaaagaaaggttggtgacaatgtgacatatcaacaaagaactatatgatggttttttctttctttctttt

SEQ ID NO: 185039 - DNA, 2075 bp, Cannabis indica
ctaaaaaaaatatatatatatatatatatatatagtagattagtaggtaatattgttccactaatccatctgtaaatctttcaaaaaaaaaagtccatctgtaaatataaagtatatatcctctttttcattttgcaaggtatagtatgtatcctatttactacttcaatgtaataatgtatggccttaattttatatatctatctctctatagaaaaatcaacgtgtgctctttttgaacagcttaaaaaaaaaagtaaaggaaacttgtcttgtagctaaattgaatacttttttacagccttgtctcttctcatttcttttccttattttcttttgttagtagcagctattgttgttgcagtgaggggtcatgagctgagtaactgctccatggctaaataatattaagtaatggaaacttaatttacacatacataatgattcaatgcatacattactaaataatattttattggtgccatgtgatagtttatattttcctaatttctaaattaaggacgataagcagtgggagtgggtgaggaggtaatggtataactattcgcacttaatttagtaagaaatttttttaccgttgatgacagaaaaagaaaaaaaaattatgagcattcgagctaagttaccaagaccaaaaatagcaatttgatctttgagatctttataggtggtatagaaagtgattttttttatagagttatattcatggagggagatgctagagagtctcacattgccaatgtgtggaaagaaaatagaatatataagaggaatgggctactcctcccattgccaattagttttgggatggaacctcatttatcttatcctcaaattctcacaggagaagaagaacgaagagggatgaagtttttcattgaaaatttaatacatttattagttgttgtacacaaaattaaaaccaaaaaactctaattgtttgacaagtacggtaaaaaatgttactaacagagacatttgagacacaatacttgcttaattattttacaaaatgaaaaccaaacgaaaaaatacatggagctgaaagtacatcacgtgagtttctaaacaaatagacacgtgttgtgattgttgcgacagagaagagatagagaataggggacaaataatttttattcgtattattggacataaaacataaaagtatcataattcactaacctcattagcgacaatttccaagtatatttatgaatgatgctaaaacctcattagcttgtaatgttttaagcctacgttaaaatctcattatcttgtaatgttttaagccgacgttaaaacctcattagcaatggttattaccctacactaacttcattggcgacaattgctaagtatatttagcgtcagttgtgatattagcgtcaagtattttttttatttaaacgtttatatattataatgtgtaatttaagacgttaaattgacgctaatgagcatcgatgcttatgccaaggaaacattacactaaaaagcgacgctaaatctcatttttcttgtagctctggcagtagcaatataacacatggtactgcgcgatgccctttaatatttatgtaaataataagttgttagtgagtcaattttacttgtttactttttagatatttatgacatattttcttttttaaggttatactttatggctaataattttttatatatatagaaataaaaatattactaaaacagtgccaatgtctactatttttgtttctatccaaaaccactttaacatgtgacacaataattcatggtgtttataagaataaaataacaattgatttcaaaattttagaaactatgtaaaaagattttatcgatttaaagaccttatttatttttgaaaaatagtatttgtaaaatcaaaataaagataaaaatctaggtattcctagaagtataaccacatgcattttcaatttaaaaattcaaaatgagcttccttttacttctctatctttaattttactttgcaaaagtcctcaagagattgtgtttcttgaaattaaaattagggtaaatattatttt

SEQ ID NO: 185040 - DNA, 2996 bp, Cannabis indica
atgcatcaatagacctattttcgagggtgcactgtagaaacaccttacagaaacaaactgcaataacctagaagcagaaaaggaagaaacatgatatggacaaactggtaagtaccatatgaatatgcttaaactatgagcaatgggccttatcatctacattctaacctaatttaacacacttcccttgcaaccaagtcaactgtatcattttgtctttcaaagataagaaagtctctcttaagttagggacctcaaagaggtccaatgcagcaaaataggtttgttgatcaataccttcgatctcgtccaatgctttgatgcaattagttatggtgaatctgtaatcactggtgggtgatgtagcaactctcctggatttcgaagcagcaagcatgtctaacatggtctgcaccatagcatcgcacatttcttgatctcttctcaattgatcgttagaatactctgtctcggatgagggacgtttctttttcctatcagttattaccttaactaactttgcttctgatgacatatttacttgtgcaggtctcggttggggtggtggcattggtggcggtgggttttcagaacgagggatctccccttctggatgtgaacttaaaaccccattttccattccagcagacttgtccaattcttcgtagtgactagattgagcgtacttcccgtcagctgatgaatctgtaaatattgtgcatagctgttcgtatatgggacagtccttcactttgatattttcaggcctaggctgttgtggctgcaagaacaagaagtaagaacttgcaataaaaagtgttgaaaaaggaaataatacaacaaaaagaaaagattagagcacacatgtacccctatgtcttcccacagatcgaaaccaatgcaacatgactcatctaaagtgaattcgttactttgatcataatttgacttcaaattgtagaagcgagtcctcaagacatccaagtgcttccgcaattgattattgttgaagttgagatcggtttgcttattgaactcatcacgaacgtggttccatgtctttttgtcaaaaacattgttgggtctgttgcctagttgaatttgcttcacaatcaaatctgcaaataccttatcaagtgatgctgtccaccttgtccttgaacgttcatgcttgggctgattaccagcttcactctccatttagaactacaacgatttgtgtgatctttcgttggcaactaaacatttacaaatcaaatatttggtgagcaaagtaataatctctacactcaaaaactcaaaatccatttagtgcagtaaggctttccaactcaaatcactatatcacaatacttatgatttttttaaaaaaatacatatattaaataattctatcacaattgcttaccttgagttgatcttagaatcaaatgttccaagaggtacatgcatgtgagcccgagtggtacacctttgaaatcctgcaacataaagaaattagtttaccattgacattcagttaagaaaactatttatacaaaaacaaaaaaaaaatgttgtatatagctattgcttctgcatattgatgtaaaatggtgggaaccataatcaaattatactacaaggcaacgcagtaaagaacttgtcaaaccatccatacagtcagtcactaatgtgcacaagatgatgccccatcaaacagagaaaaactcacagaagttaaaagctaatttgtttagtatatataagtttatgctattagatataaagaaacaagaataatgtaatgaccaatgagaccataactcgctttgtgttcaagaagattttcgtgactgaaaccttctcatctatttactaaacctcgtttttgagctggaaaggaagtaaacaacatagaaaaatataactccagacacaatttataaacatactcatagataggtcaaggcacaaatctaaaatatatagaacaagtattaatacaagtcaggctataaaagaataaaaagttttttcattattacaacacacatcatcatgcaatgctctaagctacaagagaacaaacacattcatggcaagttattaacaactttaccgaatagagagaacaagtatacatggcagcctcaaaactattattaaaacatattcacgatagctaccttacacttttccagttccaacatattactatttatactaagtctaatcatgatagctacattacacttgactcaggaatttaacaacattttataaaatagtgtatacttaagtatggtagttctctataaacatgaaagaacacatttcaatctttatgatattaaacataggtacagaaacaaattcaagactggctgatgatatataacataccttccaagctttataacactcctagcatcgttaaataagctgatcatggctttagctgaacgtaaccgaatctttgtaaaccctgtaataatgttaataatgttataagataacatatttacagtatgtctggtaagaagtatccaaggaaggaaggattgaatatgatatgtaggtgtggattccaaatccacagggcacaccaaaattagtgggattgtaaaaaaaatggaacaccttttcttcctctcaattttaccaaacaacttctaaggatacattatatccacccactactttcccttttccgcaccttatatcaatccatccttaccattttccatccatcataccaaacaaagcattaatctagaaaatcttattggacaaacaaaacctgttttgcttgatcataatatattttaaattcaatcaatcactcaagaaaatcatgctcttaaaagaattcaatagagttggcacttggcagagacttcccaaggacaatcattatctcactctggctcaatcaactcttagatagcatttggttagaggtaatgaaatatggaatgtcattccaatggaatgactatttttaaaatggaatg

SEQ ID NO: 185041 - DNA, 3555 bp, Cannabis indica
aactttacctttagcatgaaccttagtagctgttgtggtagtggaagtagcagcagttgcagggactgcttcaactggtggtaccgaatcactctcttttgcagaaacaatgggagcttcggtggaagctttagtggaaggaacctccagagatgccataccaatctcaccaacaacagcagagctgttgctatcatctgcagatggcaatgaattgccgtttgcttcaactaaggaatgcacagatccaacatgattagaaacgagagttccatagccaatcaaagcaggctccctgggaagttgagaggactctacactactaaccccaggggcaggaggaacactagaatcgtaatcataataagcaacagctgggatttgaggagtttcagcatatgtatttggaacaggaacagcatcgtaatagactggtgccactgcctgcccataaaagttactgctcgggacttctgtagctgcttgcccgtaatattcataattggagtttggataagataaattgtattgttccgcatatggagttggtgctgtctcgggatatgatggaggtaaaggatatatgggcagaggtggctcgtctggtgggggtggaggaatttgctcgttatctggtggaggtgggggaatccactcttcatctgggggaggtggaacactaaacacatcgcctgggactagagatgtgtaccctgcaggctgaattgtctgctgaattggttgcacagcagactccttcacaactgatgcatcgacaatggcagtattgcctgcagaagcatcatcaacctccatgtcaacatccatgtcgtcatcttctgcagcaagtgacccttgcttcggatttaattcctcaggacaggctgccccattatttacttgttcaccagtagtagtagctacatgtacgcaagtaatggcatttgtagcatcatgatctttagatgatattgttgatgtgttaaccattgtagatacatcagcttcggagctttcttcaatcttgtcatcaagatgtgtatgagtaccgatatcagcttcagagctttcttgaatcttgttatcaatctgtgtttgcgtactgatattggaaagttcaccactaatataatcctcgagttgtttaattcgtctttcagaatgtacccaaaattcatgcagagaagaaccaaaagatgaaagtgctttaatatcagaaagtctaatctcaacttccaaaatacacctggagatgcagtcaatactttgcattttgctgtcagacctgaaaatgatacttaccaattagaaaacacgaaaatatataaggaaaaaaacattacaatattgaagaacatagggcattcacagtatgaacaaagcttaccctttaactgtcttaaatttctctatcaaagactcactgcgttcgataagagaagtagaaaggtccattccagaaccatgaccttcagtgtccatcataccatataccaacttgtcataaacatctttcatagaactaccttcacctaaagtatcattgacagatgaagcatttacgacatcattaccacaatttgtatcattctgagcctcattctttgctacactccaatcaaccagttgtgaaccttcaatatgtgttgcagctgaaacaccatcaaatgtcggacctatactcaagctggggtcatgcataccaacaaaagcattttcggttctttcattagtgatggccgatgcatgattattggccaactcagatgcctgagccaatactcccggtatttcccatgaggtttctccagttattgtgttccaataataataccgattactttcctcatgcagtaccatctgccaaccagaactcacatctccacttggttgtaaatcagatgttacaggggcaaagatctgtccagtttccaaatcctttcctaaggcagttgaggctgtatcacccttgcctaaggcagtcgaggctgtatcatcactttcttttctatctgtgtcgtcgaggttgtggttaacatcaagagagctagaggttttatcagattcatgtttgttagcatccatatctaaacaaccttctccattcgatcccttaacctgtttatagtaagagagagaatgaggtaagtcatattgaactgaaacaggagaactaagccagtcattcgtcaaattcgctaaattacctcattgttattttcaaccaaggaactttccacagcagcctcatcaagtttctcatcctcctgatcatcatcatcactatactgccccagtaagagcaatggattttccggttgctgacctgaagacaaaacaaacactaacaaatgagacactacatataccatacacacagttatattcgattaaattcgtgacacagtttcaaatactatgacaaccaaagtttcctagtatttctaaattaagaaataaaaaatgatttcagcatttactcatcacatcataagcaacctgtgacacacgaaaacaacgagtcagccacgaacaaaaccaaatgaaagcaagagacatacgaaccgatataaaaaattcccagcagaattctccaaaatgctttgatgctgccaaaaaggacacaaattcaacagtggcagggcccggacctgatctgatctgatctgacagtgtatatgatctcagctcaagaccatagccaaagccacctagagtagtattgtagtacaagtctgaagaaaacaaaaattcttgtggcaaaacaacataacaatgtgtgtccttgtattgtattgtagaattctacaaaagtttccaaattttcatcaccaacataaatgttgagagagcacaaatgtgatatgtcccactctacaaagtgacacggaacccacctgaagaagatggtgaattgggtaacccagcaccatgtttgttatctccaactccaactccatcatcatcattattatcatcattatgtgcattattggagccacccaaatcccctattcagccaatcaaatcgtaaataaaacaactagttaaaaattgaatctttaagagattcaattcaaattttccaaaggggtttctcattcatatacgtttaaacatataaaatcaatataggtgtgtgtatatagatatagaatatgtaccagagggttccgcaaagaggtcgagcttgactctgcggccagtgttggacatagctgcgcgacgacgctcttttctattccccatggatggaattgatgaattcgtaggtcttcttcttcttcgttcttaaggttattgaattcgaattctgaatgccctaaattagggtttttcaaatcagttcagttaatttgctctgttctatttggggaaatcatatatatataaatagatattattattttttagttttttttatttttttatttttttttaaaaaaagtttagtttaggttaagaaagataatataaattaaaacctcaataaattatttaatgttgttggaatgtaaacaaacctatttattttttttattagcactaccaact

SEQ ID NO: 185042 - DNA, 1626 bp, Cannabis indica
ataatttaagtattattattacctcaaaaaattaaaaagtatttatatgtaactgcaaattaaagttaagtctcgagttcgagaaacacacgacaagaaaacgaaaggctcgagttctgcagatgttctctgaaaagccgttggtatctcatcacaggtgaagttccatcgtcattttctaattgttgagcactagaaattccagttttgacacctaaagagtagtatgtattactgctatatgtattatccactttcggttttcgctgattccttgttgaatgtctaccaatgttgtctgatttcgttttttccaattctctatctctgtttccaatgtataatcctccatgaaactcttcttttctctcatctttggggttttcccgcgcagttacctcttctactactactactggttttcatcaggctgccgaatagcatttgaaaaggagcgaaaggggcaactcaacaccgccaccgtcggtcactgaaactttccatttgtggtttctctctcttatttgtctacagtctttctagggtttttctctaatcttgtggtttgaatattgagctgaactttaattctaggttttaaataactacacgtgaagtctaagtcaattttcgttctttatctgttatttgatttatgaaactcactatatcagtatcacatggaagaactctttgaagttatgctgatttgatttagaactagttacagttggagattggacaacaattttggcaggctataatttaactaatttatatttgtttgccaacgcaatcaggcttgaacatttcttagtaaatggatctgaatcaagtacgtagtatactataggcttgaaatgatatcatttctttgccctagtatttaaattgccttaaaaagtgaaaagggaaaagggcaaagaaatgatatcattttgttgatagaaaagttctcataagatcatctatgatgataatgtattatcattttgatttctgttactgtttggaagatgataaatttatggaatttgccttaaatacgtatatttttgaaataagttatattggaaattataagatgagtacatttgtttgagactttgatttatgcaaactatgtatgatgttgagaaaaaataacctttgttgcagcaaaaatggggagcgacggaaatttgaagacgtgggtatctgacaatttaatgtcattgttgggatattctcagtccactctcgttcagtatgtcattgggttttgtaagtttctcattaggccattaccttagatatggttgattcatcttttcaggtttttgaattaatggatgattgttgttcaaaatgtgatataatataaaatatgagctatgatttttctagaaacataaatatgaattatgatcattttggtttcttgtagctaaaaaagcaaattcaccggcagatgtgtggagcaagcttgtagagtctggattaccttcatctagcgaaacacgtgcttttgctgaagaaatctacaacagggtgccccataaagcatctggattaagtgtaagtttttgaaataatgggattaagttattttgagttttgagttgcggtattatatgatcatgcata

SEQ ID NO: 185043 - DNA, 1685 bp, Cannabis indica
ctaataacataatatcactttcacaatccctacctacccccacaagttctaaacgagatgagacttattttggagtttggaaatagtcatttaataaggaatgatatgtcccactctctaatttctacttctaatgaatcatcccatccacacgtgcaacagttccattcggaatgatattgacaccaaaattttgatgaacaatgaggaagtacgattcaatcttctagtcatcctttatacatagaacacttgcccaacatttaacagactctcatgaggcacatttaacatagaactgctctctctgcatattttcttgagaaatgcataaatgtaatcaatggccaactttttgcagaagtttgactccctcctggccttgattattgtattccctaagatgtgaaccacaccagcatctttacagttattcaagaattgcaactcatcaatctcaatctggatattagcctgattggaataactaatatcatttgctcgttgtgatgaaccaacttcaatgatggactctattgatgaaactgaagaatccaccttggagatagatgagttgccattaaaatggttgtcacttgcctgttcatcttgctggtcgggctcactatagacatccgagtctgagcacccgtccattaaggaatcaagtcggacaaacagcataaggcagtcgaatagctttttctcaaaatcatagtctttcttatggacgtctctataaccatatcttgcaacacaacggaacatgtggaattcatttggtccaattcgctttataaggaacctctcttcttctggtactgtgtagacaggtaggtacttcacacagacaaatacaacaactgaatgaattgcaggcaaattggtgataaagtgtgagaaaatgcgaggcactccatgagctaggtcagtgtacactaatcctactccaggcacacgaacaagccctaaactagggccaagtccaagaatccatgccattgaaatcttgctatgcatctcaatctcatagcgtctcaaggtgccataatgccaaatatacatgatggcgaagaatactgcggatatcacgagaggaacccacccaccttgattaaccttgaggactacagcagagaagtaagtgcactccactgctaaggataagacagtgaagatcaagacaagaatccaatgacaacgccacactagtatcatcaccaaaatcatgagaaaggttgtcaccaacatgactatcacaactgctgtccctgttgtaagatgcagaattcatgaaattagtccctactccctacgtttttcaggaaagttgaaatgttagcgaggctttcaaatacaagacaaaacatcaaaattaagactactaagatgtgtatgtatattcgaccctgcctgaattagattttccaacaagttatgttctagtcacttcacaggattcatcccagggaagtaggattctaatgcaagtcaacaagagatgttgaaataaacaatttgagaggtcagggacagtaactttttttggggcccacctaggatttgagaggagaggaaaggctgaccaaaaatccatgcaaaagtgagaacatcaatatttgtaaacagtctgctgctaattgaaaaataaataaaaaaaaaaaaaactagaaaggcaaaaggag

SEQ ID NO: 185044 - DNA, 6157 bp, Cannabis indica
aaaaaaaaaggaaaaggaaggaacgaaaaaacaaaaaaactaaaaaactaaacgtccgaacttagtcgctaagtggtcgtacagttacatcttcgtttgttacagactctctctctctctctctctctctctctctctgcatataaatggtcatttcactgattctagatcaggtgggttttgaaagtaaccaccattattaccacattttttatataattatataatatataaaatttagaaaaaaaagacataaagcctagctatcaccatcaataaaattgattcaatatggaaattcactagttggtcactattattaaaattaatataattaactattatatattatattcttagttaatttccaacaattaattaataatctctctctctgtatgtgtacacacacgcaaatatttatatatatatataaacatagaagactcacgaggttccaaagaaataaataagaactaaaaaggaagggaagagaagaaatgggttctgccaagaaggaaataaagttggagaaaagtggagatgagagaagaataatgacgaggagtaataatagtgataacagtagttcaaatttgatgataatttttagatatgcagattgggtggatattttgctgatgattttgggtacagttggagctattggagatggaatgtcaacaaactgcttgttagtcttcgctagccgtctcatgaatagtttgggatatggccagactcaaaacaatcatgctgggactaatttcatggacgaggttcaaaaggtttgttttgtaacactattacatatatatggtcaacaaattattatttcaacccatatatttacaaaacgtgtatatataatctttgattatttgtgttttcttgtctttctcacatttttcttgtctttacttttcttttcttttctttttcaacagtgtagtttgaacttcgtatacttgggattagcagtaatggtggtggcttttatgggtaattataagttcaaaccacttaatttatatgcgtatactgtttttcttttttgcttttgcttttttaagtatgtaaattaatctcaaaatacaacaagctagtcatatatatgtgtctagtttcctcggtcgtattgaaaggagacattatcgtcagtaccagtagtagttgaaaaattaattcaagtgaaaccctaatgtttgggtaaaaaagaaaaaagtgatgaataattaattacacactcaatatatgccttttggtgtataataagtacaattatagcaaaattatcttatatttattattaatgtataagaataaagtaactaattaagattattacttaattaacatcaagtaattaatgattattacagaaggttattgttggagtaaaacaagcgaaagacaagttttaaggatgcgttacaagtacttagaagctgttctaagacaagaagttgggtttttcgattcacaagaagcaaccacgtcagaagtcatcaacagtatctccaaagacacttctctcatacaagaacttctaagtgaaaaggtatatatatacatacataacataacatcacatacatagtgttatgttttttattaacttgcggttggtttaatctacaggtaccaatatttctgatgcactcttcagtgttcatatctgggctagctttctcaactttcttctcatggagattatccttagtagcattcccaacattactggttttaatcataccgggaatgatttacggcaagtacctagtctacttgtctagaaagtcacacaaggaatatagtaaggcaaacgcaatagtggaacaagctttgagctcaattagaacgatttactcgttcactgcagagaagagaattgttgagaggtactcaatcatattggacaaaacgacgtcgttgggaatcaaacaaggcattgcaaaaggtttggctgtggggagcacagggctggcttttatgatatgggcttttcttgcttggtatgggagtcgtttggttatgtataaaggtgaaagtggtggaaggatctatgctgctggcgtctcattcgtattgagtggactgtatgtatattctactcttctctccatcattttataaatatatatacatatgaatgcattctttataatgtatgtagtcaagtcatgtgtctttaattatatatatgcaagtatgcatgaattccccattttcccttaaaaacaaaatatataattaatcaaccagcttttatgtatgaatatgaatcatgtttattaaaaaagtaaatgcgcgtaaggaaaattaagtcttacaatattatactagtatagctaatatagtactatatatgatgtttcctaaggactagtagtatagaatctcattttatttcaaagcgaatttcttcttttttattttgttactttttgtacacaaaagttgtgttttaataattttaggtcataagattattctcaaaaaataataataataataagagagagatgtacatatatcgaaaattgagaaatcttaaagggtatcaagaactacaaaaaataatatataattattggtgcaatttaatatcaagtctcacatataataaataatataaaaaattattaatcaaatcataacgtagttaacgcgctacgtgaatacaatgtttgacactttaacatatacaatatgctgaattttttttttctatatatacatttggtaccctgtcaaataatttgttaggataacataacttatactattaatcaattaattaagttcatgcttattcaatcaaataagcatacatgcactggtttaatgtctaattagtattgtagtcaaacaattaatctattgtatcatcatgacatataggttattttggtggtaaattactgctcataaagttgcctaatatatataattattcactccatccttacgctagtttatgtctttttttgatggaatcactagttattaatatgtcattttattactaacaaattattataacaacttacattatagttttgttataagctagagacaagtaagaataaatcacagaaattagaaactgaattgtcggtaggaaatggcctgcttatagttaaccaaaaatacaatcatgtctaaactttaataatcaacatggaactttaatttacattataataagtaaaattagtttggaataatacataattaattaattagtaaagcaaaaggctaggaaaaggagaggaatgattatactaggaatcaattaaaatatacagaataaacatcattgatcttacctaactagttaataattaacctttgagtcactatacacaaaaaacgtgcataattaattacttcaccaaaaataattaacaaggccataatttgtatgattattattaatgcagatctcttggaatggcacttccagacctgaaatacttcacagaagcctcagttgctgctcaaagaattttccataggattgatcgggtaccacaaatcgatggagaagggaacaaaggtcttgtactagagaaaatcaaaggccaactagaattcgaacatgtcaaattcacctacccttctaggcctgactctgttgtgctcaaagattttaatctaaaaattgaagcagggcaaactgttgctcttgttggagccagtgggagtggcaagtcaacggccattggattagtccaacgattctacgatgcagataatggggttgtgaggattgacggtgtggatgtaagaacacttcagttgaaatggataagagggaaaatgggacttgttagtcaagaccatgctttgtttgggacatcaataaaggaaaatatcatgtttgggaagcttgatgctaccatggaagaagttacagctgcagccatggctgccaatgctcataatttcataaggcagctacctgaagggtatgaaactaaggtgggtatgtagtatatttttgaattatttatatatgattgaaaatttagaggcttattcctttaattttcacttggccaacacaagaagataatgattcccaggaataaagtaacaaaagggtaatgaagttccaagaaaaacttttgctttttcacttgaaaaatatgcatttaattgtttgagtataagcgtaaaattttagattatcttacaaatactcatgaagtaagagaaagcgcttaatacatactcttttaagttttaacttggtaatctgcaagaaaagtaaagcaatatattgtttccatatatgctcaatttcataagaatatatatagtggatcgtaactcgtagtatagttagttatagtatacataatagaattgttcttttctacatatagtttaataatgtctatttgttgcatcattctaagtgtgacgtggtttatctagctttctagtaaaattcagagtatacatatttaaaaaagtaaaaaacataaaatgtgacagattggagagagaggggcacttttatcaggtggacaaaaacaaagaattgccatagcaagagcaataatcaagaaccctgtaattctcctacttgatgaggcaacaagcgctctcgacactgaatcagaaactctggtccaaaatgctcttgatcaagcctccatgggaagaaccaccctggtaataaaaacaaaacacttcaaaattggacaatggtattttacagaaaatgtccaaataaatataacatgcattgtcgttttctggatcaggttgtcgcacacaagctctcaactgttcgcaacgcagacctaatcgccgttgtaggcagcggtgcggtgatcgaaatcgggtcccacaacgacctcatcaaccaacataacggtcactatgctaacctggccaaaatgcagagacagttcagttccatggaaaataatgaccaagaacaagaacccaccgtcacctccggccgaatctcctccgttggcggcggcctaagcacggggagatcgagccctcttatcttctctacaccgcccaattccacagtcgatcaaaccccggcggtgggacgcaaaaaaactcaaacccaccagcgaggttctttctctcgactcatctcattcaacgcacccgaatggaggaacggtttaatcggtggactctccgccgtcgccttcgggtccgtacagccaacatacgccttgaccataggtgggatgatctccgccttcttcgctcctacccatgaagaaattcggagccgcatccgggcatattctctgatcttctgctctctctcgctggtctccatcgtcctgaatctccttcagcattacaatttcgccttcatgggagaacgattgacgaagcggattcgaatccgaatgctggaaaagatcttgagcttcgaaacagcttggttcgatcaggagaagaactccagcggcgcgttgtgctcacgactcagcaacgaggcttccatggtgaaatcccttgtggcggatcgtgtctctctcctagttcaggccgcttctgctgtgacgatcgccatggtgatgggtctaatcgtggcgtggaagctagctctggtcatgattgccgtacagccattgacgatcctctgtttctacacccgaaaggtcctgctgtcagccacatccgcaaacttcgtcaatgcccagaataagagtacccagatagccatggaagccgtatacaatcatcgaatcgtgacctcgtttgggagcgtgggaaaagtgttggggctatttgaagaagctcaagaggcaccaaggaaagaggcgagaaaaaagtcttggatggccggaattggattgggttctgctcagtgcttgacgttcatgtcgtgggcattggatttctggtatggcggtactcttgtcgagaagggtgaaatttcagccggggacgtgttcaagacgttcttcatcttggtaagtactggtaaggttatagccgacgctgggagtatgacttctgatctcgccaagggctctgccgctgtcgcctcggttttcgacattctcgaccgccagtcactcattccagtatctcacacagtgagtaaactaactaatgcacataatatgtttacatttgaagtgtatgatttataattgacact

SEQ ID NO: 185045 - DNA, 8629 bp, Cannabis indica
ttctttctttctttctttgctaaagtgggccccacattccgatcaccttcctttctcgacacccactaaaccacgtggtgctcgagattagagaatcggaagaggagggagagactcgtaaaaagtcacagggtccgcgtttgacgcttctattttaaatttatttaattttattaaaattataaaaccaaaaaaataaaaacaccatttttttcagccaatcctaagtgaccgtctttcggtgtcgtagtacttcttcttcttcttacttctttctctctctttccatcattttctcagaaaccaaacgaaacaactgaccgacgtggcaatgcgaagtcgcgaccccgccgcgtctattaacgcgtgctcaaccacaaagccaccgccagctcatcgcaatcggtcatttccatagctagggtttttttattttctttctaattttggttttttgttgttgtatttggggggttttactctttttggtttgatttttttttttcgaattcgattaaaggggaaagaaaaagtggaatcggttcgatttttgtgaggttatggaagagcgagaagcgcaagcttcgagcttttataagccatcgcttggagatgagggaggtggtggagcgaggtttgaccagtcggttagggagcttgagttgaagcttatgaacgttgatcaatgcgaaacgattggggacttggatgattctcagttagttggagcttcgaatacgatcgtcgctgtttctgctggaactgatggtttgggtttgggtaaaggtggtttgaatgaagtgaaattggtggagaagcggaagagaggtcggccgcctagaggacaggtcaaggcggcggctccggtgaggaagaagaaagatgaggaggatgtttgttttatttgcttcgatggtgggagtcttgtgctttgtgatcgccggtaagggattgttgtctttgatttaagaattgggtttttgtcctggcaattgaggaagaaagactaaaacttgtaaagctgaagcttttcacataatcatagatagataaaaaccgataatttcttatatgggcggggctgaattttggtgaggagcagagtaacttaaaaatcatattaatctcaaattgtggtttattatgattatttgagatttggaaactagaaggcgttttttttgtgtgtgtgtgtggttaagcttaaaatttggatattcatagttagttttgttttgaggttacacgtaatgaaaaccgtgttgtgtctttctatttttatgtatttattggctattaaaagagaccttgatataaagtattacacttgctgtcctaattaaaaaagtttggtgtcttatttttatgcgtttattgtgaattgttactttattaggggctgccccaaggcatatcacccggcgtgcatcaagagggatgatgcattttttcgatcaagagctaaatggaattgtggtatgttgaatgtagttgtattgtttgtttttttaacatattttagagaagtatttaagcatattaagagacctgcaattctgacactgctaatacaatgaagacaattttagttgcaatacatttatgttaacaaattaggtagtcaagtagaatcttgcagaagttgttttgtaattctttcaactgcctttttatctttttctttttcaagtcacttcttaaataaatgcttgtacgtattatatcaaatcatcagttcattatttgaacaatgtgattttatcactttccttattccaatttcttatcttcttcaggttggcatatatgtagcacttgccagaaagcttcacattatatgtgttatacttgtacgtattctttgtgtaagggatgtattaaagacaccgattatgtttgtgttcgaggaaacaaaggattttgtcaaacgtgcatgagaaccatcatgctgattgaaaagttgaatgtaaataaggaatcggtatgttgactaaaatctctagcctttctctcagaattatctggtttcttgtttatttgtgaagttaaaagctctcataatgtttgcatttgcaaggattttcattaatataagaatgtatcattatctatatagtacattacgacttcttgccttgggttttatactcttgagtagtgtatgctcacttgctgctgtcctcttgcctagtccttatttaagactaagaaatattcaattatgtgtggagctttgaggagacacgattatcatgtttttcttttctttttggtttgctttctgcagcctcaagtggattttgatgataaaagtagctgggagtatcttttcaaagtctactgggttcttttaaaagataaattatcattgaatatagatgagctcttgaaggctaaaaacccatggaaagctcctccacttgtgatttctaataggatttcttccttcgaaaattattgtggaaatgatgataaaacttttgcttcaggcaactcttgtgcagaccttgtagcctctaatgctaaaagaagaaaattcgaaaatgatcttaatgttgcacatgagaattgtttgcctgttgacgaatctggcagtgatatagcaaagcctattcaagcagaaccaaactgggcctcgaaggagctcctggagtttgttgctcatatgagaaatggtgatacttctttgatgtcccagtttgatgtccaaactttactgctcgagtatataaagagaaacaagcttcgtgatcctcgtcaaaaatgtcaaattgtttgtgattcaaggcttttgaacatgtttggtaaagcgcgtgttggtcactttgaaatgctaaagcttcttgaatatcattttctcataaaagaagactgtcctgtgaccaatgctattatgaaggaaattgctgattctgttggtagccagatggagtcagatcagaactgtcatagtcaaattacaatgaataatgataagaacaccaagacacacagtaggattaatgacataggattgccaactaaactagatgcatatgcagcagttgatatgcacaacattaacttaatttacttacgtcgaaatttgttggagaatctagttgatgatgctgaaaaattccacgagaaggttgttgggtcaattgtgcgaataagacttcctagtaatgatcaaaagccagatgtgcataggcttgtccgagtagtaggtatagattttattacttggcatatatatatgtgtgtgtatatatatttaagtatatttttgggtgggtggtgtttgttcttatattaaaccttacagcattgcatatccacacttgcaggaaccactaagagtacaaaatcttacaacattggcatgaaggcaactgatgtcatgcttgaaatcataaatttggataagaaggagcttgtatcaattgatgcaatttcaaatcaagagttctctcaggttatttataacttaatgccatttcacatttgtttatgaatttatagttctctattgactagtaatttacgataaagtttttatttttgtttgtcatcttcagtcgccactctccatcataatctaaatgcaaatattgttgtcacatgcttatgtttttgttcattgtggacacaataatgacagaaagtatgcattccacatagtttactcaagtagagatagccattttccagccagggaaaaaagtggttttgataggaagtgcctatttacattgagactgtactatgctttagtgcactttgtttaggctctatatattctggttccttgtttagaaatccaagaagcagtgaaggatatcaaacataagaaaactttttcgttattgtctttgcaaaatatcatggatacataggcattgcacggttatggctgatgagatacaagaatttagagcatatcattctattgtttgattattaatgtgttagccattctgcaggatgaatgtgaacgtttgcgtcagagtattgaatttgggctcaacaagcgatttacagttgtaagtgtgcctaagatgttccacttccatgctctttgtgagatattttttttacctcctatatgacttacattttaacatgtaccagagtgagatccaagaaaaagcaatggaccttcatgcagtgaaatcaaatcatgtaagttacataagtaaaaaatgtttattcatgtccatggtttggctgacaaaaataattaaacaaacaaacacgtgtggtgtgcaatattttaatttcttattcttatgcatggtcacattgtctgatctaggggctagaggcagagatattgcggcttactaatcttcgtgaccgagctagtgaaaagggacaccgaaaagaatatcctttgttctctatagtactaatctttgttatttgatttttcttttgtatttgatattttcttataagccaagctttgcatgggataaaatacttgcagtatgcagtggaaagtgacagtcgcattattttttaccttttaccctgttattgagtactctactgaattgaagtatatgaatattccttgactgtatttcactctgagagaatgcgtggagaaattacagcttctgaattcaccagaggaacgtaagcgcagactggaagaggttcctgtagtgaactctgacctgaagattgattcaacctgtgagtttgatgacaatggtgaggaattaaatgagctcttgtataacatagaatatacatttgttattctctcaactctttttcactttaatcattcttatggaatgttatacttctctgatgatagtcttactgaatcatatacagatgataaattcaaaaccaaaagatctggcttcgatacaaaggaaaaggatcctatttcttctggacaaggaagggatgtcttgattaacggtggaagcagtgcactaaatcattcaaccgcctctcttgagcaaagcaagaataatgtagaaataattgatctaaatggttcgtataccttgaataacaaggttgatcctactgatacaggtattgattggagtaatcaagcagtgttggggtccgaattattttctgatgcattggaagttttgacactgggtctttccacagggacaaatcaatctgttaatgattatgagatagagaagatatggcattaccgggacccaactgggaaggttcaaggtccgttctctatgctacatttgcgaaaatggagtgcaagtggaatgtttcctcaggagttgaggatatggagggcgaatgaaaaacaagaaaactcaatacttttgattgatgcattgactgggcagtactgtaaagagcagttattaccatgcaatagccatttgccacaggaggaagtcaagggttcttctgatgatagaggtaatgatgtggatgacaggcaaaacaagagcatgatgatgaatgctactgcagcagatggtgaaagagtcgaggagagcagaaatcttgagcaggatgacctgagtcggcttcgtgagggtaacaatgaagctgtaggtagtgatggattgggctctcatttgtctagctgtgctactcttgcggtcaattccagcgaggaacatagtggaattttcccagagggctgggagtcatttaaggctaatcctatttggcctcaggcccaagtgagtagttcgttacccacttctgttttgcctgggaatcaaaacttgttgcatcataacagtgaagaacatggaactgaaagaaactctggtcagagcaatgaaaatatgactccggattgtcaaactagaaataaccagggctgtgaaaacctatctgagggtgaaggtcaatcaggtcaatcttctggtcagaactggagacctcctgtaactagtccttcaaatggctgggatcccaaagctgaacttgagtctgtggtcaaatcacttggactatttgacgaagaccaggaggaaatgccaaatcagcccacttccacccaaaagccaagtcatgagagcccagaaggtcaggttgctgaaaagactcagtctccttcaattgctcccattcagggtgcaggtgttagctggagccctgcttctagtctagttagtggtggcgcacagctacgtaaagcagctggtgactgttttggatattcctctaatccagccaaacctgctgttgaggaatgggactccagtcttgtctctgcatcttctcttaggccagccaatgccgacattgccaatgatcatgctgccactccagcttcaattagtgatcaacttacacattcttcatcctctcatcctcaatctaatgcatctagttggcatgatttagttcctgatcctgatgaattcagttctctacctgatgaatccgtttcagatttactagccgaagttgaagctatggagactctacatcgtttgtcttcccataatatgctaaaccatggaggtgagtttagagagggttctaaaactgattgtctcagttctgttgaggaatttagcccagcacctgagcctggaaagggtgatgctttgagctccacagctgacgtacacttaactcctcaatctaatgtgacagatgaatcacatgttagaggtaatgcaggtgtaatcgatcgtggaaagaggtctaaagggcatccttcggtgagtgttgatatggaaggggatgcgaagcacagtgatgtttcagtaaaccaatttgaagcaaacccagatattcaaccacatgcaccatcaacagcaggttgggatgtggctatgacagatgtcccttggaatgcacgatccgaaagcaccaacaactggggagcagttcctgcaaatgcaggaatggggggctgggaaggaggattagagcaaggaaatggtcttatggattggcgtactagtcagccaacaccaccacaggtaaacacaaacatgaatttggttacacctccggcgagccttttgggaagctatcctagacatggtggtggagagactttgggaagctattctagacatggtggcggtggagagactttgggaagctatcctagacatggcggtggagagagattaactagtccgagagatcggggttatcacagtagggattcaggtgttcataggaataggcattccttgcacaggcaaccattttatggtggcagcggctacggaggatctcagttcaggccttcccccaaagggcaacgagtttgtaaattcttcgaaagtggattctgcaagaaaggtacatcatgtagttacttgcacccatgattttgggttagacacggcataatcataatcatcggttagatacttttgttcttctgtatcatcattatttgtagtaggggaagcttgttcttaccagtgttgtaattttaacctgtaaaagtagcaaggcagtcggtcagtcagtcagtcatgcggcttagtatatgcatatgtattttttttggggatagcttagccgggtccatagtttcatgttttgatggacccttaatattcatttctataatgggcaaatggagcagataatgtctgccattaatgcattgatggaagagttttcaacataagaccctctcttctctttctcattgtgtaagaattatttcatttcaacccacacaacaaaacatttcacctattaagtgttttaacataagtgagaaataaacataacaacaatttatagcaacaaaatcacactttaaacttttttatgtagttaatttagaaatattagttgcattattctagatgatccttgtttattgttcttgtaaatcagtttaacatcatactatatctcactagttttggtaaataaaaaaattaaaaacatatttttaatacaattggactggagatgaataatttgaaggtagcaaagttgttaattttgaattgtccagtttcttttagggggccttgctattatattcaaacttgtttattacaaagataattgtttactctatataatttttaaataattgtacatattttatcataaaactaagtcgacacactgtaatttctttcctcaaattattggcactttcaagttttgtttgtggaatgtaatataatcattattaccaatataatgtttgtttttagaagtgatctaacgggattacattgggatgataattatgtaatggaatttttattacattaaaaaatttgtctaatgaaaactacatcaaaaatattaaataaaggaagaggccagaattcaaatgagggcactggtggggtgttaattagagggactccatgcttatgttagtactttttgctttttgccttaattgaactaaagttactttaaaaaaaaaaaaaaaaaaaaaaaaaaaaaacaaaatgaaatggaactactctttaatttgtaaaagattcgcttcttcttttgtttgggcctttacccataatttatatgatttatggttgtattgacattactactattcctaagaacatttgctgtaatgaccgcgaggtctaatatattatgaatgaatgaacgttgctttaaaaaaaaaaaatgaaatagaacataaatagtagccagatggataagtggacgggtggacgaatgg

SEQ ID NO: 185046 - DNA, 3505 bp, Cannabis indica
aacaaagaaagcgatgctcacaggagggagcatctccccgaaacattaaaaggaaaagataacattaaaaacactaggattaatatcccaaaagttcacaaaaccattacaatcattaagagtagcccacttggccaacgtgtgcgcccctgaattctcggaccgcgggatccaaaccagagaaactcccatgccttcaatcgcgcgaagcaacttggaaaaagagcaagcagtagaccagctaggaggccttttctctttagcagccaccgtcagcgtctggcaatcggtgaagaaacaacccctgtccactcccagtaattgcagagcctcaatgcctttaataaccgcctgcagctcgcccgcaatcacagaatgggcctccaccttgcaagcaaagagagcctgcagttggttgaaaggatttttaatgataacaccaatagcagcaccccccgcgtggaaagcagcatccacccagacctgatactgtcccgaatgatactctctcgagatcccaacatcctgactaggagtgttagacggcttatgcttacagggcttaagagaaaacatagcaaactccctttccacttgcttgtgcatattttcgatagggggcaccttcttagagtgaaaggcttcattcctgaaacgccataacgaatagcacagacacacggcgaagcagataaactcctccttctcagaattattgaaggagactgagaatggcgcattgaaaatccattcgacaaggtccctcccgaagttgatgttgacagagtcaatccgcacattccacttagaaataaaccagagcctcttagccacttcgtactcccaaaagaggtggctagtagtgttccccgaaggacaatcacaaagggcacaagtacccggttcattgccaaagatagcgcccagacgggatccggttggtaaggcatcagcatacaatttccacacaaacaattgcagccggggatgcaggttgccataccagattttcttaaagataccattaccagaatagagggaattagcattaagagcccagtatacagactttaaagtaaagttacctttcggagttagcgtccagacaagctcgtcttccaaaggaagatccagggggttcaatcttaccataaccgccgcgacagaaggacgaaagacatcctccacacccctaatatcccaagccagagagtcagcttgaagtaaatcccccaacacaattcgaggctttactgtcggatcaatatcccccgcgcagatcagaacatcatctcctattatccatcttccactccataaattgacatccgactccgaaccaacccgccaagcagaattagccaacactaactgtttagcagaccagatactacgagccactatcgacgcactcccagacaaattagcatcaaagaaagaggagtttggaaaatacttacttttgatcattcgaacccaaagttctcctccatctctggccaacaaccacgcaagcttggccatgtaacacatattcatatctttggctcttctaaagcccaaaccgccacacactttaggcttacacaaattctcccaagcaatcaaggataggtatctgcccccttccatgtcccctttccaccagaatcttctagtgagcttgtccaactcctccagaatagtacccggaagtttaaacacagccatggaataagacggaatagtttggacaacacttttgaccaacaccgtacgcgccgcttgagaaagtagccgggccttccaaccttccaatctttttgccactttgtccaccacaaactgaaagttcttactacaattcttccggatgaatagcgggttgcccagaaatttctcatcatagtccattatatcaaagcccaaaagatcaagcaactccccttttagttcccagccacaattgtccgaaaaggtaacccgagacttattagcattgattttctgccccgaccagctacaatatttacttgtacactcttggaggaccaagaccgaattggcatcggcccttgtgaagagcatagtatcatccgcatacataagatgcgtaatcgatggcccggttctggatgtcttaacaccaatgagatggccctccacttcctttttcagaaggagacgagataagacctcagagcataaaatgtagatataaggcgaaagggggtccccctgcctaattcctcttcccggagtaaacgtttttgtgaggcccccattgaggagaacctggaacttgactgattcaatgcagaacatcaccaatttgacaaagtggttaccaaacccatttgccaaaagaaccgcctcaataaacctccactcaagtctatcataggctttcgacatgtcgcatttcacaccaataaaaccctgctttcccttcttgtgtctcatgaaattgatgatttcattagccatgatagagttctcggcgatccatcgccccttgacaaaagccgactggttaggtgatattagcttgctcacgataggacgaattcggttggccaggagtttagagataatcttgtagctagtattgcacaaactgatcggcctatagtcttcaaacgaagaagccgaattatttttaggaatcagcacgatgaaggtgcggttgatctcagtaacaaatctccccgaactaaagaattcttggacaaagtttatcacctccgagttaatagtatcccagttatccttatagaatttacccgggaagccatccgggcctggggatttaagcggaggaagctcccaaaccacttttttaatctcctcaggcgatgggatagacagcagggcctgattatcttcaggggacaccatcttggggagcaagtcataaaattcagcattaaggactgggttgcccgaacggaaaacttgggaaaagttacccctaaaatactcctcaatctcaggtctggactccaaccatctcccgtcgcgatctttaatagcccaaatgaaattcctccttcgccggatgactacagaagcatggaagaaccgagagctgcgatctccctccttcaaccaaagttctctagattgttgacgcaagatagactcttgtcgggcctctatttcatctaattccatcataatggtagcctccatctcgacattgtcctgagaaggaggtttggtttgaacttccactaacaacttctccaacatctccatcttggccttacaagagccaaaatgctcaacactccatcgacgaagagccgaagccgtaaaggaaagcttcctagcaaaataaagctatgataacaacacaccaccttcgctcacgcctcagctatgatcttcgcacaggagtcatcacgagaccaagcatcaaaaaacccgaaagggaatacaaaattcgctccctgtccctcaaaagtgtccagcacaatagctgagtgatctgagtgtctgactgcaaaatttttgaccccgcctc

SEQ ID NO: 185047 - DNA, 3082 bp, Cannabis indica
gttttatacaagatattgcatacaaatacattcttcttaggtagcatcatcgccaacaagaagttaaatcatatcagtatctaatgtaaacaatcaaaaagcaatcaactaagcacctaagaatacaaaatttggaagtgaaacaattgtgatgatttctatgtttttcggtcatgcgatttccacatctctggcaactatttgcgactcttgatcagacacgtcgttgcttgttttcttaaaggacttttggctaaacattctcgcgaaggcactcttcgatctttggatcgttaactgctttccattcgtatcaagctcgtttgataatgatttgactaaactctcaaagcgacgcctaaaagttggataccttgagattgattttgtgattccttgaagcctagaaagaaagatatgatagtgaagaaccataatgaaagtgacacaagatcagaatgatttgttaaaagagggctttttcaagctttaccttcttgctaatgcatccaattcagctcgcttacgctctggttctggtgggggaccaatatttgcatcttttaaccttgaagggtcaccgctcaatagaaccaatttgcaaaagtagttctcttctgtttcagaaagattttctgctttaatctgttccttaatgatcattaatggattgaaaaaccaatcaaagaccgcgtcttttggtctgtttctgctcgttagctcggtattgtcacctatattaacagaatatgccttgtttatatcttgtgaaaaacaactgaagtgaaagctgatatgaaaagagaagagtttgacttacttaacaaaagaccgacagaatttgactttgcagaccgcagtagtgtctgaagaaggcaataagccggtaatccaacaccgataattctgctatccttgctagacctagcttcttcgacgtctttcagagttattactccatcagaaaacaaaatctccccatgatgtcgacactccttgaataagctatcgagaagctgtggcggttaaaagaacaaaaaacacacattatttgagcacctaaagcatggaatgagactaaataaggttgcaccgaattgagaaaaagtgacattacctcaagtggctttaactcgaccatgggattattgaatgaagctgttcgagagggtggatttttgaaagagccactctccctagataaggatgaggtgcgggcagcattgtgtgatgaagactcctttcggtagtgaggtctatcagaacaaaaaatttgtgaaataatgctcattcatttcggtcaatcaagtacataatacatcataaacattaaaaaaatatctgggggtgtttattaggaggaccttggaaaacaggacccttctggcatatcaagaatatcattgctgtattcatcgtatattgccagcgatgcaacaatatagcgaagcccgaaccagagagaggattcctgcagtccaaaatccatatagtcagctaatgtcttcttgaacattagtagcaaaagttgaaactattatcgtagtttgaactgagataaagagagtaccaaaaaaccatataagagataaaagaatgacctgataaacaacaaccccggcaaaagcaccaataaagacactggccaaaatggaagccattactgctccaacaacagccaatggccaaagtaggatagcaaggccagcaaatggcacacatattgtttccaagaaaggaccttcccgaccgataaggtcatgaaacaaacgatgccaccccttaaagagcatgtaaatgcttttgaatagggcaagcattgatatcactggcatatcgatcatgaaaccaaggactcctgctataagagcaccaggaagatagagcaatctgcaaaatgaagtacaagaaagttttgtgaaggaaataatgctcatcttcatcatcatgcagatcagcacaaatatcactcaattgaccacaagagcaaataatgcaaaataaaattctaacataaatgaaatacttttctactacatgtttattgtatgagctactaaagaaaacttaagcctattatgcatactagtctcgtgaattacatgctatataaagtctactgttgactaggtaaatggttttactttgaataatagaccaatattgaagggacttgaacagaaaacaacttgtaaactctgcaaacctgatctcataatatttcccattaggaggcccttgttttcttaagtcatccaaaattgagaaatatgaatggacacaaacatctttaaaatccctgataacagtaaaacatcctttgaaggtgctcacagttccatcctgaaaacgttgtaaatatcacttcatcgaactcaataacagcacagtgattgttcacataagaatatacactagaatgtcgagaaaagacatacgtaaaagcagtgatataatcggtttgtcctcccttctccaacagcttcaaaagtagcaagtatcggcgaaaacaagccataagcagctccacccacaatactaccaagaataccaaccacaggccacagaatcaaactcactggtagtacggatatgcagaggaaaagctttagaactggtcccaattttttagccctaccaataaaaaagaaaaacaaagagaagggtaagaaatgctagaaaaggactctgttaatttaagttgaatatgagaatgaagagatgaaaatcctccaagaaaagtaccacaaaatgcaataataggcccagtaacattggggaagccagtaaaccagtatgacagctgagtttccaattgacatgataagacatatgatggggcataatatgatacctgaaacaaaacaagtgaactggctattcatatttagataaatctattctaatactctagtgttaaacctgaaattgccactcaattctgtgttaactctaatcagcaaacaatatcaataggtattataacagtaagtaactcaatataccaaatcaatcaatacaagcccttttcaagcaaaagaaaatgaattaaatgtttgagtaaaaaaaaatgaaggcttat

SEQ ID NO: 185048 - DNA, 5873 bp, Cannabis indica
taaaaaatttgacagcattaacaatttttattttttgttttaagatttctattttcctctttgattatgcactctcatattgacttattttctgaagtctagggaatcaaagaaatgcataaaaatctatgaaaaattggacagcataacggcatagagacattaaattctcttattttcctttggctatatctcacttttgaagatcttttatggcttaaaaagcatagatcaaagtggaccaaagagaaaataagaagatttactggagaagaaaagaaaaaaagtttagaaagatgaaaagaaaatacggaacaaccctaatacttacaacctctttgaagatgtgaatatgtctagtatttctctgtaaattttggcacagttttttttttttttccttttttcctcccttgtctcgtttctttctctcttttttttaaactcaattttacgatatatgctatttgatagtggagatgtgagtggtggatagttatgagttagtggagagaaaaatagggatatattactaattaataatatatatattttttagctttttttagtttttttttttttttgaccgattctttttatctttattattatacatattttatataataaaatttttatataataaaatttaaaaaaaaaaaaatggttcaataatatgtaaaattaataaattaatatttgatataatttacttaactttactaaataaaacttataatttatttcatatatataatttaaaaaaattttaacattcagcaccttaatagtatatgacagatactgaaaactaatcctaacaaaaaatttataattgctttcaattataaaaaaaatcctaacacagtattcaattttttttttttttcactaagcctatgaattatgtaaactatgcctaaaaatcagtatatttggcgaactaattgtgtcttcctctaattttatcttttccggttattgaaaagtatagaagagtaattgaatcatctcttttgaaagttgaggaccttgactgagacagcaaagacagtaaaaaaaagaatactgaagccaataagaacaatggctgaaactccaatcataccaggaccgtagccaagactaacttcaagatactcttttacagtcccatcgaatccaggtcctacaatccttgtttctacgtctcctagctgagatgatataattcctttcagtgtccatgctactgggcagatatagtagaaccaaatccaccatcctggtatgttctgtaatataataacaacatcaccacacacactatattggttaatttttatgattttcaaatgtgaaagacctcacggtgtttaagactaaataacttgatactgagatggagtatacttactggctgtgggacgagaaagcctgaaaggagattccatagagagtaaaatgctgatgatatcactgctgctaagttctgagatggtgtaagaccaacagccatcatgccataaaacgtaaagtatgtgaatgtcaagaacatgaacagaaggtaaaggaagaattttcctgcaatatatatagagagaggaaacattgattagaatgagaaccgtattaaaattattcctattatataaaaatctgtcatattcaacaacaaatatcataaggaaaggtcatgttgtgtcatccaagactaattatatcatgatatgtgataaagtccgtagagattggaatctaccctaggagaaagaacaaataatttcctagaactcataattttcataccaccattaaccaccatgaagaaatgtgaaaataggaaaggcacctataacgctacccaatttgtttttttttttcctcttttgtaactctacccaatttgttgatgtcttatagtagaagaagaaataacaagttttcatctattctcacacaatgtgatagaaatttctgttgctggtttaaaataagttgaagcactataccctcctatccccaacacccaaaaaatcatgtctaatagaaggaaaagttaccaattgtcctttcatagttaatcatgaaataggtaatgacaccataaagtatggtctgagccgcaatatatgggatctctactaggccctgtggcaaaaaagaaaaacagaaatcagcttctctgtcactaaaaacaattgcaaaattctaaatgggtgcagaaaaattacctgggcaattgcataagcaaacggagaatacattccagcagctttctctcgatagaatacagttctttcaattgaaacgacgggttgtactgaagatgcattattgaccccaagaaacatggtagcagcgtaaagagctcccataaccataaacaagtcttgggttgattccctacacacaaattaattatatgttgaacagtttaatatctttgtaactacaataacatagaaaacagtaatgttgaaacggatgacataattaaactatagtgtagtgttctcttctcatattaaagatcaaatatgatgatttattaagttctggcgtcataaaacatgttcgtctctataaaattacgaaagttagttattttgtttatttgttgaagaaaatttaatgaacaagttaacaaagaacaatctacagaagaaaaataattaaatattggcttttagagagaaaaatgcataccttctagagccaatattccaaaatactgaaccaaatatcaatgcgctcactgtcgtgaaaattaatcttatggcattgtatgctggacttctataatataccagattttgtttccacaaacatatcaaaaattgagagagtctatcttgtgaataagtggaagagaattttaatggttctgaaccagaagctggagtactaaaatgctcaatagaagcttcaacctccctgaaacaattagaaaaatagtcacatatgcagtcgtataaacataaggcacaaaaaatacaatagccgaagtgctttcatagttcattattcaatgaaacctaacgtacctgtattgctctgaatttctatagatagttgcaaagtcaataccaagtctttcttcagtagcaggtgtagtaacctcaagcatccaagttgctggattataaccgcgaggaattttaggaatttcactaattttctggacatgaaaggccagtgtaagaagaagaatgatcagcatatattataagcacctttctcagaaaacattaatgcaacaatgaaagagatttttcgcagaagttaaatcatacctcaaaatagcttatcatcgtttgtgagtgtagaccaagtttccctccatatatgagacggcctcctcgtttcataagaagaagctgttcatcaaaattagttagacactgaacagaaaaaaaaataaacttactagcattttgtattctactaagaaagttaaccaacctcatcaaatgcctcaaatatatcaatgcttggttgatgtatggtacagactacagtccttcccgtatcaacagtattgcgtacagtcctcatcacaatggctgctgctcgtgcatatagtccagatgtaggttcatccataaaaataatagaaggatttgccacaagctccactgcaattgttaaacgctttctttgctctgttgacaaccctgtactacccggtaggccaaccaaagcatgccttagtgtgtcaagctctactaatctcattacttcctcaacaaactcctgtaatgcaacatagttatacagcattaaaacaaaattaaaaacattactccacaaataaatctataaatattagtatgaggttgcagctcacatgtcttttctcttggctaacttcctttggaaggcgaagagatgaagaaaaccatagagactcttcaactgtcacttgaggagagtgtatatcattttgctcaacatatcctgaaattcttgcaaaagcgctttgctcttttgggtagccagagatcttaatttcaccttctatgtatccaccagttttcctcccggctagcacgtccatcaaagtagtctttccagccccacttgacccaaccaaagctgtgagaacaccgggtgagaaaactccgcttacctccgataagagctgtaacctagtttctggtacaccttctgacctcatttcctaaaaaattcagcaagatttgtttgacacaatatttaacacgagttctttgaataataaaaaaatgcagacatttatgaaaattaagaaccatacctttggcatatcaacaaagtaattgacattattgaacgtcattgtcaatggtttaaatggaagaatcattcccttctttttgttgtcatctatagcggatgcttttagttcgactccattctcacactctgcataatcaagtagcaatagcaaaaggtgagaaaatcagagctatcttgatctaatgaaatgggcaacgatgtaatagtataacaaactattagtgtgaatcataaagatgactaaccaccatttgctgaatgattgtctttatctacttcagttggaatgactgtctggggttttgtaagtgctgtgacaaacataatataaaaacaacgaaggtgaaaagacaatttactaaagaaaacaatgaaagccactagcaccaaagtttattttagacttacgattaagataggtcaaggccaaagtcacaatgttgttgaaaagcaacgcataaaccaataaaactccaactcctagccagtaccaataatcacccgttggtaagctatgtgagtggagaacattatacccaactgtgttgttagcaagaactgacttctgcaaaattatagtttcgggaagaaataaatatgttagtacacgatttaatgaacatgtcgttaatgtatatggagaagcaaattaaagtttgagcgaaaattttctcattaagccaacaaagcttacctccaaccacctagtggctgtaaattcgttgacggaaattgcacgttgtccataagaaagtggagacagccaaaaagcccattcccaccatggcttaatcatttctgaaagaaagttaaactaaataaagtcacttaattgttcaaaaaaaaaagtcacttaactgctgataatccatagcatattgttaaataaaacaattctactcatacccttaggaaggatgaatccacccaacaagaaaataactagcagtgcagccgatccaaatgtgttggcaatgatcatatctcgagcaagggatgccatcatccggaaaagacccaatgccatttggtgcacagaaaagagtaaaatcatgaagcgcaaaaatctgttacaaagaagcataaacgaatctatgtaaggataaacaacataaaatgtgcaaaggattacatcaacgacggtagtcagatttacctcccaaagccaggggcgaaaccaacagtgtagtatacaacacaagaccagacaacggcttcaataacagagtaaggaacccttagaagccaactacaaactgaccatgcccatgcaggatgaaacaaattgtccctttgtttgtaaaacactggaagacgagatatcataagaggtagctcagaaaatccattgaacatcatgtgaaccagaccgaagaagaggcaagccaggtaaagattgccctctatctcatctacagggtgtaatcttgttcgaagaaacattgtgcaggtgacgaacccaacacatgccacctttaaccggtataaattaaaacaaagcagactattaagactttgaatataaattgttcaaataaaaatatatagaacatgatatacattgcggaattacacaattttaatttgagtagtttgaaagaaaaaaaaaaaaa

SEQ ID NO: 185049 - DNA, 5566 bp, Cannabis indica
atttattttcattattatttttagttgttttgatctataaaatttcatggatcatgtgattcatgtgacacatatttatttactatacacaatgaatacacgtataattaactacattatatatttagtatataatatacattcattttatataaaatatggctatgtaatgaaattcttagtttaactgtattttttataaatatttttaaccatatttttaattttgctagtttaactatgaattaaaataagagacgattttgctcaatcaggcacacaacgatttaccatgatatcttaatttggttttattgtttatataaaataaatatacataatcacatccaaatggaataccaagccgcaatagctaaaaatattctcaaagatcaaaatctcaaaccctattttaagaattaaaaaaaaaaaacattatctaatttaaaaaattaaacatatattgcacttaacattacttgcacataatatatatttatataaacataactttaattatttatcaacatagaaaattaataacaatatattcatttggtaatatttgaattcaggatatacaattccagctggttggcttgtcatggttgttccatcggttcttcatgtgaatcctgatatatatgatgatcctctcacttttaatccatggcgatggaaggtataattagtttattagagagagcatatgataccatagactttttaattctatcgatatcattattataatatcttatttatattataataagctccacttttatcgacggcgtctatcgtatcttatcaagttttcaaaaaaaaaaatcattactacaatatatatatttttaatcataaagtttttggatagtgtatttattggatcataaaatatagtgagtcacgcaattaaaaattatatatatacatttcctttttaccattggaagacatactaggggacgtgaattctaaaaaataatattatattatgggtcatgaaatgtacctctttaatattatatatatcttgtgagtatgttatcactcaaatcgaatcagatgaattcagaacaagatccaacaagaatgaataatcaacgaactaatatgaaagtaaaagataaataaaacaaaactggataaatgaaccacaaactaggtgaatgagaacagtcataatactaaagatctttattgaataaccagtgttcaaacaccaagagattacaagcaaagcaaagctaaaagattttaagtaaaaattcctcacatgagagttataggaccaaatacatctatattctatacaaccctcctctctctcagtttctcttagctctggattttttttatctctaaagttctcaacaaacttagactaagagttagtgagttgttaaagaaaaaattaactaacataactgactcctgtctaaggggtcctcaatcataactggacaatactaggggttgagttaagcaacaattctatcttaaaccacttactaatattgaaagataacatgttctgaatgagccaggcaggctcaacaacatttttcaatgttgagtaaacttagacaatgtctaagttttggtaagctaacactttaggtgagtatattagctggattttcttcaatttggatcttcttggcttgaacatcacctctggatacaatttctctgataaaatgaaacttaatgtctatgtgcttggatctctcatgcagcattaaagcactttgattgtcacagtagacatagatttcatttgagttcagaccaaattcctttgtcaatcctttcaaccaaactacttctttgaaagactctgtagcagccatgtgttctgcttcagttgttgaaagagctaccactttctacaaatttgatttccagctaatagctccacctaggacagtgaaaaccagcccttcaaagatcttttggtatccaaattagctacataattgctatccacatacccaacaacctctccattagaccttgcatctccattaaagactaggcctaggttaatagtacatttgatgtgcctaagaatccatctaactactgtccaatggtagtcaccaggatctgccatgtatctgctaacaacacttagagcatgggccaaatctagccttatacaaaccgtggcatacgttagacttcccactagacttgtgtaaggtactttttccatgaggttcctttcttttttagtattgggacattggttttgggaaaacttgaagtgagcagccagaggtgtagtcacagcttttgaactgagcaagttgaacttttctaatgccttcttcagatagcgggcttgagataacctgataaaaccattagtatttttgtcaatgtcaattcctaggatcctgtttgtcttaccaagatctttcatatcaaaccccatgctcagtttctgtttcaactcaaaaatatcatttttgtcatttcatactattaaattatcatcaacatattgaaggagataaatttttttattaaagtaaacataggggtcatatttacttttgctgaaacctattttagtaataaaatcatcaaatttgatgttctattgacctctttaggaggcacacttgatctagattcccatagctaaatccttcatgttgctccatatacatatatatcttcttctaatagaccatgtaagaatgctattttcacatccatttgatccacctttagcttgtctcttgttgctctagccaatattactctgattgaagtttgtttcaccacaggtgcaaggatttcattaaagtctataattctttctgtgtgaaacctttggctacaagtctagtcgtatatctttccatttttaacacctgaaatcccatctttgtgcgtaaatatccatttgcaccccactggccttataccctttggctttctcaccactatccaggttttgtttttcaccaatgagtccatctcatcatccatttcccctttccatttgtagccatcaagtctattgagagtttcctgcactgtaagaggttcaacactgatttcttcttcagctacagctagagcatatccaatgaagtctgcatagcctatccttttaggagccttgatttctcttctctccatgtcccttgctaattggtagtcatttaattcactttgttgagtgtgctcatcttgaccagtatcaccagtttattcctgaacatggactggtttttcaacttcaaatcgagttgtggtttgctcttggctggtgactgtagttgccttatgtttcataggcatctcatcttctctaaaaaccacatccctactaatgatgcacttcttgaaacctttttctaaacaccatagcttgtatcccttcactccattaagatatccaatgaatatgcacttgacagctctaggctcaagcttatcttgcctgttatgtgcatatgttgtgcaactaaacacttttaagtgttcatagctgggtttcttgcctatcaaaacttgttgatggattttgaaatttaaagattttaatggacacctgtttatcagattgcatgttgtataaacaggttctccccaaaaatttgtttcaagattggctctctttaacatgcatctaactctttccaatagagttctattcattctctcagccaccttattttgctgaggagttaactaacagtgttatgcccaaaaatacctacactattgtagaatttaacaaattcccttgagcaaaattcaagcccattgtcagttcttagtttatttactttcactccaatttgattctctgtaagaattttccaagtaatgaaactatcaagagcttgattcttagatttcaagagtattacccataccttacttgagtaatcatctataatactcatgaaataatctacttcacctaaagatggaactctagatgctcaagggagttgtagtggtgtgagcatcagtaccaaatttcactctacaatattttccataaatgcattctcaaaaaaactcaacctttccactcagtttgccactgagaactccctacttcaacagttctacaatactcttttcactgatgtggccaagccttttatgccataactgagtttgatctgcatccttactagtggccactgctatagttccaactataaccttccttgttagaaaataaaggccatttctgaattcaccctttattacaggtgtagatccatttagaaccttcatggaacaaccttcaatctgtattttgtaaccatttgttgctaggatacccacagatagtaaattccttctcaattcaggaacatacctgacatttgctattgtcctattgacatcatcatgcatattgatgcgtatagatctaatcccttgaaccttgcaggctttgttgttccccaagagaactgatccacctaaaatatcttcaaaactactaaacaaatctttgttaggacacatataaaaagaacaccctgagtttaatatccactcattaccagatttctcagttgacacaacaagaacatcagatgaatcataaccatttgacactaactccgcttctcccttttcattattaatatcttttttttgtcttaagaatgtagcattcatttttatagtgtgcctctttcttgcagtagttacagaatttacctagtttgaactttgattttgacttgtgatggctatttcctttgtgactgtgggacttcttgtgattcttgaaaattttcttatcaccttttccatgagccataaatcattcttcattgatttctcccttttcttcatatttcatctgaatctccttcgagtttagagcagcctttacctctgccatgttagagtatctttgccataaaaataatatctacaaagtactcatatgatttaggaagagaactaaggagaagtataccttggtcttcatcttcgatcttcactccaatgtttgacatctcaagaataatccttttcatctagatattttcttaaatcatttgtgtcatccattctgagtgtatatagattcttcttcttcagaaaaaacttgttggccaaggatttcttaagatagatcgaagccaatttgttccataatccagttgttgtttcttcatgagaaatttctctcatcacttcatctcccaaactcagtagaattgcactattgtgccttactttctatgtccttcttcaaccttacttcttttgatttcaccaagttcctctgtgtttaatgcctttgaaattccctggtgtacatgaagggctctcattttgatcctctacagactgaagtcattttcaccagtgaatttatccaccttaaatcaagccgaggaaattgttggattcttgatctttcaataacttctttcttcttctcagcctcgagtcaaatagttcttaatcatagaatctaacccgagctcagataccacttgttgtgattatgttatcactcgaatcgaaccaaatgaaatcagaacaagatccaacatgaatg

SEQ ID NO: 185050 - DNA, 2873 bp, Cannabis indica
aaaaattattaattagccaagccaataaatcaaaagatcaatataaaactcaaagctgatggccaggaggaagacccggccactaaacttaggagacctcaaacaagagcaataggggcaagagaatgagctaatctattataggaccacttaagaaaataatataggaccagccatttttaataatagtgctaaattcagtgaaatatttttttttactcaaagtagcttgcactaaacggagacaataagagaatattgtcagatttgtgcaccctaatcgacgacaatggagcaagctttgcaacaacgttgtcccctctcacacatgaggctcatagggagcggagccattactgttgacacccctgagcaaacaacctctcctgatcgactcaacattacaatcccaagaccaatcttccactcatcggtatttttcaaaatagttcaaaatattatcttgagctcaatttgatatttttttcattgaacaaagcaaaatgctcaatcaataatttttgcaaaacacaaaatacaaaatagtatttactttatttttattttattttccaatcattttgtttaatagtattttgtgaaattcgttataaaatgattttacatagcacccctctacaccctcgatgaaaaagttatgctatgtttggtaggagggatagagaatagagaagatggagagttaataaagaatgtagaagagggagggagagtgaagtagcattctttttaagttgtttggtagaacggatggagtggtgagacgatagagagtatttgtttttgaaattattatattatccttatacataatattttaataatatatttagagggtataattgtaatctccaacaattaagaagggagagtatggattcttctattaatggaaggattgtaaattgagaattatgaagaatttgctctccattcaactatgctttctctcctccaatctctcatcccaaacaagaataattgttatctcctctcatctctctccctccaccaaccctcctcctaccaatcctagtgtcagtcacagggaaaaaatgtactacattctaggccctaaagtcaaatctctttgtgaaagtatttcgtaaaaatggttagaaaaaagtcgtcatgcaaagtgagtgtaaaatggtttattttcatcattattcaaaggagtattgtttacacaattcatttatattttgaatgttaatataattatggacttcaaattatcaatgaaattaaatgtacatgattaagcatattattttggttttgcttagacagattttgaactccctattagtacaactatagaataataaaagtttggtttagattctaattataacttggtttccaattttagtttggtttggtacttgtcaaaaaataatgaaaaattatgataaactaagttgctcacatcacattcattagagatattgtgtttccccttataaaaggcaccaaatctgagctaggggaccactagtataaatgatataatactcctcacatgggttcatgtctatcaacatccatgattttgtacaagctctcaagcaaatggaaacttgtggaagattttatttgtacccttttagcccctttttccatcacatattcttccatatgtaatataatgtactttaaggtaattttataccacactccaaaaataaatgtttcagtacactaactatttctttctgtatttatgagaagtaactatttatgcaacaaatatagttaaactttatttttagtactataaattattcaattttttaaaaaattaacaagtgattataaataactacaatgtacataattttacaaaaaaaaaattagctaaaaagatctcttaaatagcaaaagagataaaagatataacaaaacatactttcttttttttagtgtactttagatttctcttatactttatataacaactttaaattgaaaattttgagtatagtggagtgagcatcacttaaataaaataaaaaaggggtactctttccttctattcaatttggtgagtgcccaaattgtcatgaaagaaaatgcattgtaaaagaaagaagaaaaaaccttctctttttgactatgtcaccggctttcttggctttaattgaactgtgtatgaatggagttagtatacgtacacatttgtacggtcaaattttgtcggttggaaaaaatcagagttgtttgtttattttattggtacctatctttattttatatttagatcttataatctagttgaagagagcccatgtaaagggtatgtattaattaagatttacatggagatttaaggagtggagagacttttaggtgactgtttggtggaaaatataagtgagaattggtgagtttgttttagatttatctagatcccatttaattatatattggatattaattttataatctaatctgatcaaattaatttcagtcatctaataaatggattgaatccgttctatttattgaatgtatttcatgtatatctaaacctgagtcagcccaacattttagcggtgacaatttttttaaaaaacattaataaaaaatataatttttattgaaaaaaaatacaaattttgtgaaaatataaataaatatatgtgagaataaaagttaaaaatataaattttacggggacaaatataaaaatatataagaatagatatgaaaaaaattatttttatgaggtcaaaatataataccaaaaaatttatatacaaagtttatatgaaataaaaagttgaagaggacaaatgaccccacatacttccctccgtgtatacctattggtttgattcaggtttatc

SEQ ID NO: 185051 - DNA, 4290 bp, Cannabis indica
agtgtaaaaataaaaaaaactcaataaaaaaaatctattaagtcaaccccaccaccgagtcaatgttggcctcatatcagtggttgcatgcaatgtttattctctctagtgtgatcaaaacaaatagctagttgattgatgattggttgctttttcaccagtgtagaaagactacaaagactgcgacttcaacaaatatcaacgaccactaatttaaacaagtcttttttgtggaaaaatagaaaatgaaatgggataacgcgttaagaaggaccatgggttaatttcaacactttaatttcgggctaatatcatccaaattttcaaagaaaaagctcagaaaatatgttcacgggaagaaattctatgcttgttttcaatttaattacaatgcagaggaaagtaaattgttcccagatacatttttattttttgttcgcttactaccgaaagattatataatagttattatattttgtttccagatacttatgtttcaagaaataagaacagaaccagacttgtaaataattgtatatagactcttataattattttaaagtatcgcagatttgttatgatgttgtataactagagtaattggagataaactagataattaattacttacgaaaaattaaagctaaatagtaaataattaaacaccaaaaaattgccaagagtgagctgattagcagtgaaaaaaggggaatttttactcctaaatcctagttgataacgtgactttttagttctgaatacgaatgaattgctatggggcaagatagagataccggttctttataattttattaaaataaaataagttaaactcaatattcaattacactaataataatatatagtgtcgttttaatatttttttataaaatattgagttaattaaaattttcctgcggtgacacgtatcaatttggaaggccatagatcacccagaaaaaatgatctaacgtaccaaatttgagcgaagacttcagatcgttaaatgggttgacttgactgacttggctaaggcctttatgtatgataataacaattatcccgttgaacacttcaaagaagcttacaagtgtattcccctaataaatacaatgcaacattacttttcatccagttcgttctatttctatagcgactttcagacccatttggcctttttttttctttttaaataaatatatatataataattggggccatttataatggcggtttgaaattttcaaagatgttttgtagattattaaattaactaaactaaggtttaattttatacaaggccaaatggactagcatgtaatgtaatgagtaatgatatacatattattttttccattccaagtttccaactcattatttaattttctattgcatctcaatattctataggtagaacatactaatgaaactattaaaacatttgacttcacataatttaattagcatttaagcttcctcgatttggaattaatcactggagtgtgtaataaacaaaaagaaaaatataacagtcttgtttcttaaatcacctcaatttttagtgccttatacatcagttactttgatgtggacattatagcatgacgctttctgtaaatttaaggtacttttttttacctcttttctgccccaaatcatttaaatagttaatttttttctcttagtaaaggtagcaaccttggtccgaattttctattgtattgtagtgagagacagcctaattttataaagtgggctccaccacggacatgttttttccacaatggaggctttctataaataagaataagcaatgaaaaaagaaagatatgaactatgacctcttaaaatcttcttacgagagtccctaatcctatagcagctgttaaattacctgtaatggcaaatttcgttgccaaagctcagctctctctcctcaccttcttctccatcctccttttcatccatggaagaccagttctagaccctgtagatcttaaagccctctctaacatccaaaaagacttgggcatcagaagtcaacgtcaactctccattgctccatgtaacttccccggtgtatactgcgagagaaggctctcagatgacaataactatgtccttaagatcaccaggcttatattcaaatcccagcagctcactggtactctgtccccagccattggtgagctctccgagctcagagaactctctctctctggaaataagatagttgaccagataccatctcagatagttgactgccggaagttggaaattctcaaccttggaaacaacaagttctctggagaggttccaaccaatttatcgtcgttaattcgccttagagtccttgatgtttcctccaatgagctttctggtagcctgagtttcttgaagtattttcccaacctggaaaagctttccattgccaacaatcttttcgccgggaaaatcccagcgtccattcgttcatttcgcaatctccggttcttcaatttctctgggaaccagttccttgaaggctcagtaacacaattgaaaagggtcgaaaaatcagcttctagccttccaaaacgttacatattagctgagaattcaacttctactccaaaaagaaatgcttctgcagcagcagcaggaccttctagagctcaagctccatctccagcgcagttaccccaccacaagcataaaaaaaaccgcaaaaggaaggtacttgggtggattttgggatttttggctggatgtgtggcaggtggtatttctggttttatcttctccctgctatttaaaatgcttttggctattgtgagaggtgttcgtagggacgctggtcctgcaatctacagtcctttgattaaaaagaaagaagacttggctttcttggaaaaggatgacgggcttgcttccatggagaagataggacaaggtggttgtggagaggtgtacaaagctgaattgcccggaagtgatgggaaaatgattgccataaagaaaatagttcagccacctaaagaagctgcggaattgactgaggaagacagtaagcttctaagcaaaaaaatgcgccaaatccggtctgagatcgccaccgtcggtaaaatcaggcaccggaatcttcttcctctattggctcatgtttcccgacctgattgtcattacttggtctatgagttcatgaaaaatggtagcttacaagacacgttaactgctgtagcagaagggaagaaggagctggattgggtaactaggcacaaaattgctataggaattgctgccggacttgaatatctacacttgaatcatagcccacgtataattcacagggatctcaagccagcaaatgtacttcttgatgataatctggaagctagaattgcagatttcggtctagcaaaagcaatgccggatgctcaaactcatatcacaacatctaacgttgctggaacagtgggatacatagcaccagagtaccaccagacactcaagttcacagacaagtgtgatatttatagttttggtgtgttgcttggtgttctggttataggaaagcttccatctgatgagtttttccagcaacagactgagattggtttggttaagtggatgagaagtgtaatgacttcggaaaatcctcagatagcaattgactcgaagctgatgggaaatggttacgaggagcaaatgctcttggttctgaagattgcttgcttttgcactttggataatccaaaggaaaggcccaacagcaaggatgtaaggtgtatgttgtctcagattaaacattaagttagtctttttaatgtcttaaagtgaaaagtccatgtaataatagtgagttttaatttcagcagcagctctaagaggtctaggttgtataattaatcgtccatattctgtggttgctctatattagagccagatgatatacaagtgtagaatgtttacaattaccagagctttcacttaaactcgacctaactaagcaaataactattggagtgaggtaattttggtcgaataaatgaacataggataatatctcatagctttgaagaatggaccttaaaaggaatccaaaatacaatgcctccaactaaaaaaaaagtctaatttggctataatgagttttaaatgggccaatgaaatcctctccagtgtaatgatatcaagtagtgcaatctaaaaatcagaatagcattacaagatcactttgaaaaataaaaacagttattccaatttcctaaatattgcaaatagaaataaattataatgggaaatttgatt

SEQ ID NO: 185052 - DNA, 2707 bp, Cannabis indica
gacggtggcaaaatgtggcggtgaagggtggattagaaagaataaaaagaagaaaagaggctcgatgatgaatttttattcagcattgacttttgtcaacaaagctaggctcgcggacaaaagtttttaagtaaaaaaactaaaacatagcgtttaatttattgtaaaaagatattctaacgagcctaattgcgccaacataatattttacctaattttacccccatatttttactaagtgggaattgaaacgccatgcaatagttttgcaggcgtatttatgcgttgacaaaagtaaaaatgaacaaccaaaagttggaaacttttggcggttagttttccaacacttttgtcgctaagtaatgccccaataaaagtaaaatatactgtaaaatttttggctccatttggctattggttcgaaccttttgctgacgaagtaaagtagttttgccggtatagaatcctttgactggcaaagtaacttgccggcaaaggtgttttccatagagaatctaggggaaaaagtgccgcattttatcggcaaagttcattgcgccagtaaaagttgacttttgccggcgcagttcatgaatttcgctggcaaaatgtaattttcttgtagtgatatccattctactttcttcatctactaagattatgcctaagagacaaccttgtatttacagctggattactagagcatcatgacgaggtaattttatccctcagagatcatttttggtgaaagtaattagagcagctagaaaatacatttcctcaggtaaaatgtagttgacttcgtgttggtgagctcagagtctctttatcctttcaatagctttcctttcttgatgtgtgatgttttcctagtgaatagttggttctacactccctagaaacgtgggattatgtttcaacactgtcgcttttcctttgaatgatgtgggctccacccatgtttgctgcctcagttatccttgagttttttctcaatgtaaggcttctcaactcgcctatcatgactctttttcacataatgtcagaggcctcctaccttgatctttaaatgtatatgcctgatcagctacctgcaatcatttttatagtgacctacatcattgtgaaaggcatagtgcttcacccgatcgatctcttctttcgattggtgcaaccattttgtgaggattcctccatattggtttgtctttgttttcttaatataattaaataggcaatgcgtcgagttcgacttcaaattctatttcgattcatggactcttatctctctatccccttaatttaattgtgctctggtctcaaattatagctcttgtagaatttctctccagtacggggaggctgattcccttctggtggcgtcgagatccaactctccctactctttgtctatttttgctttcttgttctcatagatagcgccgattgttgatgctgaaaattctttacactaagatcatcccaattaaatattacaactctactttattacacaatttctcctaaattggcgatagttcttctctttgatcgctgaactaagatttgagtgaagtgcttttttggagatgcaattaggcagagttttgactaactgtgtggtgaagaatttgtgctccatttgaatgttggggtcttctaattatagggaggagttggtactgcgctgtaataccctagaattataagattggattaccaaaatcctaattagagaattatgtattattgagaaattatattattatataatttattatatgtgaatttatatgatttatgatattttaagaccccgttggtgagccaggggcattttagtaattttgacgcgggaagggtaaaacaatagaataaatttatttacgtgcttatggaactatattattatatagaatgcctgtgttgtcttttttaggtgtgttctgacaggttggcacggtatagtcacaaccaggtatttcggcccgaaccgggtttcgggcccgaaatgcaatttgggattgaattattggaattttaattattgatgtataatcagaaaatatatttgagtttaaataggtgtcaaaggacatttttgcccttggtttatgcatcggctttatttggcccttgggggcaatttagtcttttgacctttatgtgataaatgataaaaaataagtgaatattttagaaaagaaaaagaattttctagttttgtcacagccccaaccaaccctctcaaaccctctttgattttcaaagttgaattggtgaaaattgacttgatttggagcttggaatttgtgaatttttgagcttagaatggaaggaagttctagctttatttgaggtagcttttaaagattttaaccttgtcttccttgctgaattttattgatgatagagcatgaaattagttgataatgatgttgtgttgcatgtttaatgaattggtgttgttttgatgaatttgggtgtgtaattgctagttattgttgtgcgttaaattgttgggtttggatgagatgttttgtgtattttctaggttggtaatggtgttttaattagtgatatgctgctggaaaaatatatgagattgaaggatttaaagctcaagttttagagcttgaagagttgtgagtttgagcatgatattgagttgattgtgcaatctaaaattgagagttttatgttgatg

SEQ ID NO: 185053 - DNA, 2611 bp, Cannabis indica
ttctgataaataaaatatctgaaattaaataaaagagaaaataataatttctttttttgaaaaaaaaaactatacaattagaagaaaagcctaaaatatgtttgttaattatgtattatactattaaacagaatgtgacatttaaatgagttgtaatattttaattggattgagacttggggacacacaagaagtgggacagaagatttggctcccttcctacctatcaaagcctataccataaaccagctgaaactccatttaaaactccaattcagagatggttttgtgttggattctaagctggaacatttctgaaaactctttgagcaaagactcgtgagcaatattaagaagctggctgtcattgggatgatctacatttgcttcagcgcaatcactcgatgaacggaatcctgcaagtacatttttaatacttccaactttccggtctcgtattccacaggggactatccaatcaaaaggggttaaatctgtggtgacattcagtgctaggccatgatatgctatccattgagtaactcttattccaatggctgctagtttctgattgtctgaaaaaaaaaattagatctattataaaatggagtatgaaacttaaaggtatggctattgtcaaatgtggattatgaaaaggaaagtgcattatttgataatgacaactcaaagtctgttctaatctacatatatagagataaatttgtgtatgagttccttactcagcagacatagctaagaagttggtaactcctgatttcttggactaattttcaaatgtgattttggtgtatataccatgtttttgacatgaaaataaggatttaaaggagcaaactcatagcatttgcagtttaccactacaatcttagatttgccatacatcaaaattctatttatcagctgtcacaaagtcaagagttaaattttatcagaaagagctaaagcagtacaaatatctatttatgacctctcacacttaagataaagactcatgttatatttaagttaaaattaatgtagcaaatactatgattttctgatcctcaaattttgtagatttgggctaatttcaaaatataaatgaaaatggattagaaaagcatgaaactaaattagaaggatttattaggaagcagcataccgacccaaacaccagtcaagccctcaagtcgagaagccttgatagagaatgttttagttagaacgcgaatgactacctcttctagtgccctaaggtaccagtgtaaatccatcttgtgattccgaagatttataatggggtacataacaagctacatttgcagcaaaatttcagaagttagtttaattgacagcagtaatggattgacttccataaactttgtagttttgcttaacttacttgaacaaattcctatagtaaaatctgtagtatttactcttcaattatactacaatataaaactacttcaataagaatttgagaacagatgctcatgaatatgaaaagtttaaagtataagagtgtctggtatgaaactgtaattacacattaattgaagctcaatatgcaatgtaaagcaggcgaaggtaaacggatctctaacatgtgtggattttggtacccatatgttcccaatagtagaattaaagacatggagtttagtttaagaaagcacaatctacaccaattcaaagtatgaagcattgaacttagaaaaagtaacaggctggttaaaaaatttacttggccaggaccatggtatgtaacttcaccaccacgttcagttctatgtacttcataaggagcattcttcaagtcgaaattaagaaaattctcagaactactcgtacccaatgtataaacggggttgtgttgaagaacaatcaaagtgtcaggacaatcttccttcctttgaatcatatcccttttctcattcactaatcttttctgccaagaccatgccattccatatggaattatctcttcatataaatcaaaacactcacagctgcaacagtttcaagttgaattagtgaagcttcataaagcagaaggttaactgcttgataaaatgaaataagagtacccactctttcctggttgaggaatttcgtgaggtgactttttgagtagtcaaaatcgactctgttcaaagttgactgcacctttgggagggaacgcctttgttggcgtggctttcttaacttgtcatgtgttggacataataagtttgagctaacggaatgtgttacagcaaaagccatatctcaattatctgcaatttccaacccgaaaaagagagttaaagctgctggttgtcaatccataaaaggaaaggaaaaaataaactaaaagatattactgcaaccatcaaatctattcaagccacatcattccattggttcttaagaaaaatccctacggtatcaaaaaagaaatagtctgtcaatattagatcaaatgctaagtaacagccagagatcttaaaatccacaacaacaacgattgacaaataaatgttacaagtcatactgtttcctaacatagttggatttttttccattgttaatagaatcagctacatatatgagcgtcacctacagccaa

SEQ ID NO: 185054 - DNA, 2690 bp, Cannabis indica
ttcataattaatttacaggtatatattgtaaaataatacaaccaaaaatatatgtatatatattttaacgcatggaagtcatatttatcatgaatgaattgaatcaaaccataccaatatatatacatataattgtttcagcttaactaaaatactaatttatgtagctcaaaattatacatgaaaaactgctaataacattaactaatgtataatatagctcgacaaggactatattaataaaccgtacgactaatgaaattaccttgatttgatatccttaattaattacttctactatcatttgtgtgcacagtttcagcaactctcaccgccttgtgactcttacaccccaaaataccattattctgacggcttctacctcccttgaagccgccgccgccgccactaccgctccttctagcggctttataatacttcacaccgccacgtccagcggtggctcgactagtattcatcgacgaggaggcggtgagtttcttttcgtcgtagccaaaaacggctgagctcatcatttgatcggctgcagccgcgctagccgtaacgacactccaatcaatgctggcctcgctaggttcataactggaatagtattggtcgctgttgtaattaggtgtcatatgcagagacatgttgtcgtttttccctaacagcacttgtctactagctggcttcaacactagtacagacgacgtcgcctgcgccggtggctgtagaagctccggagatcgggtggcggcggttatgttctcgatctcgaagagatctgagctggcatcactgtccaaattataactgctgtcttcaattttgtagactgaggaaatgtgcttgttatgttggtggtggtggtggtggtgatggtggttacctggttttactggaattgcgtcccatgttaggacggagagctttctctcaaggtttgttgccacgtcatcaatatcatcccgatctcctcctcttgaagttgtcgtttttgatccgaacacctccaacgacaaccgatttgggtcttctggctgatcaatattattgatcacattattattgctattattttctttattactcagaattggaaaagcaaattgatcttctgatcttttcgatgatctttccacaacagcagtagcagtagcaggagcacgagcagtactattttcatgatcgtgatcgtgatcatggtgatctgattgggctgtcagtactaattctcgcatatttttgttcagctcatgatgatcatgctgttgacgatcgacataaactgatttctcatccgaacaagatccactgcagccaaaagtagcgaaaatgctctttctatacccattcgttctgatcttcttcttcttcttcttctcactgttgctgttatgttgatgacgagatgagtttcttaataagaatgctgttgatctactagtccaagtactggcttcagaataagcactcggagttcctggagctaatgatctttccccaccgccgtattgaggaatatgatcgatgtcgttctccatcgtaattgatgatgatcgacggttaatggtattgagatgattattatttttattgattctattactagttttagtgtcttcgagtgctgtattgaagtatctttcggcgccaaacacgcagatttcgccttcttcttggtgatgatcgctgctattcttgttcttcattttttgattcaaattctcttccctcagataagaaaaagaggcatctcggaaattatgattgtcatcgttggaatactgatcggctctcacctccatggttttggaaaaatttcaggtactgtgtttggaaaaatgatctctcttatggtatatatgttattaggacagaaattcaactgatgtgttttgaacacgagaagttgtggatataagggtagtaataatagtaacaatatttattgcatgtgaaaggtgagttactttattacagcatatacatacatatatatgtgtgtgtggttgagataggtttgttggaaaatatatagcaattaataagttgatgatgaccatcatcatggtgatgaagtatgatgtgattagtgtgaccttgatcagctgatggtaaatgatagaattaaaggacaaggatgcttgacaacgggaattattgattgaaagaatatatatataatgtcaccacataggttttgttaagaactaatctttcttcataagtaagctttttaattttatttttggatttcacatggaacatagtttatcaaaatggtcctacttttttttttaaactttaatatgcaataatgtgacccctttttctcaatgaatattgaatgtgaattgtatactttaaattttctcacttacttctctaaagagatggtaaaaggggagagaaaatatatagaaaagaaaaaaaaaaacaaatagaatgaaatggtttttttttttttaactaaaagagtgaatcaatttattatataatgttgtaaaatattatggtgcatcctctaaaactaaatggtaccattttcatctttatgccatctacagagttttagtacttaaaattttatttcacagtgtacattattttactctatgatatatcccacaaatttccaagaaatttagaattatttagtgcaccgaaataagattaattcaaag

SEQ ID NO: 185055 - DNA, 1157 bp, Cannabis indica
agatacccacaaagctcagctgcacctgcaccattgttcaatacacaaacaaagctcaattataaatttataatccatccaaaattttctctcgaaacaataatcaagaaagaaattcatacccggcatgatctgaaggcgatcgagtccctgacgttcgaaatcggcgatagtttgatacgccttctgctgcttctcagggctccaattctcgatttgatgcaaaatatcgatcccagaaggactctcagccctaattctgagatactcgtcctgaccaagaactgcctggtacattgccggaaaatcgatgacggggacggtaagggtgccatccatgtcgaaaacgactcccctgagacgaggtttgggattgggagtggaagccatggatgatgagagagtggccattggaattggaattggggatttgaataatttgggggttgagaataggaaggaaatggatttggataagtgaaggagtggcatggtttggagtggagagaatttaaagggtaattggatttggacagttgttggttacgacatttttgttggattgtttgtttgttgaagctaagtgtgatttgatatactctctgttccaattccaaaactgtttggttggtgggaaagacttggaaaattgagaaggaaaatttgtgaattggttttcttccataatcaaggttgagtttgtagtgttgttgaccattttattaatttaatattttgatctaagtaaaggagcaaagtattttaaagttattacttctctttaatttatatctctatttagttatatatttttactctttataataaatacactagtttaatgtagagatttcttcaaattgtttttaataaattttcttaattcctaaaataatttatagctatttggttaattaagatttttttttaataaactttgacatgtaacatattatatatgtcttttaacttttgaattaggctgttcgatttaaggatttttatccaattgatacgtgtcgtatgtcgtattaaatttactattttttttctaatactttcaattatttcagtataaaagtaactatgtttatttaattattcaacaattaatgacagttagaaaaaaatgggtttgagattgagattaaaatagc

SEQ ID NO: 185056 - DNA, 599 bp, Cannabis indica
gttcccaataatatataatgatgtaacaaagaattatagattgatataattgtacagcatggcatcccgcgtgcctaatatataaatcgtcacagtgactcagcttcagaaaagtctgactcatttttggcccaaatatgttacctttgatgttgatacattaatatgtttcttctaattaattccatttaatatataaaagactttcgaccattcattaacgactagaattatatattagtactgtccatgaattaatcttataaatgcatggtccaacttcagtcaatatgtacgtattatataccgacagaattgccatataaatttttattattaacttttttttttgagaaaataatttttattattaacttgtattgtcgttcttttatttattttaatgttcgttatatatgatcaaatttatcatatggtgttgctcatgtacagcgtcctgtaaatcagtgtggaatgtgccatttcatttaaaaaagaaatgccgccacagattgacaatcaaacagatacactttttatttggcattgtatataaatagaatattaattaaaaagaattctcacaatatatatatata

SEQ ID NO: 185057 - DNA, 6070 bp, Cannabis indica
tttttttttttgaaataatatcacagattcacaacagctttgcaaaatgtaggcattcacaataaaaatatccataattggtaaaaagtaatgagaaaatgttctgaaacaagtaaatgagagaacttactttgtatataggtccaaaaccaccttggcccaacttattatcctctataaaattatcaatagcagtactaattttattgttgcagggagtgttaattataatctactattacaatctcttaattaatttatacgttagaatatttttttttaatttttttttcataataatattcgttatagttacaacataaattttttaaaaattctaaatagtttacagtgtcgaaaatagagtttctgatattccaatttactacacgtgttcaaatgtattttcggcactgtaaattattcgaaatttttcaaaaatttacaaggatattgttgtaagtataacgaacaccaccttgaagaaaaattaaaaaatatatattctaacatgtatttttgaacgtaaaaattaactaaaaaattgtaagagagagttgataataatggaaagttgatagcactcctcttatgtagaataatgaaaagtttataatacttgtatcttataaagcaaaagtagaaacttaaacaagattacctttacgaggctgaccatttggccgggtggaacgtggcatagacgaagtcaatctggtcaattatgtttgaataaaaccccctaaatcccagaatgaaactaccattggggaccacaaaggtctgatcttttcctccattgccaccactcactacccatctattattttttagatccacatagaacccgagttgatcaacatctcgatcagatctgatctcaattttcttgataaaatcatcacttcccaacaacagctttttactccaccctccctcggctttcccataactctccctgtgtcttcccacagtcgattcaaaatcaacgatgatgttattcacacgagtatcgcttcgcatttgaatcccggtaatcttcgttttgttcttgatgtactcatcgtacccaatgaacaagtcaaatggggtcttgggttcttgagcacctcgtcgaccaaactccggtgagaaactaatcgtgtattggatccgcggcgtaccgttggaaagggaaggcaagtgaggtatgctgagatcttggattggattgctatcaaaagctgaaaagattctctgtagtgatgccaaatcctgttttgcttgtacggctacctctcttagcttaaggtcactatatccaccgtaaaaatcgtagatggattgtatttcgtgaatttggttgatcaattgggttaccttagccaattcccctgctaagcccagatctctagatcccgtacccactaatttattccggtttattgcgatgggatcaaaaccatggccgacaccgacaacatgttcatatccagttgtttcaaatgcaagaactttaggcgcattaagtgtctggctcggaaacttgcgcgcaaactcaaccatgtcttctcttttgggcaactcactgtctttaacccccaaaatcatctgcttgaatgaaacctttgactgagaattttcaacggcggattccaatctcacttgaaaatcagcaccaagtgtgccgaacttgaatactccattggccttcagctccaactccaacttcacactttcattttcagtttctgtgtggaatgagtacactccaatatactcccctcctgtggtgatcgaggaaacatatgcatctccataatggaaaaagaattcgcttacatcactgatcggaacagcgatatcagatgccaatcgagcgttggtctgaaccctctttccttccacttttctagcaaccacaacgatggccaagcttttctctgttatattgagattccttaaaaaattcatcttctcatctgctgatcccagaagattgatgttgatgtttgctgactggttgatgtcgatggtgttcatgagtgaagtgtgacccttgcaaatggtgtaggtaacctcactttggacgccgtcggtgatgctttctccggtgactgcggtggagtaaccacttccagtcgtgctcgaatagccttggaaaagtatgactggccccatctctctctctcggcttaactagactttgttaggacaaagaaccaaaacaaaagacttatggttttttttttagtaagatttgcctttgacttttaatcaaaaccttaatattttatagggaaatttacataactctaaatattatacacatcaaatttaaaataattataaaaatatctcaaccaaattaattaataaaaaaatactctatcacaattaaacttatttatacttagataggagtatgcataaattaattctaataagggactaatttaattataattaattgtcaaatattagatattaaattgtgatcggattagattagatgttatttttaagaggagcgctaccatcaacttttgttacaatctcttagtcaaccttcacgtccgaaaacatatgttgaaatattttttttttaattttagtttaccgtactgaaaatacgtttaaagttttttgaacacgtgtggtaaactggaatatcaggaactctgttttcggtattgtaaactctttagaattttttaaatttacagggatgatactataactataacgaatatcgctatgaaaaaaatatttcgacatgtgatttcggacgtgaaaattgatcaagtggttgtaattagcattactctatttttaaacatccaattggattggatcagatagatggagtgtctaaaaattcaacacatttaacatccaatcaaattaattagtattttaatttagtttgaatgaataattaaattttatattgttatggctaaaatgtataagtatatataaaaattaacattaaaattataaaacagtgaagactggactccatgaccaaagcttgtcgcgaggccgagcggagggtcctccgtctcctccacggccacgaaactcgcaaaaacctccctcaaatccatgcccacttcctccgccacggtctccaaaaatccaaccaagtcctcgctcacttcgtctccgtttgcggttctctcaacaaaatgagttacgccactcgcctcttccaacagactccgaaccccaacaagaacctcttcaattccatgatcaagggtttctctttacgcggacccttcggaaatgccctgctttcgttcaatcttatgaagagtcaagccatttttccagacgagtacactttcgcaccgttgctcaaggcaagctcgagtctttgtgagtttagaatcggtcagtgtgttcattcccaagttctgagatctgggtttgagtcatttagttccatacagattgggattgttgagctttgttcaacttgtttgaggatggacgatgccaagaaggtgttcgacgaaatgcctcacagagatgtaattgtttggaatttactaatccgtggcttttgcaaaggtggtaatgttgatatgggtttatccctttttcgaaaaatgagtgagaggagcattgtttcttggaattcaatgatttcctgccttgctcaaagtgggagagatagtgaagctttgagaatctttgttgaaatgctagaacaaggttttgagcctgatgatgctactgtggtgagtgtgttgcctgtttgtgctcgtttgggggctgttgatgttgggcaatggatacattcttatacagattctaaaggactgttacaagaagttgtttctgttgggaatgcactcatcgatttctactgtaaatgtggaagtttggaattagcttcagctattttcaggcgaatgcatcgccgagatgttattacatggaatgtaatggttttaggcctggcttttaatgggaaaggacaacatggtgttgagttgtttgaggaaatgttgaacaaaggggtaaagcctaatcatgccagttttgtatcggttttggcatgttgtgctcatgctggtttggtggaaaaaggaagagatttgtttgcttcaatgtcgttgtctcataatgttaaaccgaaacttgaacattatggatgtatggttgatattctttgtagaaatggaggtactaaagaggctcatgacatgatcaaaagcatgtcaatgaagccaaatgctgctttatggggctcgttgcttagttcttgtcgtacttatggtgatttggaacttgcggaaacagtactttgtgagcttatcaatcttgaaccgtggaattctggtaattatgtgttgttgtcaaacatttatgcagaagaaggtaggtgggaaaaggtggagcaggtcagagtgttgatgagagacaatcgtgttaaaaaagagccaggacacagtgcagttggattcagctgataaaatatgtttgttgaagcctagaattgtcttatttgtggctgatctcaaatatttgatgaccaatggtataatgctcaaacaagaatgatgtctctttggactcttttgtcccaggagatggtatcgaaaagtggactaaaccagctgaaaatacaattaagatcaacattgatgctgcattatcttgggaatttggcgggggctcatgtggcttgcagggatgggttgattcagccgaatatggccgaggcaattgaactgaaagaggtgttaagctacagccaagttggaaggtggtcgttgaaatgaattcactattgctggttcaggctattcaacactggaggtctgttgctcatgaccaaatgtttcttagtattttatcaaattgtttgctaatggggttgctcagtctagcaggaacatcctgttttatttctgatgttccctttgtagttcaagatgctatgttatttgatttgaattaatgaataaaaaataactcaaaaggtatatcaaaatgtagaagaagcataagaatatatgattgagattgctctagaccttgtttgtaaagtgaaaagcagtagcatttctcctgattctgtatatgtatacaaatgtcatacattaagaaaataaatagtagttgtatttcttcatttgattgagaaaattaaatattagaattacaaaaagaagcaaaaagcttccactaattagcaatatcaatgcataaaccacacttgaaatcttcggcctctctccatggcttatttcaccttgtggaaatcctccaaaattaccttgtggaaaacccttggaaatttgaataaccctacattacaccaacaatttcttgtaacaataatccatatataagaaaattttacaatacacatttttgacactttgagaattataacacatcaaaatttatatgaagatcatcttcagaagatgtacattgtaataacaaaataggtttcaaatttttagaattttgtcagtattgtaaattatttagaattttttcaatatttagtgaaataaatttctctaaaataaaaaaaaaattcaatactgataaaaacaaaaatgaacactcgaattcgaatatagtcgtttcgtatagtaataaattagttcacctttgcggtgttcagtgcagccgacgtttaaagcaccccttatgtctcctatagttgccttattatagaataagaagtttgagaaaatattgtcaacacaattgaggactaactctgtctcagccaaacaaggtccattacagaacaactcaactgcttgaggaggcacattaagctttccaccttcattcaatctatatgtcttatcacaaccaccatagatctgatttcataatttaaatataagtgtaacaaacaagttctttagacaaaatttaacaacatataatacatatcataagatcgatgcaccctttgtgtttttgatatctgaatagttgtaatttcaatttttttataataatgatataaattataggaaaattctacaatgcacccccttaaaatggatatattgatgcacccccttaaaaatggatatattgatgcacc

SEQ ID NO: 185058 - DNA, 3761 bp, Cannabis indica
tattaatttaaattaattagcatttcaaaatttcttggacctagaaatttaaaattgatattattattattttaacttgtaataatttataattattagactataagaacctagtaaagttagcttaaaaatttgactaaatattcaagatacttctttttctagcttgaagtattatgttttactttcttgatgaaagaaaaatcaaatacctaatttgctaacacaaaattattttatcattaccattaaaaatttcttagactaaaagaatactttcgaacaaattatgtcatgtccaacatttattatcttgatgggttttaattttgctagaagtgcacttaattatcatagatggcttgcaattctaattaatgtcacattaggcaaatctcttgcttttgttgttgtaaattaatacaacattaattgcaaagtaaggctaagattaacactaagtttggaggagagagagatgacatccctaaaaaagtggagtaatataagtaaaaataaaataataggcatgacatcatatttattataattaaacaagaaatgcaaaagatgaaagaaatgctaaagagaattcatagtgtttagcattcttatgaaatatattaatgtaatttaatatcgaattccatttattttagttaagaaatttaattttatatggatattgtaggttaaaattaataaccaaaatttaagctattcaatattagtgatataggccaatttttatgtgtaccccaaaatacttttctcatttcaaaactttttaatttctctctatttcctctcttgatttttccctctcaccggttctcattgaaatacccattgaaacccactaaagaatccaagaccgtgaccactgcgaccattgccaccatctgactgagaccacaccaatccgaccgactaagagggctccatttcaatttgactgagacctctccaatcccttcctcaatcgcaaacggagagaccaccgccactaacagagaccacaaacagaaaccacaacggagagaacacgaacgaagacattctttgtaattttatgggttttttttttgctttttagagttggtctgatataggtccgatataagtttgataggaggttacaaattttaagttttaaggttgatggtgaaggtccgatagctgtttgatatagattcgatggtggtctgatgcttactaactgattggtgaacatatttcgtgtctgataagggttcgatactgttcgaatgggagtccaatgaggtccagatatactgagtccgatattggtccggaccaccatcagacagtgtcataccccatccaaacacgaaaagcctaccaatctgttactaaacatggaacaaccatctaccctatattagaccattatcagaccttctccatcaacctcaaaaacttcaatttcagaacctactgttgaacatgtatcaggcatatatcggacaccatcaaactgactcgaaaaaaaagcctagaaaatttactgagaatgccagattggtgtgggctcgtggtctacatttgtggtttccgttcgtgatttgcgtttgtggtctctgttcgtggttatagaaggagattggtgtgggctcggacggattgaaatggagtcgagagggccgatccgattggttttttagtgggtcaagtggtcatggatggtggcgatagtgttggatgatgggggtaatcttggatggcagcgatggtcttggatggtgcggtggtcgtgggggttcgattctcttgaagagagcgagggagaatggagggagagagagtgagttgagaaatgagagaggtaattttgagtttaataaaaaattgacttgatttaataatattgatacactaataattatgggataaattttgacctaataaattcatataaagtcaaatttctcttttaatttaataaagattataaaaatttactaactaatcataagacgcatgtcataagaatgcctataacaatactcttaaatatagtgtactttgaacaattaattcatgccttaaatattgcttataccaagaattaggctcatccacaaccataaatactaattaacaaaaaaaaatcaaatttaattctaatttttcaaaaatgatagattacaatacttcacaaaaaacttcatttgatcttgatacaaataatttctctttcacacaacatccaattttgcctattcacaaattatctcaatgttcccatatcttttataccaatctcatagcctttattggtgatcccataaattctatcaaacacctcacaagcttcttcagcaatatcatgaatcattaaaccgaaaaatatcaaattaaataatatcctatccttttaggccggtattttgaagccatcggaactgaagagtttgaatatgtctaatgataattttttgttaagttattttgatatgactttgtataaaattgagtattgatttagtaagatggaaaaagaagagtatgagcgaattaggacaagtcgtacatttttgtttacacaaaacaataacatttcataactaatttcataaatttaaatatagtaaatttatataaaaagtttatattcaaataaagaatattaaaagtagtacaaattttctctctagcttttatttatttatttattttaaataactagtctcaattctatttaccaatcctatgaatttcaaagaataattcatacaaagtacttaaaatcatattatatatatttacaattttttttattagttttctacttgtattttttttcattcagaaaacaatcctccatatttttgtaattatttttaaaaattcattgtattgggtctctcttagggaagcttaggtgatggcttaaatttcctatggaccatctaaatatttaatagaaagatttcttttttttttcttttcaaatatcactcatataacaaattaattattaataataataataaaagaattgtactaataaaataacactgacaaattatcatccattccaatatgaggaaaaaccaaaaaaccattaaatttatttgagtttgtatattagtatttgtggggtccattcacttcaaatccattatacttttctaatatcaaactaacaaatttaattttatttgacacaaatggcctcactattataacatatttaaaatagtttaatttgtctatgatatcattaatatgttgattatataagaatttatttaattaccaaaccaaaagcttaaaagtagagaaagagttgaaatctcaatctcaagtcatgactttgaaattttggttctttactcaacccattcaatcatagcaacaactttctttttttatatggatttggataatatttggtgggacaacaaaaatggcctattataagttttgattacttattcaatgataaaattaaattagttattgtgaagttgaaatattatttctctctaaaacaaatggcatattataactttttgattagttattcaagaaataaaattttattttgtttcacattaaaaaaataaattgtaatatattattgataattgataaaaaaaatattctccatgtttactaattgactattgcctattcttgttgccatattttggtttgcaatattttcttttaattaaattttacttatattgaagtaatgataatggtcctagttattttacaacaatataatg

SEQ ID NO: 185059 - DNA, 6356 bp, Cannabis indica
aaataatttaatttggcagcaggaaataattcacttaatcgaaacccttttccttttcttcctcacagtctaataaaagtaaaaattataattataataattaataagaaaataattcttcaggttttctttcctaataatttttatctatttcttccttacttgtgagattattccatagcttggtgaaccgtcatggaataatttgttaataataaatatttatatatatattactgtgtatgagaaagataaacgaatgtaatggaagcttgaattggtctcgcgatttgagagagagagagagagaaagaaagagagatattagaggttagagaaacaaacaggttagggtttctctgaatttgtatgaagcaagacggtggtgtttgcctcttagaccaaaactggggactgaaggcgaagaagcatctcgcttgagtcgctgtttctgctgcgtcgattggcttgtgcgcttctgctgcactgctgattcagatagtatggacatcgatgcatctcctccttctcttccttcccacaataacaggccccgtgatcgaatcgttcgggtatgactgcgcttcttcattttctgatttattgtgtaattttgacttaatttgagtgtgaaatcgggtaattgaattgtaattacggttagatgtgtgtgtgtgtactgtgtattataatcgtatgtgtcagtttgagcttctttgattaatggcaacaaaatgtcgggtcatatcttgatggcgtttgcttttacaatttaccagagacttataccacttggagtccctgtggagttacttgatcagtaccaacgagggttagttgcttttgtaaaagatgataaatctcggataccggagttggtttcagctatcttaccaacggatgaggaggtggcggaatttattcgtgaatctaagcctgggtttagaaaacaattggcagggccaacaatgaaaagtgtcttcagagagagcttggggtggttgcaatggttgatgtttgagggtgaaccggctagtgccttaaggaagcttgcccaattgagtgtcggccagcgtggtgtgtgtggctctatatggggtcataatgatatagcttataggtgtaaaacttgtgagcatgacccaacatgtgcaatctgtgttccctgttttcagaatgggaaccacgaggaccatgattactcagttatctatacgggcggaggttgctgtgactgtggggatgtgacggcgtggaagagagaagggttttgctcaaagcataaaggtgcagaacagatacagcctcttcctgaggagtatgcaaactctgttggtcctgtacttgatgctcttcttttttgctgggaaaaaaggctattgaatgctgagactacttgtaaggaaaacccaagattgaatgaacgtgttacagagcgtaagaaggttgcaaccgagctgacgtttgttatagttgagatgctgttagagttctgtaagcagagtgagagtttgcttagttttatttcaaagaaggttttctcatcagctggcttgttggagattctagtgagagcagaaaggtttgtaagcgaggttgttgtgaaagacctacatgagttgctcctgaaattgctgggagaaccttatttcaaatatgaatttgctaaagtatttctcggatattaccctactgttgtaagtgctgtcataaaagagtctagcgatgctgttttgaaaaagtttccactgcttcctacattctccgtgcaaatattcactgttccaactttaactcctcggcttgtgaaagaaatgaaccttctaacaattttattggattgtttgggagatatcttccattcttgtgccggtgatgatggccggttacaggtgattcattacttgcttgatttatgatgttccttttcagatgcattctttccgattgctacatggagtacatgagttgtccaatttctaatatatttgtttgttgtattttcgcaagcatgcttctttcaaatttcaaattttttgttctatatctattatatcttttactaactaactgcattggctgtttgagctttatgttatcctgccagtgccagaaccatctgaaattactttaaaaaaatgttgtttatattaattagaatactgctatgctttaattctctcttgtccaatattcttataagatatgtagtgctgcatgaggaaattcatatccatgcataattactgctatttagctttgatttccatctatttttttctttttttcttttaaacagtcagtttctatctgtaacataatcttatagaggtttgctttttcaagaatatgttcttttagaagaataatgtaattaactaattatgataaatatttgtttgcatataagctgaaagactttataaccgtcattgtatatcacctctttatgagattatttgaaaaccatagttggtatgtgtgtataagtatatatcaaacctagcattaactttatttgtcactttagttgatcaaattaaggttttttatcctgaagctggtttttatagcacagttgttctcctccaacctttctgtaatttttgttaaaaacgatcaactacaaagatttataatttgttcttgcagattaacaagtgggggaatttgcatgagatcacccttcgtgtggttgaagacattcgatttgttatgagtcattctggagttcctagttatgtaaccagagatcaaccagatattacaagtacatggatgagactcttaaattatgtgcaagggatgaaccctcaaaagagagaaacaggtgttcatatagaagaagaaaatgagcatatgcatttgccatttgtcttgggtcattctattgccaacattcactgccttctggtggatggagcatttttaatttctagtagtacagagacagatgatgagattatttctgaaacaaacaagctagatactgatgatggagatagcctaagacattctaaagtagggcgtatgtcccaggaaagttccgcatgtagtgcaagtggtaggtgtacttcatctatgtcatcccccatgcttgttgagaataaattagattcagcttctagtctcttagttcctccttctgtgtcatggttaatacatgagtgcttgagagcaattgataattggttggcagttgataatacatcggctcttggtgtatggtctcctagttcaagtaatatcacaagcagcaatttttcagcattgaagagaacattatccaagattagaaaaggcagatatatatttggtagactttctagttcaatcgaagatcatggtggacaattttctccacatgcacaaagtggttcccgtattgtgcaaaatggaaaaagtacagggatggagagtaggttaacaattactggggaaagtggctcagctaattcatgtacccgtccaagctttgatgatactatagttgaaggtgatggtgcaatggacctggatgctctacgtgtattaagcttgtcggattggcctgacatagtgtatgatgttagttcacaagatgtatcagttcacattcctttacatcgatttctttccttgcttctacagaaagcattgagtggatgttttggtgaatctgcagagtccaatatttctactgcttctgtgctttcatttccaatctacactgacttctttggacacattcttagtggctgccatccatatggattttctgccttcgctatggagcatcctttgaggattagggtattctgtgccgaggtacatgctggaatgtggcggaagaatggggatgcggccatgttatcttgtgagtggtaccgttctgtacgttggtaagtagatttttatggaatacttgtgatgaaacacacacccttaaagcactcttaaataaatattagaaatgtcacattatctgatggtgctatgcaggtctgaacaaggtttggagcttgatctttttctgttacagtgtgctgctgctatggctccagctgatccatatatatttagaattttagaacgctttggactatctaactacctttctctgaatgttgagcgttcaagtgagtatgaaccaaacttagttcaagaaatgcttacttttatcatacaaattgtcaaaggaaggcgattttgtggcttaaccaaagctgacagcttgaaacgagagttggtttacaagttagccattggtgattcgactcatagtcaattagtgaaatctcttcctcgtgatctctctaagtttgagcagcttcaggaaatattggatgccatcgccgtgtattctaatccatctggcttcaatcagggcacctattcattacactggtcattttggagtgagctggatttgtatcatcctcgttggaactctagagatttacaagtagcagaagaaagatatttgcgctttcgtggtgtgtcagctttgactaatcagctgccaaggtggaccaagatatatcctcctctgaagggagtagctagagtggttacttgtaaagcagtccttcaaattgttcgttctgttctattctatgcagttttcaccgacaaatcaattgaatcacgtgctcctgatgatgttcttataacttcattgcacttgctctcattagggttagacacatgctttcaacacagggactccggagatttgtcctgttatgatggagaatcaattcccatgctagcttttgctggtgaagaaattggccagggattaaaatatggtgctggtgaacaaagtttgctgtcacttcttgtcttattgatgagaatgcataagaaggaaaattcagaaaattcattggattcaggcagttgcaatctttcctctttaattgaaaatttgttgaagaagtttgccgaaattgattctggatgcatgaccaaactgcaacaacttacacctgaagtggtcggttatcttccacaaacctttcccacagatgatacaaatgcctcaaggtcaggttctgatggagaaaagcgcaaggcaaaagctcgagagcgacaggctgcaatattggcgaaaatgagagctgatcaagctaagtttatggctaatattgataccgctgcagatgatgattctaaatctgaacaagaatgtagtaacatggatgttgaagatgaatcagaagaatctgcacaagttgtatgctcactttgtcatgatccaaattccaaaagtcctgtatcgtacttgattcttctccagaaatcaaagcttatgagtttcgttgatagaggtcccccatcttgggagcgtcctcaccgagacaaggagcacgtgactatgaccacagattggaaggctgttcaacctgaaacgggaagtttttcagctggttctggattattttcatcttctgagttggcacagttgattgagaatgcagtcaccgaatttgcatatcatggccaacctagggaagttgatgcttttcttgaatttttcaagggccaattacctgcattaactcaagtaccatgtgtatcaaatgatggaaaggagagggacttttatttcttagagatatcagaagaagatatgtacctattgattcaaagagaaatgcaagagaacatgtcctcatcacgttttgtggaagacatgaaactttcaactgctgtaggtagttcaagttctcagagaaggaaattggttgaaactatgtttcttggaaaatatgtagcagctgtttcgagcgagatggcagaaaatccttcagcttctgacaatgcacgtactgacaagttgccaaaagagtttatgcatctcccagcgtgcgatggatttggcccgacagattgtgatggaatagttctttcctcatgtgggcatgctgtgcatcaagggtgccttgatcggtatttacattcattaaaagaaaggtaacttctgatggaacctgacagatcattattttgttgttattactgctagcacattatgagggttgggattttcacaacctacatagatttacttttaaatggtctgggtccaccctctggctactatgactctggtagagcaatcacaaaatacaaagagagcctggatttactttttgaaaagagaacctattaagagtttttgaattttactttttgtcataaaatgatggcgttatcatttattaagtactcatgaagattgtttttggagtaattttcttcctaaaatgatttcttgaagctaatgctctgcgaagttggagtttttttttttttgacggggggggggggggccgggggttgggtagggaacgttgtcggaagtgtcgtac

SEQ ID NO: 185060 - DNA, 6394 bp, Cannabis indica
cggttacggtttgaaaaattacaaaaacaacacataaggtttatcttaatgtcagttttcaatgtttatagtcgttttccctttatgttttagcagttttggtgtcgttttgaataccttagttcaactcccacaaaaatcataatatagggcctttggcgagtttaacacaaaagtggccgtcgacaagttttcacattatagagagagaaaaagcttcagagagagagagataatcaagtatggccaacgcagatgttgaagcggtcgatttcgaacccgaagatgacgacctcatggacgaggacggtgccccagacgccgacgccgccgcttctcctcatgcccctcttcctaagctcaagtccgccataactggcggcggtgcctcatcttcactctcccaaaagaagaccaagggaagaggtttccgggaggatcccaacgccgaccgcaacagccgtttaactggcgccgattttgactcccttaagtcctccgacggcctagagccccagcgctgtaagtattctcctttatctctcatgccatttctctttaatctccgctcaatctgtcgtgcctggtttattgtgctagggttttgcacaaaagttttggtgttttgattgtttttcttaattccctatatcgtatattcttagggtttatgctatgtttattttttttttatttttatgtgaaggtatagattttaagcaaatcaattgaagtttatgtttggtactttggaatttggccagaatttgtctatttttattatagctttctgaattgagaactcatttctagtttttttttatctggttcgaaaagactagttgtggaaactgcacggttacgggcatttttaatttttttcttcttaattcgtattctttcctctaagcaaactactctaccatttgttaactcttctcataaaatatgtacagcaattgaaggttggattattctggtaaccggagtgcatgaggaggcacaagaggatgatctacagaattcgtttggcgagtttggggaaatcaagaatttgcatttgaatcttgatcgtcgtactggttttgttaaggtatgaagaacatttacggttttgttaagatccctgcattgttgaagctttaattgtttattattgttgcaaagtattattaatttaaaggacatggtctctagatgatgaccattgtaaggttgagggttcagggtttttacataacaaaaatttcagtgcaaaatttgttagctttccaagtttacggtgtgaacattatatttaaagccctttccaccgattacttagcctatccattgactgcgtaaggtttctaaggtagctagtattctagtgtgatcatttcataatttccatgatcctatttaatcagatgcatattctactgacattctattgtttcttgtctctatatgaagttttgtaatacctttcatcctagtcccatggattattggtactactattcctaggtgttgcaaaaatagtgaaaaatcgtgtcttcttatttgagtatgtgtatatatcctcctcttgtacttgttttggtgaatggtgaggtgatgttgaaatattgtcttttgatcaataaatttcttgtaagtagttgacttgtattgtttctttcaacagggatatgcacttattgagtatgagagtttcgaggaagcacaagctgctatagctggaatgaatggagctgaacttctcacccagactgtgagtgtggactgggccttcagcaatggctccttcctgatggacctaacaagaagaaaatataaggtttgcatttagatgatctatgaacatacactagaagatgcagtttaccgcatttatatatccttcaaacgaaacattaatatcgatttgaatgactgctttgccttaaacaatgtttttttaatagttcaactaaaattattatgtatctaaaaccaagtttctcattatactttctcctttcatttagacctgattaagatttatacctaatgactgattgcatctatgaaggcctgaaactttagagtactgtagttatcgttctgtattatcttctaacatattttgcttggtgtgtactgtgtggcacatatggacctcataagataaataatatattctctttgactttgaaatgttgcaggcctccacgagagcgtcgctcaaggagtcccaggagaagatactgatttggtttatgctcagttgtgagggagagtgaattctcaaggaagaggggggtttaatgtctgtattatttgagttccagaagttctagtcactgcttgcaattcacccgttttatggcttccctctttgttcttcaaggattcacctcactttacccatattataaaatggttcaagtaatgagttccgtagtgaattgttttctattaacttggggatgcttttcatggtgtgattctgatttgaagacactagtaaagatgaatgatgattttgtaagattgatgtagtttttatgctaactttatttcttaaggactttttctccattttccatagcttttatacagatcatatacatattgcgaaggctatcgattttcagtgtactccattgtaaaaccctgtcactgtttcttggttttttcttttcaaattttttatttaatgtaattgagttcgtctggtgttgtttgagggttgctttagaaattaacaaaattttgctcatatttacgaataaatggacctagatttatttattttttcacatatgtgagatgtgagcaaggaaaaacaaaaataacaaaaggaagaagaaacctctattgcggtttgatgcataacagtacatctctaaatgggtttattgtaacttgtgtatagtgtgattgtaaatttttctattgattcttctatgtacaatggattagaaaatgtggctacttcctcaatatgtgaagccatgatttttcttttcctttttctaagttcaatttttcacattgttagttttttatgctttggcattgtctcacgatgctagagcagtccaataattttccatgcataagcttgttggagtgcctattgtgcgggaccatgtccattgagtactatcaactcgtttcaattctcccaactgaaaagaacaaaaatcaaactatcaacagtaagcaatattcttctctttgatattactttgaacatgtcattttttcaaaagtcttaagaatggtttctttcttactctgccgtctcttaactcaaaaatcactgaatcttcagagaaaggaatcggccttatagatgctatctgaacacacaatcacacaaccatttatttacattaacaacacaataagatttccttttcgatagaaagatacttacttttggatcacaattaccactgaggtcatcaacgtgttcagattccttatagttggttgaaaaatcttcatccacacaaaaatcttgtttccatttgtgtcttactttttcttgtctatgatcatcattcatattttttatataaggaaagccacagtttttccatttccatgcagtttgatccacgtagcgcaggtacacatttccatctgaactgatcaagaaaagttggtttccttcaaaggaaggcccaggtgaaccgaccaatgttacccctttatgtggagcaccatgctccacccaattccaaccatccaatgagttccaatgatactcaactagtccaccatcttcagacaacatgaaaagtgagcctgttaaggacattgatgagggcctcattgctgttcctggcaatcttgacagaatcaaatgctgagactggtaatgctcatgccagagatcagttactttgttatactggtatagccgaccatttgttcctacaacaaaaactatgttttcccggaaaagttcctgatctattatacatgcaactcttgtgtttggagggttttggcagtctttccatttgaatttcctcagtgcaacctacagaagatttttaatttttagtctccaagttagtattattaagtgttgttattgtttgttaaaacttacagtgaactgtagtagtcttccattcttgctcacaaagaagagggcatcttctggtgtgactttcagagctctacctgggattccatcccaaggagggccaccagtcacttgaccacctttcttaaatgctgtacaatttatccatgctagttgattgccacttctttctcttattagtaaactaccagctgtgtcaatgacatacaaacttccattatagtttcctactgcacctttgatagctgcaggataatcatgtctcagccatatccatgtatgttcagtataaagatactcgaaagtaaagccaccatcagttatgagaaaaaatgatctccctccttgcattactctcaaacgaaagtttctttcaatccaattgtctgcaaatctatatttgtccaaagcatttgctggaccatcagatgctactacactaggaatcaggtaatcttgttggcttccctttctcctcctagtcgccaatcttgctgttcccaaatcatttggctcatctcttatccccatgatacaatttgtaggcccacgttcctcggtgcagtattctgcattccatccttcagtctcaggagcatctagtactgaccatacatatttcattgtggattttcttctgacattagctgagttaatcggccccacattatcaccaccaatgccagatatgtgcagctctgcaagtcttccatcgtctagtggaaaaacaattctgccaacttgaaattgtagtccaccaattcctcttgcagctttggcatgtggaggatgcatatggttcacccatgtttctgccatttgattttcttgactattacctgttctcatgtgagataaaaaataatcaaattcagtacaagattcatatttgatactgttcttgttaattgtggtgacattatctactgagctaatgtgtaatgttcgtgtgatctcatctatgatgaaaagaatcacctgctctctttggtattcgatattcgaaaacagaccctgaagatgtagtaaaaaataatgagaagaatttttcgtttgaatcttcgtgctgtgcatgtgtgatagatgacaggtgctgatttttgggacttccatggactaaccatttccacttcctttggtttaaccttctctcaaccaaaataccaccctgatcaataaggacattgataaatgataagattattacttttcttcaaaatggttatggtccttaataatttcacttcgaaattcaaaatggtcatcattcatgaaaatgagttaatgcatatatttacctttgttaacagaaacaaagatatggaatgatctctaatcaagccatgtaaagcagctccctttaatggttccaaagaagcatcttttgcagctccttctttccaaatatgcttcttccacaatggttttgagttcctatcatattcgtataggtttcctatagagctgcattggattctcatgttataacattaatcaaaatatgaatttagctcttagcaaatatatatatatatgaatttagcaaaaactgatagctttacacaatggtcaccttatagtatataccacttcttttcttatggtaccagcatcagctacagctgcaacatctgcacctggtggttgtccatggtttacccatctgttctacatttacagcaggaaccttacttaaagttacatcagaataagtacaagaaaaaatttaggggctagctagcttaactgcctggtgcttgaagtgattatagaaaagtcttaccttgtaggttcaatctcagcaagttctaaaagtgtcccattcctagtgcagaaataaactctcctggcagtcaatgcagcaaagcaaaatcaaggagttattagaaggagacacatgcttgctgagtttcttcattcagtgaagggaatttgagattatttcttcgcattcattcactctctcaaattaaaaaaatcatttactcactctccatcatgtgaaacaacaccagctttgatcaagactcttgatgattctatttctgtatctgtggtttgaaagagtgtaggtacaaactcaagccaaattggttgggaaatttcattgagttgcatctgaaatgaaaaaagaaaaaacagaaaaaaagaaaaaagaaaaaacagaaaacagaaaaaaccaaaacgccatgcatattatgaatcagatggttactgtaataaggtaaaaccactttcaaattatcttgtttagtactgggcccagtataatagagtacttagaataatccattgtttcatgtg

SEQ ID NO: 185061 - DNA, 9663 bp, Cannabis indica
tgaatagtaataaaccagggatgatttttcttgtttaaacgttttgttgggttttcaatctttcagtgacatgattagtgctttttgcagagtgaaatctgttttgtttttataaatagtatgtctgattcctaattcttttttgctttcctgtgttttgagggatatataagaaacaataaatatcgttaataatgttagaaaagcttattatgcaaacagaatgaagagccaaaaatgacatcacttagtaacaacttaaaactactatatttagaacaactcccaaatccttagtaacttggagaaagcaaaattcttaaactccttaaccttccatctttataactgtcttagtttttgttgatttttcatgtagcctgaaccaatcaataagaccttggtgaaccaaatgctgctctgcttcggactcatgtttgcttctcaggtaggaaagtgtgataaatagttggccttttctatgaatatttcattgctaacaaattttttgtttattttttagaagatcatttctaacaaactttatattcccaggatagtggtggaatgttgtcacttcttggaattattgagcaatgtctgaaatctggaaaaaagcaaccgtggcatgctgccagtgtcaccaatatatgtgtggggttactagcaggattcaaggtgcatattgttctaaaatgtgcacgttttagaatctttgatctacatttaattgttctaacattaattcttaacatcactctcttctcaggctttgatttttctacggccccagcctctaggacaggatatactaaactctgcacattctatttttcaggtgccaaaatttaagatgcttgcactatatgtttcattgattgagaaatttatctatattcatgtactgtaactttttttatttggtagagtattctggtagagggagacatatgtgcttcacaacgcagagcttcctctgaaggttttggtttcttagctcgccttggaaatgatgtctttacagcaagaatggtcagttttgcttctgtattctctctctctctctctctccaccaaatatttgcttcttgtttcattatttatttaatgtgaaagaaatagaggtgctcttactttctcatgttcctcacttacacatatatgaactcactgttgctatttttggtggtatatagactagattgctgcttggtgacttaactggagtaactgattcaaactatgctggatcaataagcctcgctcttggctgtattcatcgaaggtgaaatatttatttcttttaattttttccttttctatacccaagactacttgtatattatcatgttaaccattgcctggtggtattgttctgtttgatctagaatcattacctccattgctgaattcaacccacaataggcaaagaagttaaatgaattctttcatcacttacacaggactgtgcgggcatgtgtgtgtgcatgtctgatggacttcctatcagattcctatatatttgtttgtggaggttgcttagttgtatcaagaagatatactaatagtgggagagttagttacttaactaagtcaaatttggctaggggagagggaggcctctcaaattaactttgattcatcaataagaccagattagattcttcttcagttaagaaccatatcggtgtccttgttatattgcagtaggagtggaagaagtagcctggagaaactatgcaactaagtttgttttattgttagaatcattatttcagagagtatgcaactaagtttgttttacttgataatgattgttagaatcattattgcggagactcgttgattgtccatttctttctcttttagtttttttaccatttactctattattcgtgaaatgaaataagattgtgaatactgggttcaaataattgtgaaattgtatgctgtaaacgttgtggcatgtttactgtattcttctgtggcaatttttgttccgttttgggtggtgttcactcagtattggattggatagttgagaatgctttttgacaatgtgaagaggggctttgctataattcatcaggactacctataaatggaggctgatgagcctctctgctggtcagaaaatataatttctgtagatacatttggcaaccatttttcttcaccatagtgatttttctgctgctgcttacgtaatttttaatgtctcttttgctttcagttcttgcggtgcttcttttgtgtgccctttttgtgctgcttatgtttcttttattaagttgcagaaaaagcagtctgttacaagtcatttgattggtatatagcaattaaagtgatgattaaatgatggtcaattgtttaatatgagaagttgccatgttccaagacattactgagctgttagtttaatgctcagttgtctccctctttacttaatacaaaaccccagctacttctgaatgaattcactgacttgtatgcccttctggtgtcatatatatgaaaaacaaaccttagtatactaactttaagtatcaaccattgtaaaagatgtaaactattataatgttgaccgatatcttctatcaagcaggaaagaagtaaacagtgttgctgagtgattcttgacgatggatcttaaagtttcaacttttttgtctcacacacatatttccacttacattttgtacctgcagtgcagggggcatggcactatcgactttagtgccctcaactgtgagctcaatctctttgctagcaaagagttcagtggctagtttacagatctggtctttgcatggacttcttttaactgttgaagctgctggtttatcctatgtatctcatgtccaggtaacttgttaagactaagtttctcgttttgatggatatatgagggaattgtgataataaaggtttctctatcatgttgctgatgatttgggatttttggatttttccagctgcatgtacagttgtttttattaacttatcatatctgtagtctgttttatttctttctacggcaggcaacacttggcctcacgctggatattcttctgtctgaagagaatgggtgggttgctcttcagcaaggtgttgggcgcctcataaatgctattgttgctgttcttggtcctgaacttgccccgggaagcattttcttttcccgctgtaaggtacttactatagtcttctagcattattgggcatatcaaatgctattttttgctctctttaaggtacctactatgatcttctagcatttaccttaggcatgggctttacagtcaagttcaaatctttcgagtttctttaacaagtcaagatggtgtatttatcctatgctgatgattttttttttgtacagtctgttattgcagaaattagctctgggctggaaacagcaacaatgcttgagtatgttggctgatcatttattttgttatatgacattgaagttctctttccttttttttttggttttccttttctttttctttttctaaatattagaaggctatgtgagatgctttttgagtataaaaaaaatcactcttttttcattgtagcttaattttgttagaatattcataacccatgttgttcatgcaggaatgttcgctttactcaacagcttgttctttttgcaccacaagctgtgtctgttcactcccacgtgcaaactcttctcccaaccctttcctcaaaacaggttcgttctcgaagagataatgatctagctcttaaaattgtatgttctcttctctttcctattttatagttttcaccctactgcaattttatgcagccaactttaaggcatcttgctgtctccactttacggcatctcattgagaaggatccggtatgccctgggttctagcttattccagaaaacaatgtattagcttagtttgttaattttaccagtggacactttctgttgttactgtaatttattgcaggtatccattgttgaagagcaaatagaagatgaattgtttcatatgctggatgaagagactgactctgagtatgttgaaaacagttttcttatgtttgattttatctctatttgcaataatggggtatacgtgtgtgatcttttgatcattcacaaacaaatccctttaattcaaaatttcaaatacatgggctgttttcctgtaattaacatcatgaagttgtcattaaaaggtatttcatatgtttgaatttcatgaagttgtcattaaaaggtattaacatctaagtgttcagcagaggtcctacaggaaaaagttagattttggacagcatcttgggtgtacaagacgaagcattttgaaaatgtttcattttcagacttaattagggactggagagcattgttgtagtttctttgctgctgcctcgtatgaatattttctaatgtgagggatctggttttatgtgggtcctaggggattgcatgcaaaaacgtatgtttggggcagtgagtatgttcagggtgtatagattgcttcaggtttttgtgcttggtttttaactttgttaaccacggtcttcctccgcgtctaagacaaaggcccctttctcttttttcaaaaaaaaattcatggagccgactcaaatctagttgttcttcagatttaccttcaacataaactgtaattgtacttctattaatatgattgtcaatgtgctaagtcgaagggaggaaattttatttcactaagatgtaactgatatacttacaaaaatgcacgtgtatacatagagcgtcaagtatattgtccatatactatatatacacatatatgtatatatcttaagcggaagctctttctattcgggaacaagagttcttgttgtgatttttgtgaatgtatcatgcatgtgaagcattatgttaggaagtgagtgtcttatgaattagttccattggtcttagtttcctcaccatgaaatttttagaaattatatttcgctcgtactcagtacaatttttaagcaaaatattattgtacagaaagattatgttggcatttctcttatatcctgtggtattgttttctcatttggcctacatttattgaactgagtgtgagtttgtgtatggaagaaagagattgctaatattatttcatgcataatgccgtgaatcccttttgatgtattaggattggagatctagtgcgtagcacaattatgcggttactctatgcatcttgtccttcttgtccgtctcattggatatcaatatgtcgtaacgtggtaagttcttttttgttatcctacattttctcttttctcttgttatatttcaatttgaatcaaatgcataatgttttgcttttttacatgcattcaataacaacaaaacattgtgatattcttattagcaaaaatttgcggttccaattatttcctgaagttattcctggaaacgtttataaatatctgacttattttgaaacagcgctctcctctctctcaattgaaacccaaaactatcaagtgtcttttcattttgttgggacaaagatttagtatttgcagcactatatgaatgccctttaattattaggtgcatgttctgttttttattttttaatcagtagtgaaagatttttgtcttgtcaatttgattcttcatgttctcttatatgcatttacacaaattaaactcttgattttactctaaaaagtaaggtggaagttgaaaacttgttgacactctctcaggttcttgccacatccacaaggagaaatgctgaaggtaataatgacgcagacagtgatccttcaaatggtaccgagggtggtacaagtttgaattttggacatgatgatgaaaacatggtttctagctctggaggcttttcatcacatggaaacactcctaaagcttctcacatgctcttaaaccgagatagacaccttagatatcggacaagagtatttgctgctgagtatgtgataacttttcttttaacatttatattttgttttacatcctaatttcttgcacacatgcaccattcaacttgttatacagatcacctgttatcttatgtgattgtaggtgtttgagtcaccttcctacagctgttggaactagcccagctcattttgatctccatttggcaaggaaacaacccgccagtggacggtcttctggtgattggcttgtcctccatatacaagaactcatatcacttgcatatcaggtgtggacacgaaaatgcttgccttctgtttatgtgtttatgagttgtatatctcaggtaccaaaatgcatttaaggttgacttttctcttaactatttatatatagataagcacgatccagtttgagagcatgcaacctataggtgtgagacttctaagtaccattatggacaaggtaaatctgtctttttcttgctgaaatgctaatatgtgcctttgatgtagagctttatgtattttctaagtgtttgccttttgggattaatttatgctataactttgtgttggttcaattagttggttgttgtcaattaacctataattcaaataggctgtaaattctgctatcaatgcctatgaaggctggttctcttgtagacacctatgttgagcgataaacctccactcaaatggtactctaggaggcttaagaaggtaataggctggaggatagtggctgagtcaactttgagcaaggttgttaagggagtgtcagtctcccttgaatccaaagtctagattattgttttttgtgctgtttatgtgagaatatgttctctggctgtgtgctgctctttgggttttctactcatgctggttttatcttcatcgttttattcatcagataaatgaaattacccgaagacttaataagccatgttttacaccaagaaatcataaacttcacccattctctccctttatcttctgccctaatcatgattaatgcagtcttccggaaaagggtgatatattttttttccctttgagatcttacaattattattattaagaaaatatatatggatgaaaagggttgcagaatgagcacatataacaagactgctcattccaggttcaagatagcttttatttagctgcagacaactttatggttttcacattcatttttactctttgaatttcatattcatcatattttcttggtttgggaaataataaatccatttaccagaagattatgattttcttttgtaatcttctttttatcttgtatggagacagttcgaaaaaacacctgaccctgaacttccaggccaccttttattggaacagtatcaggtatgttgactgaactttttgaagtctcttcactagtttgagtaattattgatgttaaaccattagttttttatattaatctgtaaaacataaagtatttccttggctggtactatggaagtatttttcattttctgtgatttcttctatttcacctttttcttctcagtgaataaaattgtttaaaatgtaggcacaactggtatctgcaatccgaactgcattagattcatcttcaggccctatcttgttggaggcaggcttgcagttggctactaaggtaatgagtaagacaaaatattttctttgattattttttaaccaataatccatacatgaaatgacacgtgaaattttcagatactgaccaatggaataattaagggcgatcaagttgctgttaaacgtatttttacgttgatatcacgcccgctaaatgaattcaatgatctttactttccttcatttgccgaatgggtctcctgcaaggtatttaagtttagtttattttaattttaaactaacattgagtatacatgatgctacagaagaatcaagagtctcatgcttgtttcttaagtgatggatatccaagataaaatgaatgtctaattttattcatcgataatgaaacagatcaaaataagacttctagctgctcatgcatctcttaaatgttacacctatacatttttgaggaagcatcatagtgtggttccagcagaataccttgcactcttaccactgttttcaaatagttcaaatatgcttgggaagtactggatagggattttgcgtgattacagttataccttcttgaatgtgcatcttaaaaaaaaggtatacttttgttaagtttgcttttctctcttacaccttgcatattacacaaaatcttcaatgtatttatgctgtcactcttcgttatcagtggaattcatttcttagtggaatccaatcatctctggtgtcagcaaaacttcaaccttgtttagaagaatcttggcctttaattttgcaagcacttgtgttggatgcagttcctgtgagtcttgatgggaaagacctgtcaaaaggcactgttgaaagtgtgtcaggaaatagcttactttctggatataatatggttgaacttgaaactagtgaatatcaatttctctggggattttccttgcttgtattatttcgtggacagcattcaactgcctgtaagctgaaaattccattggcttattctaaagctaaccatgaggtcaattcagccattgaagagttgaactctccgggtataaacttatatgagattgtattgccagtattccaatttctctcaacaaaaagatttgccagtgcgggatttcttactgtagatatttgcagagaactaatgcaggtgaatatccatttctctctctgatattataatatatattatgaaaatttccacttttttttttttattattttggcatgttgaatcttaattgcgaatctgattgcagtttaagtgtctaaccaaaaacactgcataaacaatttctttttatttgtgttgccctagatgatgtttgttggtgtgttttttgtttttttttcttttcaagcaatgtttatatccttggtacaaacagccgtaatgtttatgtcatagtcaatgccctaagcgtgtactgtgcgtttcctttggtaagaaaatagtagatttcattgagtaaataaactctataactatgagaattagagggcaaactgtcatctgccaaacaaaatagccaacaacggtaaaaatgactttttagtcaaccaaaactactaaaaacaaaggaaacttgaaaggacacaataagcaagatctttgatcaggatctccagtaagcacacaatctccacaaacaaaattatgattataaaactacagctctttgatcaggatccccagtaagcacactgtctccacaaacaaagaattatgattataaaactacatacagaagttattttccataaacatgggaataggagtgttgtttaatgtatctgtactactttttgtttttccctctaaagtttttgttccggttatgcttagtataatgacacccactctgtaggaatttggtttgatttctaaagcttctgtaatttattattttaacgactgcaagttttcagtttcatgtatgtgatttcacaagtataatttattattttttactgtcacaggttttctcatattccatgtaccttgataattcgtgggatagtctgtcaatttctgttctatcacaggtaaatgctggcctcttatggaattttcaattcacttgctgtatgtaattggcatatttagtc

SEQ ID NO: 185062 - DNA, 7457 bp, Cannabis indica
aaatttaaatatttatttaccatcaaaatttaaatttgattatttatacaccaaattaatcctcaacaaatgtattttggtttttggagctgggaccgggtaccttagccggtatctttttgaaaacaaatttcccaaaccaattccgtcttatctttcagactcactcgtacaactacgaaccccaaatagccgtacaagtgacccacccacccacccacccacccaccgtccccactgcgtcttcaggcaccgttcaccgccgtccactccttccgttgcttcatgaacttagcttcttttcaccatctaacacaaccaacactctctgccctctctccactcctactgagctgaccctgacttccattgttaactgttaagagagagctataccattaaaaacccaatataaaaggtaaatgatttttatggaattaaaacaatgctttctggtatttttcagtctttggatttaaataagtgggaaatttgttaactgacaacattgtataaagattattattgggtttggagtttcgattacatctacgttttattatttcacatatcagatggctcagattggtgcttggcaacttcaaaagctgatagttgactggggaggcagtgtcaggtttttctttttgcttttaaatcattatgaatttagttgtttattaagatttacgatatgaaaaagaaagttatgaaggtggaaatgagaggcttaaccaatcttgaaatgggaaatgttattactagaacacgtccgtttatgaaaagaaacttattgttgtggattcataattcttgattagaaccattagtgttaagaatttaacttacattatgccatttgaggctagttcaagtggatgactggtgggtgaatggtatgggttcaagtttcttgttaaagaagttacattaccattgctggcttcttggacttgttaatcaatgggctggaatttgagcatttgggtacttgcgctatgttgttatagcgtgaggacaacatttcctgtttctccttcccactcttgaatgtggagggtctgcaagacagagagtgagtaactataagtgtatatcttgggagatagagagaggccgtgaatatagacaacatagagaggcggcaacagaaatatgtgacagtggaagagagaatgaggctaggagaagatagagagagatgatgtggggcagagagatgctttgaagataatatgaatatgctatttaacttggtagtttccttaagggattttgaggtaaaagacccaatatttttctcttaaattttttgtatatattttaattaaataatgagtctcttccaaaaatataaataaataagaagaagacaatggaggaggagaaggaaaagagtctcaaaacttgataaactagcaatatacagttttcattcatggcgttctgtcaatcttcacagcttcattaacattctcttttgtagatgcttcaaactctttggtacaaacttcttaacccctcggagtgttggagttggacttaatcgcctcaacagcttaaacaaaccccgtttgtgtccccctttgctcgccttatcttcaaaggcaatgttttactaattactgtactcatttttgcgtttcatgtatttttcttatttggatttgaattcattcctagaaaaagagctttttcttctttctttttttgtggacacaacaacatccacgcttgcttcaatgctcctagtttgtttttgcttctcacttttcagagagcaatggtagaagatgcttcccacatttatggaatatgcttttttattcaccgacccttttgtttgtttgacctgatgtgcaacttaatgtaaattttcagggttattgcataaaatctggtggtttggatgccgatttagctgggggtgttcatgaggagaggactgcaaccctttgtgcaaaaggtacattgcagcaaggtggactagtttcttcagatgaaaaggatgtaaataataattctttggacggtagattaatgctcattgatggcacgtctatcatatatagagcgtactacaagcttttaggtaaatcttcttggtttatattttgatcatttgttttggcttcactccagatcttcgtctgtgttttcacatagattcaatgctcagctagataagatgaattatttcttattggctttatttgtatactatactatgctggcctggatagattggtgaaatgtactttgtccttttacagttcttgattatgtggcccactaacaaatgatttaccttttcctttaaatagcgaagttacaccatgggctcctatcacatgctgacggtaatggagactgggtgctgactgtatttacagctctttctcttgtaagtgattgtaaaaattgttatcttatgatagtttctcctttatctttcgagtctactttgttaacctattttacatttttgggtgcacattatgactgagaattgtgtttctttttggatgatgatttaagatgaaagatcaggtctaagtaaattcttttatcctttttgggttttgcagattattgatgttttggaatttgtcccttcccatatcgcggtatgtttattttttatcaaaattttactgacctgtccattgaatcatattatccctgatttgcattccatgtacttgtgccatttttggttggatgggcttggctttgttttcttttttatttgtgttctgttactgaccctagagatcatttgtagattgtaaaatttccacctaaaatagttgtttatctcactaggaccttaagttttatgtcatgcatttatcatgggagaagaaacgaccaacaagctcattgaatcttgccatgttggactataacagacttaacagttactaaatgtcattgaaagttgtagaaagttaggaagaatggcatcaatatgttatattgctgggtcattttggcctcttgtttaaatcaaactttgtgaggaccctatatctcttttactaggttctgtctgcttctatataaccttcttttgtttgagaatcttttcacctcttaattggataatgtttctcatggtttcctttcttctttcttctaccctttttgcaggtggtgtttgaccatgacggtgagatattaaatcgggacatcttttactttctactttattttgtttgttgttgctgtggttgaattgttatagttttgagttcttgtacatattaatccttttgtcattctaagcttccttatgttttcgcgaagctggtgatctgactatagtcacttcaataggttgctaagggaaattcctaaaaataattgggaaactaagtagatctatgcgtttagatctctttctctctccccctcttcatttttccttattcaatggttgatactctcttcgattctcatgcaataggacatgaagatgtatcacatagttgagtcacattggactagcatcttataagaaagatgtcaagctgttgtctaataacccaccttctcctattctcactataatttatgagtattaacatttttggagaaaatttggtgtgtggacctactgtttcctgtcaatttttgataagatagacctttcttttcaggatttccatatggtcaaacatataattcgtccaaagaaagttttatggcaaaaggtatgtttttaatcagtcttagttttgttgcgtgcacatgttaatgttgagaagagtaggccagtttttttagaactaaaagatcatagtttgcaggtaggaagttatggatgtagtgttttctagggtatggtagggcttgctgacacaaataagtcacagtgaatcctgaataaattttgaaagtgcaaggaactctagtgttaagcactccggagagcaagttataatacatacacattctattctattttctatgtggctggcttgcttttccagatgagggatggaattgtgcatgttttttgctttttgttttttgaaagcaagccaccataaaagaaaacccatcatttttcgtctcttcaattttccaaatgcagatggctctataattcctctgctcttttgacaattgacatatgtacatttccacataggaaatacgaaacacatagacatactcctctcactagtttgtccattacttgcacaaaggtgttttttgagcatcttgagagatttgaatgagttgaatccaggctcaggctcaagttgcaccaaaaattggtgctatgtcctctttcattttaaaaggaacttcaaccgaatccataaatttgtaatttttgagctctgaatgtgctttgtattcccatttagaaaaggtcttacaaaacattcttttattattttgtattccttggatagagttgaagattaacttttagacagatgattgttgctcttaacacttttttgtaaattgatttttttgtcattaaactatatgctgtgttggctgttttaaacttatggcttcttatatgcaaattatttattttaggcaggaattttcgtcatactctttatccctcatacaagagcaatcgacctcctactcctgatactatagttcagggacttcaatacttaaaagcatccatcaaggctatgtcaattaaggttattgaggtaatagctgtacatctaagatctaggttgctttccttggctgtaaattactcattaatcttgtaacacaggtgcctggtgtagaagctgatgatgtgattggaactttggctcttagaagtgttaatgctggatacaaggtaggtgatttctgaaaaatttatatctgaaatttcgaaaaagtgaatttagtgagatagtttctgtatataaactttcaacactatttattatttgtgcttgaaatcttaatagttcgatgtggtattctctaatttttttttttaaaattatgattgcattttgaataattgcatatgatatatcggtgtgcttagtttctcttgattgccttgactttttgtcaggtacgagttgtctccccagataaagacttcttccagatcttgtctccttcattgcgtcttctacgaattgctccacgtggtggtgagtatgtatcaaaattcttatccacctttttctgatccagttgactctaatgtacttaaattctgtttatcacctctagaacttcacaaagactaaattaataccaagttttgaagcatattatttcaagtctctttttctcctcaagtttagctgttgaaatttgaaagcgaaacggctgaagtagaaagatttaaatttctttttctcttttataattgtcttttaccatccagggaaattagaattgacccaagtttttttcacccttcccagaatggtttcatttggagtagaggattttgctaaacgatacggagccctagaaccttctcagttcgttgacatccttgcacttgtgggtgacagatcagataatattccaggtgataagtaattttgattatgagaaagctgtaatgaaatcctcatagatattttcatttacaattgtttttcttttcagtttcttaccagttatccttaagagctaatagaatggagtccatctgcgtgtcactattgaaatcctaatgcactcaatatgttatgcgttttaatagggatatacatatttgaaactatgcttgaaatataagcccgtgacattggaatgcctgcaactggatttaaatctgaaagtttcctatagtcttaaaacagaatcccaaaagataatttagagggcctagtttatttttttaaatgaaaacttagtgcatgagtacttatgatagttcaatgcaggagttgaaggtattggagaggttaacgcggtgcaactaatctctagattcggtatgcacattacatgacttatactttctgctgacaatgggtttccttcatttcgtcaaaaaaaaaaaaaatgatttccttcatatatttcaaagtgattttgtttagtcttccacccctttctaaatctggaatttaaagtattgggaatctaactgctatcactatttggcaggcaatatagagactttgctgcaacgagttgatgagctaaaggaggatcgtattaaaaaggcaagtattatcagttatatgactgatttgatgttgtaacttataagatccatttattataatgttcatgttctttcgtaccttctttctttactttaagagacgagacgacacatgttaactgcaaaacaatctttggtgagctttgttatttaaattattgttaattgcaaattattgtgccttttgtttttgtaaagattgttagtataaactaactcatgaatcatgatctactgcacttttcttgtagaccttggtagcaaatgccaatcaagctcttctaagcaagaacttggtaattatactaacattgctgccacttctttgcccttttgaatttgttttgtttctttccttttttcttcaagtttggattttgggatataattatttgagtgcatgacttaacacaggtgcttttacgttcggatcttccattctacatggtaccatttgtcactgaagatctcatatttaagcatccagaggtttgtactatcttagctctataaatttcaattgagctatgcatccattgttttgcatgagaaacactagttgtcatactcatcgaggactaccccgaaataatggagttagataatagatatggttgtacccctatgccattgctaatattgatgaatgcaggataatggagagaggttcagtagcctgttaaccgcaatgggtgcctacgcagaaggtattttcagttgatcccgttatcaggagagcgtattacttgtggaagaagcttcaacggtgacaaagttatagcttgtttagtcaagtagaaccataaattctatcaaaaaaaaaaaaaaaagtagaacatgatgtttaggaaccatactctgtacagcaattgagaatattcttgaaaatattattacacaacaaacgtgcaatttttattttattgggtaaattaggctgaatgcctaatgttttcgaagtgttacaattttatacactttttttttccttttgtggtaaatatactaaaatatattttcaacaagttgacttcaccatcctaatttccatccatcacatgaatttaacactacccaagtctatatgcaaatttttagctttcacacaaagatgaaattataatttattttttattaaaacaataatacacattgtaattatttataacatgtcatcgttagtatttatatgactgaataagatttttagatacttttgaacatgtgttaaatttatattagtacacataatattattattttaaaaatataaaagtta

SEQ ID NO: 185063 - DNA, 1534 bp, Cannabis indica
tttttttaaaaaaaaaaatgggagtacacactttttctatataggacatgttagttcagcccactcttctcattaattcatctgcacctttaattattgtcgttagacattaataaagataacgttccttctctgtatattaataaatcgtattaaaaaaaatcttcgttggaacaaaactcatgaatgaatgtatcgatcaaaatatatacataaatatacataaatatttgacactgcacaaataataattatagtcacataatttaaataatattgtcttatttgcaaattaaatttaacattgaattactattattattatgctaaatacatttacgaagtgaagttatactcattatgctaaaactacaatcacaaattttgataatatacgaatttgtattacttaatacataataaatcatttgtattaatttgaattataatatttataaactcaagttatattgtgacaaagtaagagttagagttcgggtcttgagttacgagtcggtgtcaagggttgggttgggtccggaatcaatgttgggttttaaatttggctttagggtcgacatagttcgagttagtcggaatcttaataaggggtccaggactccagggtctgggtttggcccgtttgagtgtgatatctaggctcatgtccaaagttggcatgggtatggatttgagtgtcaagatcttatttaaatctagagcattgctattgggcacagtggtgcctagcaccttctaaatgtgttgacttgcaattggctagcgatactctataaaaattattatattaaactatatgggacccgatacttaattgcaccaatagcgatattgacacgtaggagggtgctaggcaccagtggtgccctttagcatttctcttaaatctagtatggaggtctaggtttgtccaggatcgatgtcaaggtcggagtcgtgctactggattgaggtcttagtatttttttcaagtgcaatgataatacaatttactaataatttaaaaatcttaagtttgaacccatactttctccctttttctcaccactcactcaacacttagctaaccttggtagcttatttattttttttgaaaaatcttacactatgtttcattccatttatttttcatattccgtcaatggtaatgaacaggagtaggatgtgctttccaagtaaattaattatttttttagttttatttatttaataccttcaataagaatggctctcttgctattagagatgaagtgaaagaagggctgatatgctatcgcccattaattatagtttttttgagcttgatcttaaaaattaaattattcatggctgcgataaaaataattaattaaattactcaagtaagactcatcttacttaaaataattaatttattttttttttttaccaatatatctcaactaattaatggctgctgtgataattgataaagtgttggccacgtatcacaaatgctttgactacattacatagtcaaattatagaatcgtca

SEQ ID NO: 185064 - DNA, 1558 bp, Cannabis indica
tatttatatttgtatatacgttcaatttacgtaccattctctttttgtatatatatatatatagtgcgaatttttcatctaaaaatacaagtacaatcagatgaaaagttatcacgttaagtcaatcttaataggaagagataatttttcgcaagtgtacgctaatctttactcatgtgctattaactgcaaaaagtgttgttaaccgtagaaagtgctattaacaacagagagaagaagtgtagacacaacaaccaatatgatcaaagaaaaaatgatcatttgacctcgcatgatgtggacttgctagaagatgcgatcaagacaaagtttagtcgcatactatgcccccgcatagttaaaagataagcacgaccgagagaagttaatagtactggtcgcacatatactgattatacgcgatgagcaagtatgtctctcttgcgacgagtaaagatcatttctttatataggtttggtccgaatgactaatttgttcgatgactcgttagggactcgcatgttccaagttaccaacgcatagaatgtccgacaatgcaatcaagggtgaatgtagacactaaacgaaataggcctaatggcccatcctgcgagtacaacatcgtagagcctgcgagctcatctatttagaatatgcatagacaagctacaacttatcaagtcgcatacattgttgcaattaagtaagcgacaaaagtgttctttattaattccttaaatgtttatcttgatttaattatgttatttattgtgaaaacaatatgatctgatcgattatgtaatcttaaaggacacttactttctttataaagggatgatccaaaataaataaactacgctgaaactattgcctaaagtggactaagcagactaagttctagctaaaccactataattctcttatcttctctatgttttgctttcgtttttttttatattttgtagcttacactttgagtacttgctattctaggtgagcactcgcataactcctagtgagtgtccttgctatgcttgaatactcatatcatttggtattgtctaaatttctcccataatatttggcgtcatttgtgggaaacgtaaatatatctaagatttttggaggagaatcaaaatgaatacataatagaaaaacacgaacaataaccacgaaactatcaacattaacactatcaattttccaatttttagagggagcgacccccattgatgttgttataggtggagtagggcataccaatgtgactcccttcaacttgtttcctcaattttcaagccctgttgaagaacctaaacactggcagctactatgggacaatttccactaataacacatgcttagcctcagacggcatcatccaactaacaacttcgcaatacttgactatgcattagtagatgcatgcattataggcaaatatcacaggaagagatcagattagagattggtgtccaccatgagtcccaaaccaatgtcgttctaataatcaggtaactaacgatattagacgttgtaattgttggaattatttta

SEQ ID NO: 185065 - DNA, 3186 bp, Cannabis indica
tagaaaataattaatttaatgaacagactaaaatgttaatcctgaaaataatttttttacatattccgtgagaatttcgtattatattttctatgtatcatcagttttgtcgcttatacttggagatctgttgttagcaaagagaattaagaaagacgcgactcaactgaactgcctgcattttgcttttgaactttcttctttttcatcatttccctcaactccattgcactattccaagcccctttttccccataaatcttcataagcaccgagtaaaccacagggtgctcatttttcagtttattaatcccctcagcagcaaactcaccaagttccaaacttgaatgcaagccacaagctgcaagcaatgcactccaaacaacaatatcaggcttaaggggcattcccttgatcaattccactgcttcctcaagatgacctgctcttccatataggtccaccatacaagcataatgctctcccctggcttggactccatactcggtcaccattgcattgaactgctcctcaccttcctggatcaatccaccacgagcgcaagctgataatatgcttacgaaagttacttcatctggcatgatcccactctttgtcattctcttgaactcatccaacgccctttttgcaagtccatgtcttgcgtagcctcctatcattgtgttccatgaaaccatgttcttattcgacatggactcaaaaacagagaatgcagcatcaatgtcgccacattttgcatacatatcaacaagtgagctcaacaagacaatgtcatctggtatgccggatttcaagacacctgagtgaacttgctggccagtgagaagtgaacagcagcctacacacgcatcaagcaggctcgaaaacgtgaaatggttaggcggaatgcctgacttcagcatcatggggaagagcctcaatgcctcaataaaccgctggctttgcacatacccgctaatcatagcagtccaggagaccacattcttttggttaattttgttgaaaacccagcgagccttattgatcattttattgtcaatatacccgttcatcaaacttgtccaagaaacaatattcctctctggcatgacatcgaaaactctctgagcctcccttataaaaccaattttcatgtaacctgaaaccaacgcattccaagaagaaatatccttgtccaaaacctcatcaaacactctgctcaaagcaaatggatccccaacatcagcataacctctcatcaatgctgaaccaacaaacaaacttgggttgagcccaactcgaactacaaacgagtgaatctggggtaccaaaaggttgagctcagtgttaaacaccgcgctgagaaccaaggagatggtatactcgttggggctgaaactagttcttatcatttgtaagaaataaccataaacgccatgtgggtttttagtgttccttaaacccaataacatggtgttccacgatacaacatctctaaggggcatttgatcaaacagcttctgggcatgtcgcaatcggtcatttttaacgtacaaggcgattattatgttgtaggagacgatattccgggatgtggggttaagctcaaagagtacagtcgcatcttttatggagttgttgtgaagatgagtggtgagcatgtgattgagactggtcattgaagaggtacaaagatggcggttggtagttaggaagtgcaagactctgcttaacttcctcatttttcattgaaaaaaacgtatatatcagtctatggctaagatgtcttatttatattaatgatgctatatcacttcatctttatgtatgttttcatttcattattattattctgaaaaagggcacttgtaataaagttacctaaattgaaattaaaggataataatagttatgaagaagtaagatagcgaattgtacagggtgttcatttagctttagcccatgtgaaaaaaagtatataaaaaattgtagtggttcgttatatttcttattaatttttttaaaaatgaaaataatatggtttattagttaaaacttaagaggtgatcaaagcttgtaatggacgtcggacaaaaaaaaaagcttgttaaggacttattttaggatggtgttggcaaattcaaggcctagctaaaagaaaattgtacagattatgaacttgttacttttccaagacgcccaacagaaaataagaagaaaggaaaggcattttaaaagtaaagagcattttcaatagaattcacgctattacatagaataaatagaaaaaaaaaaaaagcatagcaggaattattgtaataacacctctaaagatcaaatgaagggatttgaatgtttgttttttgctacattgtattcctctcttcatcaccaactttcaattattcatttgcgaccacccaatttattgtatagctcatcaatttgaacctgtcaaaattttgacattgttgagatgcttttcttcacaaagacacatatgtagacataaatgtacattatattgaacagaccaagtaagagaatttagatttacctcataacatttgagaagctggtttcttttctttttcaatgttgctgtcaccaagtctctttccatgtcaaaaggctgaggttctagaatgacgcctttgataatttcaaaccctcttagctgtttcaatgatattttaaaaaaagaatatttaaagaagaggtacaaaaatgatgtagttactaatatgagagctgctcagaacttgtacaaatagtgatatgtaacttagagcttcaaaacatgggaataatgacttgagatgatacagttatgatattgaagctctctgaagatggtaccttgtttctctcagctgttaactttagctctgaaagcacataactggtcagctgatcaagctgacacagctcagaaaatgaacccatatgacccttttcatatgcccattttttggtgttttcttcattgggtataaccactgcaactaaagatgatttgaagctgttcccatatatccaaatcttacaaccagttgaaaaaaagtaaaaagcattttagtatagaccaaaataagtacagttagaacaaaagtaagagagagagagagagagagagagagagagagagagagagagagagagagagagtacgtactacgtactact

SEQ ID NO: 185066 - DNA, 2059 bp, Cannabis indica
agaattcgaaagcacacgtagtgatggaattcgacgagtatgattacttggagaagactgtcgaggagaacgacgaccatgatttgaagaggaagacgaagaaagaagggagcgagaagagttacaggaagagagatgttgaagatgacgctgctgttcttctaggcggcgaagatgatgacaacaggaggagcaaaaagtcgagaggagagcatgagaatggtcgcgataaggaacgccgccatcggagtaaggatagagatggagagcgagagagagatcgtgaccgtgagcgggatagagagaggagtggtagagatggggagaaggagaagggacgggatagagataaggagagggacagagagaggagggatagagataaagagcgggaaagagagagacgggagaaggataaggagaaggagaaggagaaggagaggaggaggagagagagaggtcaaggaggagcaggagtcgctctgttcgtgacgaaagcctcgaagaagcaggagtcagagtcgcgatcgcgaagaaagatctacaaagaagtaggagtcgatctgatcgtgatagggaagtcaaagagagggaacgagagattgagatgagagacaggtttgccgacatattcttgtttcaaagaaacgaaactggtttaatcaactcactataatcccgaactaggactcatttaagcattacatttacatttcctaaaaataatgttaaacttgccttgtctttcctgttcatgttaaaattatcagtttcattttcggcggattcgtcttttcatcgtttaactagtgaaaggcttaatgtgaaatcttctccatatattaatttaaatgagggtttcttaccaatgagagataaaattagtttaatttttatttaattttctgcttgttgatcttactgtgctgtatgaaatatgaatttcaggaggttcaaggataagaaagagttagcagagcctgaagctgatccagagagggatcagagaactgtttttgcctaccaggttgtggttggttgcagcttttttttctttctgtttgctcatgtttattgtctctccaatatgtttgctattctctgatttattcttgacttctgcatcgtgacagatgcccctgaaggcaaatgagagagatgtttatgagtttttctcaaaagctggcaaggttggtgattttattttccttgtagtttgcgcagagtataataatatgaacatttatactgttcatctctctctccccttctgtaattgatagtacttcctttagagtgaatcctatcgtattccctctatttttcatttgtttgcatgcagtttgaatatgtgcataatacgtcttaagagtacttgtaattgtgttgaatgaattgcttatggatgcatgtattaaaattaatttgcttcttattgcagtacatgatctcctgccttcagttacaaatagtgtagtaagtattttgtgtgtcaacattctgtaaatgggggggtgagtgatgctcttgagtttgttggctgtcttctgaactgcccaaattaggtgttttatatgtagtctcaaggtcgcatatctctttcttctgcaatatttttcattgtttgggattacagttttttctttttcttttcctgtgttcaggttagggatgtgcggctgatcatggacaggaactctagacgatcaaaaggagttgggtatgtgtgtttatataaaattgttatatttttatgggcatgcaatttgtaaagtagttattaatatcacagctttctagaatcaagtttaactgtattcttaaatggactagcattgcgattatgatgagggatgatgggaataccttgcactcatgtttaaacaattcatgctgcgtactcaaggtagacaacatgaacctaaaattcctctttccagttttcttccactacgtgtgtagtgcaccattctgttcctattcttggattgggaggcactgagtcaacttggtagagtttgattttgaagcatttccaaaattaaaagtcggcctggct

SEQ ID NO: 185067 - DNA, 1886 bp, Cannabis indica
attcattgatatgttcttgatgatctgatcaattatttttattcaactgttgatgagaagttacagtgctacacaaaaagtgggaaactgaaggtaattaaatttaattacaaatttttattattatcatttaaagaagaataattatattatatacatattattgggtatgattttaaattctgtatgtataatatacatataaaaaattaaaattagtttataatttatattcaactcagaaaaattgatcatgctataatttaaggttttttaagttattaattttgtttctaattttctaatttgcattaactttgaaggtcaaattgtgggacggttttataaatattaaatgcataattaagttataatttatattgatttatatatatatatatttatatatgacagaatattatgtgaatgatctgtaattgtattggtaacaggttcatttttttggggcatttgatcttagaaatgggttgtttaagtaaaatagttaaaagaaggaaatctaagcaagttaaggtaagtaattatacttcttaatcatttattatatatatatatatattgttttttacatttgtattagttcaagtgtttgatatttataaaaaaaaaactaccctttaaaaagttgaagaacaaagaaaaatccatgtttaatagtgattgtgaatgtttagttaccaatatttacaatatatgttactatatattgtttttatatatatatataccacttttagtccttatttttgtttattgctaagtttttattttttttcttgggaaaagtttcactattccaattaagtaaatagaaattgatttttgtgtaaataatggtttgaattggattttgacataaaaacttcttagatagataattacattgttttgttgtgtttttgaaataggaagatttggttaccaatgaaacaaccgtcgatgaaagtttgacgctatccaatcaacagatgacagctgccactaagattcaagccgtttttcgttcctttttggtagggctaactttaagtataagcgagttagatctgtgtttagagtctaaaaatcttattatattttacttatactaaagattttttttgttttagaaaaataccatattatatttacataaggtcaaaattcttgaacatctctaattaatgatgcatattttgagttgaatttaacttaaaatattttttgtatcaaatttaacatatattttacatttaaattttagtaaaatattcaaaaaaaaaaaaatagcaatgtactacatttatagctcttctttgaaaatattctaagaacattcaactttggttcaagaacaaaaagaaaatcatttttcaaactaattttttttgactaattattctacttaaaccaactacattttgaaccccttatttttgtatttatttatttattttgtaaactaaaaataaattataggcatagtgattacacacaagagagttgtatttgtaggcaaaaaaagtattgcacaatctaaaaagcaaggcaaaagaaactcaagaggagtttgatcaagatcagacgattaacgatgaatccatgtctacaacgacaagtggcgtaaagggaactgtccaaattcgcgattttgttggagttcacacagttaaagatcaaacaatgtctgcattgaatcacatacattcatggagtcgaatacaagaccaaattagggctcggaggctttgtatggtgaaagaagctcgaattaaacaaaagaaattggagaatcagataaaacttgaagcaaaaattcaccaacttgaggtattaatttctagctagtattagtaacttaattattgttacttttatttagtttt

SEQ ID NO: 185068 - DNA, 2626 bp, Cannabis indica
ggttcaaatcccactctcaacatcctattttatcttttttgaggcacattaattaatagataaataaatagtggcgccaaaccttatcagttagcaaagggttattgtttttggtagttataatcaatacaacaaacaacacaatatcttctccaatggcttctctatcaaacctgggctatgctttccatggccgtgctctaaccacccattttcatcgcccaaaacgcaactcttataacctcctccttccgcatcatccatggcgtctcactctcagagcttcttactccgctgtcccaagcgtcgacctcaagactctcgaatctgccattgcaaaggttcttacttactctattttattttttattttcaacaaaatcacttaataaaaatgatttattcctatatccaacgcccaattttgatttgggttttgtattcataacttgggaagtttaggaaaacacaaggcagctaatttgcaaaacataaaataagttgggtgcccaaaagactaatgacattacactagccttgtttcagctctttatctttttgtttttttgtttttttttttggtatatattattgcttctcttatgttgaaaatttgctgttatgtgacttttaggaactacatttgacgatatatatatttatatataaaaaatatttatatataatgtttgtagaaagatagcacaagtgttaaagaggcacttgatcagctgagtgagcttggatgggcacaaaaatggagttctcagccatatgtctcacgtcgtacggtcagtcttcattaaaaagtatgaaattctgggaaagtgcttactcaaacattagcaacttctacaaacccatgcatatacatataaaattacatatacattaattaatgtaataatcaattcaattgcaagaggcttgatcattcataattcaaatcatatgttactttgattggaaactaaacggttagattgtgtcctcagacatctctcagggagctcacttctctaggaattaaaaacgcggaaaatcttgcaatccccagcgttagaaatgatgtaagtgcctgccaaactttttctttagctcttgttttattatggtaccattattcttttggttttgcgtttttaaaataaaatgaaatgagatatttgggatgagctttctggtttttgtcatcaatggagcttttcaatgtgattttgaaaaggctcaaagatcctattgtagtctctcattaatatagtctaaactcaactacctgaaagaagtatcaatgttgcattttgttctagatttattcatatgattgaatttgaaactaaagatactttcaagtgcaattggtaataaagcatatatgtattaaaacaactgttttatgtattttgatatctttcagtaatacaggcggctttccttttcacagtggtggggacaactggtttcttaggtgttcttgctggccaacttcctggggtaaatatagagaatactttttttctctttttttatctgtgtaaagattacttgtatgtttggattggatcttaactacacattagacagtttgaatcataatctatctcttgtgactgaattgttagatttactgatctgattttcggctattttccatgtttcgggttcctatccctgcaggattggggcttctttgtgccatacttgattgggagtatctctttaatagttctggctgtgggtagcatatcccctgggtaagaaacgcaattctaaattgcctatgatagctttatgattagttgatctgttgatgctctaatgtgctatactcaagtatatacagtacacacatcatccccacaacttgcctaagatatcttcttaagtaacggttttgcctgcaaaatatttaggcttcttcaagctgccatcaatggcttctcaaccttctttccagattatcaagagaggattgctagacatgaagcagctcattttttaggtaattcacattgaaattcatatgtctaacaaagatatgcatgatctcaatccacatgttaagttccttatactaacaaattattcttactagtactatcactatatatgtattgcactcggataaggcatttttgtttcttaataaaaacagttatttgatgatttagttggttatttgctgggcctaccaattctggggtattctctagatatcgggaaagaacatgtcaatctcattgatgaaaggcttgaaaagcttatatacagtgggcagctagatgccaaggaactagacaggtatcatttcatataaatatgtagttacacaattcatagtaggagaagacaattaccagcaagaaagtgagaaaagaaacaaaccaaaacaaaaaatccaagtctaccattctctagagttacacgcctatactttttttatcaattaccagttctggagctggattaactgtattatcttttctaggttggcagtggtggcaatggctggactcgcagcagagggccttaaatatgataaagtgattggacaatctgctgatcttttcactcttcaggtcataaccctcacttggtctatttcttttttcttctctctctctct

SEQ ID NO: 185069 - DNA, 3354 bp, Cannabis indica
tactaccagcagtcataaacaataagtaacttacatcaaagctaatttgtccacctatggagaatgtcaggttgagatgagaaaacttctcccttagcactgaaaccatttttgggcgtatattttgaacctgaaaccaataaactcaaattaaacaagaacaatatttcctcgccaaatcattgttttggtcattgaagttctttttttagtaaaatgttatgtagttgaagatgaagcttttaccttgtcatatctttcaaattcatccctttcttcctggctgcagtttctcccgattggtgagacattgatcatcccacttcgaaactctataaatgttcctctaatgtacaataaggaaagcatgttagtctaaaaaccatttcagtacatgaaaaggaatagtggttatcaattaacaaacctttttattgggatatccaggtcagcaatataatgaagagtaaaattgataaattcctgcagccatttgaaatttcattaaaaaaaaggcatattgaatttgttctacaattggccatacaactctgaacctatagaaatatcactacaacaacaccacttcccaagaacaagttggaaacaaatagattcttcaaacttttcaacagtttgtgcttttgatttcatgatgttactgtatatggtaaaatttcatcactaaattcttgaactcgaacaaaatatgtactaaatcggctccatctgtttccagagttcatatcatactacccgcaggtatcttctataaattaaaaggtgttgcagaagatagagagggttatacctttagctggtcttctccaagatatgacttcaagctctaagcaaagaaaaatgcataaaacataagtgaaaatttctctagaatttaattaaattgaatctatataaacaaactattagaagggaataagaaagaaagtcaacaaaactttgttataggttgtaaacatgcaagttaccgcaggtgaattatctctagtacgtgctatgcagtctgtatatacaggttcatactgatacgtataacaactctaaagatgcacaaaacgataagaacttttttttttttgagaacaacgataagaacgttttaactaatatcatttattactttggataactttttttagaacaaaagattccacctttacactaaactattcttttttgctcacatgcagggcatcaaaaagtatatttaatttctatttcttgtttccataaaataaaccgatcagaaacggacaataaccttatgatttgtttcttgggaccacctgagtatgaaccaatttcaacaattctcacctattaccactacccccactaactactaggtttatttataaatctaagaaaatcaacatactacaacacacaacttgtttatacagacttcatcaacctatacctgggtgcccattagcttcccatctttgtgagccacgaggccattctcagaaaaaacataatcataatcatcaataactgcaacaaaacaataagcatatattaatagatcaactgaatcaagatcaacttttgttcccctcaaagaattaatagatctagttgcaacaataatggtagggtatatgtgtatcgatattcattactgagattaattgtaaataaagtggtcctcgtctacataaagagtatgaaaagatgaacttcaaccactatagctcatattcaaaagcatattaaaggtattaaacttggaaaaggagaattctgcattcacaaacgagacaatagagtatggctaatggactaacataaatacctgtctttccaagttgctctgttatcttgctaaggtcagatccccctacaacaccgactgtgatgacctgcagaataataaggttgtctcattatccacaaattcataacaacaaaagagacccaaatgaaacttcacactgttacacaaatggatcatgtacctttctgagttcacgcataaatgtaagcatttggggagtagcctcctacaatttcacgggaacataattattaaagatttttttcctaaaaatattgcccataaaataaatatataaaaagagccactagaattaaaactaaaccaatctgagtggaaaattgaaatatcaaattacctttcttggagctgtgagagtgccatcaacatcaaacaaagcaatcacaccaggtttcctcaatgccattctctctggttgaaaatattatcaataagctgctaaatggaacaaatacgacaatgttattatggcaaatagcaatccaagatcaagtatatgcagctgcaagtccaaaagttttgaactttgaattacacggaatatatattagactaatttgatcgaaaacgaagaaatcaaaagaaacgtaaagaggtaaggtgaataaagagcaaagtcgaatttacaaaagagaaagctaaagttgagagttggggaacttgttgcagatcttgtttagtgggagagtgtaggggggattatatagattggtgattggtgaggggtgaggggtacagtagcttcagagtgagaggagagcttagatatggagatccgtgcaaatacgtggacaaccattgaatagagaatattcgtattagttcgggtcggaaaccagacccgcccattttagaattgggtcacccacacagagtcacacacgcacaccaaaatctaaatctgctaatttagtctaaacaggtctcgcatctcctccactctgtccagaataataagacatcctttcctttgacataaatattaaggatcttctacagaagagtatatatgtaaagtataaaatttccctctaacctatccgtactccatcatctgaaccgttagtttttggccaaatcatgaaacatcttgactttgcctagcaaattcctttttcttatattggtaggcggttacggtagatctccccatactatgactcttccctaacttggattattatattaaattttttaatatttaaggaaaatttacattaagaataaacctactcttccagatctgggattacatatacatatattaagcccaccaacaatgacaagcggtataatattttgtttgttttaaatgagaatatattatttgttttacacaaataaaaaactaagacaaaggtgtgttgacgtaaattgagtgtgctcagtacacattatcattacttgcagttgcagtttaaatcaaagtattcacattcctatgagcagtgatgataaaaagtaaacgtaaaatacgacctcatctgttcaatctaaaaggcattatatagtttcaatcaaagtcattagaa

SEQ ID NO: 185070 - DNA, 7100 bp, Cannabis indica
agtgttctttctttctatcttttgagtcttgtctttatgttactactgttgacctttataaattattaaatggcatttctttttccatgtttagaatgagttttgaatcttagtgggaccttaaaagaatcaagaatctgttaaattaccaatgttttcagtaattattattattatttatggagttgtgagctttgttttgtccaataatgttgtcctgcttagagggttaaaaaattaatccttacaatatttaatataactacaggtattggggtttggttgggctgggatttttagaagatatctggttgaaccaggtgaaatgtggtggccttctaatttggttcaagtctccttattcaggtacatacttttgaattagaaattagaatgtaatagtctttcttttcaagcccctaatatgatgttttaattatgcagagctcttcatgagaaggacaaaagagttaaaggtgaaaccactagaacccagtacttcattctggccttggtctgcagttttgcctattacatcattccaggctactttttcttaatgttgacatcattctcttgggtctgttggcttgctcctaagtctgtcttggtccaacaattgggttctggactaaaaggtcttggtgttggttcttttgggattgattggtctaccatttcttcttaccttggaagtcctttagctagtccttggtttgccactgcaaatattgcagttggatttgtgttagtaatgtatgtgatgactccaatcacttattttctcaatatctacaatgccaagaactttccaatatattccagctcccttttcatgtcgaatggtacgaaatacgacatcttgagcatcattgataaaaatttccaactagatagatctacatatgcaaagactggacctataaatttgagtactttctttgcaatgacttatggtcttggatttgctactctttctgctacacttgtacatgttttgcttttcaatggaaggtatgtagtgtactcaatcaacttccttttcttgctagagactcatgatggaagtagtttttattgatttgaaacttttcttgcagggacttgtggaatcaaagcaccagggcttttcgtggtaagaacaaagctgatatacactctaggcttatgaagagttataaagcagtgcccacatggtggttttatgtcattcttgtggtaaacattgctcttatcatcttcgcctgcgagtactacaaggagtcactccagcttccatggtggggagtgttgcttgcttgtgctcttgccattatattcactcttcccatcggtatcatccaagcaactacaaaccaggtataaaatatcaaacttattgtaagctcatgtctatacacttatttgattactgattttcctttttatgcatctttgacagcaacctggtttgaacgtcattactgagtacgttattgggtacttgtatcccgaataccctgttgcgaacatgtgcttcaaggtctatgggtacatcagtatggctcaagcactaacctttctagctgatttcaagcttggacattacatgaagattccaccaagatcaatgttcatggcacaggtcaagattttgtgtctttgaagtttattctctcgaagtgaaaaacaaagttgtatctgaaaactaataagcttttgtattgcaggttgtgggaactatcgtatcggtgatagtatacacagcaacagcatggtggctgatggggtacatccccaacctttgtgacacctccatgctgccaagtgacagcccttggacttgtccaatggaccgagttttctacgatgcatcagtcatctgggggcttgttggaccacgcagaatctttggagaccttggagagtacggcatggtaaactggttcttccttgttggagccattgccccactcatagtttggattgcacacaaggcttttccacaacacggctggattaggctcattcacatgccagtcttactcggttcaacatcaatgatgcctccagcttctgcagtcaacttcactagttggatctttgtcgggtttctctctggatatgtggtgtacaggtactatccgcgattgtggcagaggtcgaactacgtcctttctggtggtctggatgctggaacagctttcatgacaatattgatattcctttgtcttggatctcgaaacattagtctctcttggtggggaaacaacccagagggctgtcctttggctgattgtccaactgccaaagggattgttatggatggttgtccggcatactgatgatattaatttcggtttcttttcttcttcttagtctttagacactataatatgtttattttctatggctgtaaatagtttctcaatcattactcaaccatctgtttactgttgatcagtttatataaattttctcttctggaagaaaactcttcctctgcaatattatctatacaaatatgagaaaaattcaagctttttacacatacaacaacagaagatagaatctgtggttttccacactgtacaaacaaagaatatgcgtttcataatcataagctgtctagtgtttgcttctataacaatcaaggaaacattgaccctgacttaaagtgtagggcaatatcaattagaaaaacgaagattgaacacccaaaactcccaattgagagagtagttttgcagctagagatttgatctcctttgtgtcgctagctttcttttgagcaatgtcgacgagtggcatttgcaccgaggctccgtaggtgcgctttaactcgtctagttgaaatatcatctccaaaccctttagacatttcaactgcaatctaacagaatcatagctcaacaactttataattgctgtaatggcattagcattatgaagaaacttgctgccattctgtggtttttgagaatcgattaatgtcaaaagtgcatcaagagcagcttcacttgtttcaagatctggttcaccaagcattctcacaagtggatcaacagcattagcctccaaaatgcagaacgaagactggattccacaactgcccatgtgagcaggacaaccaatttcgggagaagaaaagcagcatagaaaagccccgcgtttcttaattggcttgctgaggttttttgaactttctgaaagctgcttaagagcaatggctgcattttgttttgtaatagaattttcagaagctaaaagtcgtaccagcacttgtatgagaccagcttcggctactctatgctgccattcttggttcgttgaaactgtgaagcggcatagagctctaacaacattccctattacctgacttttgtaagaggcatctctattcacattgttgagacaagtgtaaattattctaagggcctcagcctctaaaagccactgattcatctctagattcctcggaagataagctataatacccattgcagcaccaatctcttccacatcacttgaagtttcgatgattctgagcaaggtctcaatgcatctttgattgacatgctccaagaaggtgttgtgatcgtcagcatcttttgtcaagcaaaagaacaacttcactgcatttgctcgaactgagtggtgctcggcctcacatagtggaaccaagacttggatagcagaaagctgcataacacaaataataaaatccattataagtaaccatgttgtcaagcattgtaaaaagagagaaagagaaaaggaaatatagctaaattagttcagagaaatataacaagggatacctgtctcaacttcattctgatgtctaaaccagaaggaatctgacacaaagtgtgaaaagttttgaggatgcttccctttatttcgggccctgtaaaagaaatgagggagaaaaatttaaaaatgtcatcctctgactccaacagcgagacctgttcaccctcagattcttgcctggcagttgatatggaaagaaacttaattgtggcggctgcctgttcacgcaaagctggtaactgcaaaccatggctataaagaacttcaaacagcggtccaactgcaccttctttgatcatttgcagaccgttttgaggtaaactggagagttgcaggagagatttgatagccactttctttgacctccaaatcaccttgtgcaagcatttcaataagtggttgcagtcctccatctttaacaatgactagtttgctgtgatcagtcaattctatttcggctaaagtttcagccattctcattctaacatcttcaggtcctgcataatcagcaagaattaacaattatccaaaacaaaatatatactaagctgagccaggtttagacatttcaaactcaacaatggtgtcagaatttctttccaaaatatttttcatatgttcggcgtacctgaagaaagaagttgcaataatggcttaaaataatttgctttcgccatttgcttaacattgctattttgcagtgacaaaatctctaaaagctgaagagcttctgtggcaacttggttatcttcactgcttaacatagtcaccaggagaagtatgcagccctgagcatttcctatcaaatctagtgcaacattacttgtggataattccaataacagatgcaatgctaccttacttcctcagattgacgagcaagtgagcgaacgataaattgaagtgcaccatctactctagttattttttcctgccaaaaatacaagaaagaaagaaagaaaaaatgtcagctccatctttcaaactgatgtacaagaactattataacattatatgcaaatagcttaagcatattcagtccacttttctataaataaaatggatttttacttacccttttatcttcactgtcctttgctaggatggataggattacaagaacctcccttcttatttctcgatttttcgcactaagaagtccaataagaactgatatgcagtcctccagtgttgcccattctcgatgcagctctttatccatgcacaacttgtgcagcatgcttaaggcctcaagaacttcttcctcttgagttgattggagttggggtttaatattgacaatggtaatgatattgtttctgtctctccattcttcaatggattgcctaagagttttgttgggtcgtagtgctgcagcatcaaggggaacctttgttaagggacagaaattgttcccttctgcaagccatttttcgattgcacttctttcgaacgtttgtccagaagaggtttccaccggatctaccataacttcatgagtgatgctacaataaaatcccttgagtggcaacaaatgttgattgcctaaagagtttctcctctcaagatacttcttctctttctcctcagatgatgttgtagcatcagcattttcaagcaatgttatgatttgctccatttgtaaagattcctcctgttctttcctcacattggcattttctatctcacgtttgaacttttcgtactccttcttcaatgcagatttctcagtagataaaccaagagcctcagcaatttgaaacaacaaattatttgcatacgagcggttaccattcctttcttgtattcctaactcgatcttccccaaaatttcttcctccaacacagctgcctggtattcagcctccaacatactcttgcacaactcactaagcctgtcatttattgacaatgacacatccaaagaggctaacgagattaggcttagagctcgactaatctccttagtactgtcatctaaacactttacaatcttcctgcaattgagtaaaagataaagtttatgcctttctctgcaatcttcaattagctgcttagcagctttcaattctcggttcaaaatcaccaaagcactttttaagctctctgaatggtcaagattttgtttcgaaatttctttcaagatggttgctgttttctctaagtgtgttgagaatgtaataaagttttctttctgaaatacaacttttttggctaattgtgcagtgtcaaataaactaaggacaatatgagaaagtaactcagaaactggaatcactgcagcactaatcatcatatctgttgccatgttcttgatgaagattgatgatttaaaaaatgtccctttgatttatatttgaactacaattcaacaccaaaaatttctggtgataagaaaaaaaaacgaaactcaaatcaaaatataaccataaataaatagaaatttgcaattaataaaagaaaaactcaattttgctatgactaaatagacaactaatcatcatcaccatattttggtatcgatttcagaaaaaggataagatcaaaacactttgattttagtattctaaaaccccagtttcaaactctaataagtggttccattttcttatccaaaacagcaaatttgattatatcataagaacaaaaacatttttcttttctttttctcctctaactttctcagacaccaaacatgatttaagtaagtactctaaatttctgtactttcccaattaaattctcagcaacaaaaaacagactaacatactaagagagagagagaagctgacctggcataacaagtcagcagttcaaaaacctttgcccatacttgattttccgggaaaagagcaaaattttactggaaaaagaactaagcccagaaaaaaaaaaatggcctctaacctgttttccttaaagaagcaaaaaataatagagcactctctctctgccaaagtctttctctaatcaagtcaacggttttctgcctcaagttcttattggttcatatttatgtctttcgccaatcaaattctgccacgtcggaaccacgtgctttgactagtcacagtgtaatacacggcagtccactatatgaccgtgtttaattattatttaattaaagtttattatatggtttaaaaggcgccaagccaactgtcaattggccttcggcgaatgtctttttctagtgatgggaaaatttttcgaatggggcgagaattacccgtctaatgagatgaagtgagtttagggtaggatcgaaggtgatactacctactctgtattcgacccacatatat

SEQ ID NO: 185071 - DNA, 4627 bp, Cannabis indica
aatttatgatacaaatatatatagtgatttgtagtcattaattggattcatttgataaaataaggtaaactatttaagacatttaaataaattctatttcttttattagtaatttttaattcaaacaattatttacaacgtaaaaaatataagatttaaattcttatttaagcatcgtaaatcatcgataattaatttagatgtctcaattaagagcgtttctctacatataattataaggtatgtgattgaaattaaaaatttatttgtctacactcatatttttttttttaaattttgttaagaaatatcagtcctttttaacggccatattttttctccctatgaagtaattagtttcatttcaaaatgttttccttttcttgtggagtgaaactaaaaaaacttggttatctaaacaaatatttagttaatcatgtcatttctaaatttgagtaaaagtacattaattcacccttttaaactattgttttttaaccttttagatggtcatgtcaaaattggtagcttaataccctttgtcaccaagcatgtgtaaaataaaagtacaatctttaaatggaaaagaaaaagaaaagaaaaaggtagaaactttatgtggtgttttctttcttttttttttatttttttttttatttgatgagattctgtggtgttttcttggctcaactaaagaaacaaaaagtaggaaagtcccttctattttgggtgcttggctctatcaatgactactctttaaccagcacacaaagtcaataccaaaacccttgacaccttcccatgctttgggggtccagattccacaaaaaagcttctttctttattttccaattacctttttcttttttacaaaaaaaaacaaataaataaaaaattgtcctaaaagcttcttattcttctccttctagtgtgtgttttttttaataactctctttctctctctttagacttcttacctatcttttgtcctactcaaaagagagttatcaaattcatgccatggttttcactttcagattggaaaatgggaatggaatagaagaacttgaaagcatggtagaagagtaaaaaataaataaataaataaaataataataacattaaaaaacaaaataaaataatgaaggttttacacttatttgggttggcatttccatgtgaaatcttaaagtatatgatttcttttgcttatttttctcatagagtgaagtgaaataccaaaattttatataagcttaaaagagtagtattaattgcactttggggttgatgccaaggtttcttctatgaagtcaaccagctagaaaaagggctttgtctttcatgacaaaatcttttataacaaaaacaacttttttctgcaattatttttgtttttctcctctctttaagatttgccatgaatgggattaattgacagtttcaaattcttatctaatgatctgtaaatctcatttaattttcttcaatatgggtagatttatttggctactcattttgaattctcatctctgtcaccattaatttccaccttacacaaaaaaaaaccctttctttcaagtctctctctttttctctttccatctctttctctcttacaccaatttgactttgcagcttcatcttaaaccaaaagagaattaagattcgaacccattacagtctccatcaaaaaggtcttgcctttttctattttccaaaacaattacaaaccagcattagataattttgcttaattattagctttctcctttcttcttccattctggatttggattttgtctctactgttttctttctccaaaaatcttcaaatggggttccataaaaaagtccattcaatctaaagattcaatctttttctgttttccaaaacaattacaaaccagcatttgaaaattttcctttctattctgggtttgtattgtatctttccaaaatcttcaaatggggttccataaaaaagtctaaagattcaatctttattgaaaaaacaatgtctagaattctactccaaagtgatgtaaagccttttctttctccaacagcagaagaatcttacttcttttctcaaccaccaccaccacctttaaaacaataatcaaccagataatttcaacttcaatagcaaagtcagtccaagtatacttctcatcattgtaatcttagctataatcttctttgtctctggtttacttcatcttcttgttaggtttctgttaagacctccaaatagagatacagatgatttggaaagtgttagtgctcttcaaggccagcttcaacaactatttcatctccatgatgctggtgttgatcaatcctttatagacactttaccagtgtttaattacaaagcaattattggtttgaaaaacccatttgattgtgctgtttgtttgtgtgaatttgaaccagatgataagcttagattgttacctaaatgtagccatgcttttcatatggagtgtatagatacatggcttctttctcactcaacttgtccactttgcagagcaagtttgctccaagatttctcatcaaacacaaactgttccactcccattgttcttgttcttgaatctgggagtgaaagctctagagaaataatcacagacagagatgtctctagagataatcacagcagcttaagtgttcgacaaaatgccccaatgagttttcgcgaagaagaagaagaagaggacattgattattcatctgctaaatcaaccgagatcccacctaaaaatgaagataaccccattgattcaaccgaaaaagttgtcactgtaaagctcggaaaattcagaaacgtcgacggggttgtcgccggcgaaggaagcagtactactaacaccattgccggcgatggcggcgatgcaagaaggtgtttctcaatgggatcatttgcttatgtaatggatgaaaattcttctcttcaagtaccaattaggacaccattgaagaaacaatcaagcaagaacaagaaaccaaatcttccattgaagccgggacacagagcagctatatcagaatgtgattgcgattcccggagagaatttgagttcaccaccggagtagtagtagaagagagttctcgtaacatagttgagagcaagagaagagagagtttctccatatcaaagatctggcttcgttcaggaaacagagctgttggttcatcttcttcaagaagagctttctcattccggtttcccattcccaggaataatcataacggtaataacggtaataataataataatcataataataatgtagtggttgtttcagatgaggatttgaagagcaagaacaatgcttttcctagaagaacagtttcagaaattgatgttggaagatgggaaaatggaagaagtgaattgggtttggatcaagatgaaaatcagagctgtaatagtttggattcatctcaatcaaatcatccatcttttgctagaaaaactcttctttggcttatgggaagacaaaacaaggttgttcattcaatcttttgatcctaatatttgatattaattatttttttttaatttttaattataattattctattttcaacacacaaaatttttagaagaacatgttctgtaacttgcaaggaaaaaaaattaggaaagataattgaaaaaaagaaaaaaaatgttcattttattattggaaattgaaaaatgtttgtgtggaaatatagatttattcttttacatttgtgtttgtatgatattataatttatttaattattacatgtatttgtagacttgtattttagtttatttttgttcatatttagtctttttttttcttttataaaatatatattttgaaagaataatgtcttttggtatttctagttgtttaattatgattatggagttgaggtgtttgttgacctagaaaatttttgagcttttattttgcttggttttctggtatataatactgaggagatgaaatggtgaataataaatatgtttttttagagaaaaataataaatatggttaaacgtacaagttggattcttttattttaatattattattatatatgatattgtatttataattatgaagcataataataaatgtaaagagtggtagctaggtttcaaattcaaattttaaaatcaatccattatatatgctttattaattagtgtctctattattttcttaactttgatgtaggtaggatcatttttttaatttaattatttattcaaaatgtaacaactaataagaattattaatggtattaattatttgttttcttgtttttaatttgtatttgaaaatagttaattgtattaaaataaaacttgttcaaaattaatttatgcaaggtcatcaatcattcatataatccatttagtagaatttgatattttaatatcaaaataaaataaaaaagaataaatgaattaagtgtgggaatggagtggagggtgttgagggctaaaagaagtcattaaaggctgtgtttactgtttagtacagttgggttgggtgccattgtctagcttttataaggggcacctaacatttctctatctatttatgattacaagtaaataatctcttacatattaa

SEQ ID NO: 185072 - DNA, 5712 bp, Cannabis indica
aattcaatggagtttagcactacgtaaatacactcatcatttgcacatttgattttggaatggtttatgtttcaactttcaagtttttacatggaagccactaaagtgactcatcagactaaactaagggatcaaataggacattggctagtttaaaattaattccttaatgggacaaaagtttgacctacttgcaagaaaactagagccttgaaaacctaagaagaagacataaggcaaacgacatgaaattacattggaaaattttaaataatagaggaatgaacagataaagtgcaccccttgaacatgtgtgataaaataaataaagaaaaaagtaatgaagaatatataaatacttaaatataaccaaacaatgaatagataaagtttaaacctttttaatgttatggaatttggaataactttggttagcttccaagtaccaccctacaaacaaccgcttttcaatgcattgcctcacccaatgaaatggattattatacttctttttttaaggataaatattattttaaattttgtattttgcaaaaaaattattgtatattttgtaaaaaatattgattgaaggttaaatgataaattagatttgtatattttaaataatataaaatagtatcttttattgattttttttttttttgtatatttaaaaatataaaatctaatttatcatctacataacaaaaagtcaaattaataatttttaagaaatataaaatctaaaatagtattaacaattcttttaatcaacaaaatctatttcttagtacctttagtggcaattacgtaataacctctaatatttgggggcattaatgacctcttgatttactatgcccttgtagtctgtacagcaattgttcccttccctgcttttggaataaatgctatgcattgatacagaaaaaaaattatatatgtacataaagaagaaaatataaggctagaaattgcttggtgacacgtgggactttgtagagttaaccttttaaattttgttaacaaatagaataggaaaagtaattgacttgtgttgcactgttgccttcaatttgaaaagggggaaaagaaattaacaaataacaagttgtgttaggccaaatatttgtgacgataattataattatgaatgggaataaagctagatatgtgcagctgagaaatacagatgattttttctcttttgccataaatttaatgttttctcactcaagagctgtgagttgtcaccctccatgtattaatgtatcaacagagacatatcaatctttgccctaataagtccattcaatatggaccaaacccattcttggttttgcaagattcttcctttcttttaccctaaagaaaatgaggatacaggaagagcggaatccaacttttcaagtttcgaatattgaactttaagagctttctttcagaaaataagaatggcatttcagtagcaaaataaatatggtacaaaaagcgtttccctctagtataacatatgcagcgtggtttaacataattgtgatatttttcagtatttgttggaatgagaaaatgactcatcgattaagcagtccatgatcattgaaatataaacaaattacaaattggcatggacagtgaatattggtccagtgttcttgggaataaaatgaagaagattttcaagaacatgttttgaataagtagattatcgatacaagtatatatcttattacagttataagcatgtaatagtatcagataaacctattcatactaagaatgaaagaagtagatataccattcagaggttgtattgattagacaattgagctgagtgcaccaaactgggtgcatatgctttttaagcaaccaaaagaaaagaaaacgtatcttttcagtttacttctttatcgggtccaaaatacatggtgtaacacactgatattacaataagcaaacatccaacaagtccaccgaaagttggagctaggcttaaccaaccaatgccccacaattgtgatagggctgcctgaaagagggaaaaaattatatatgagataaatgagtttgtggatgtgcaagtaaccaagatttaaagtgcaataccataggatcttccggaaaagagaaatgaaaaagtgctaccagccagaggaaagaaagatacaatatgaaaatgccatctctaagattcgaaatttacagacctccataattgaattgataagcttttaagtgtttggaggtagtaggagaaatttaaaagaggaaccaccttcagtaacaaacaaaactgaatcttttcttgtttttcgagcacataatgttttaaacatttaacaagcaaaggccaattgggaccttgttttgttaattattttaatcttcaaccaatgaaaaacttgtaagctttattgtgccaagtttgttgatattgcagtgtactgtaatgtctatcctcttacattatttgtttctgaatagcacatatacaagggaagagatttctaactaataacatataaatagtacctcaaagaattgaacatttgctactttgctggttttctcgagctgcagtgcacgtgctaaaaatacctgataatgaacaagttcagaaatcaccatgatgcccatagaaagtaatatggttatgcttagaaacttgaatcttaatgaaagtagttcaggatcaaacctctgcaaaaaaggctagaatgccgagtataaccatgagtgtaaacgaatataaactgggtaatacaaaatcctgcaatatgaacaaaaaccataaacagaattatagcgaactgatttacaaggacttggcacacttagtctacacttagtctcataaatcaacaaaacgtagtaacatgaagtttggaaaccacattttcctccttaaaaaagcttcctagtcaaaaccaaatctttattaatccaaaccatatcaagtttttattttctttgtcatgcagcctatatcaagtttttatttataaagtacagtattgtggccaaattcaatttacctcaagaacaaaagaacaaattcctgcagcaggactagacagtacaccaaatgcaaaaactgttgacctgaaaaaacgaagtagagaatcttctaagagaagagtaatgtaaaactatctttccaagattccatgtcagacatatcacaagaagaacaggtctcgtttcttgacatataaatggcattgtttaatttcccaagttttctttcttttttgtgtattaaggtcgtccacagtacagcaataattgataagaaacaatcagtggccttacaatggctgatcagatgcctttgcgccagcccttataaggcaatagctgattccacctgttaaagctgagaataaaccaactaaaatggcatacatatggttacttccccaaatatatgatgcattgctgccttccccattagtaactagacctcctgcatgcatctgtaaatgataaataattgcacggaataatagtttctcataagttgatctagtttgttttgttttctttttttttaagagcacaaatgcacaatttgactaagtcttaccacccaattcaaagtaggttcttccgtaaactcaattccgtaccttgtgtcgtaagcactccacggcaaatgaagagtaccccaaagaaactgcaagctagacctgaaaggttaattacaatagaaaagtcatcattacatgcctaaaagagatagttaaatttctgattatgggagcaaactagcagccaccaagacgccgctccttacagccataggaaaatgttgctctcaaggaccgaccatgattatgacaaatttcaatatgcatcaggccacaaacttctgattgtctcaatgcaaaaaaaagtgtatgatattaccataacagacatgaaggtgcatatagattggcaagcattcccctatattttaaattaaaaaattaaacaaaaacaatagatacctccaatatctgcaattttcaatttttcatgtaaaactatccttgccataactgaagccataatcggagttgtaaagctcaaaagtatagtctgggaaaaaggtagtctctgaatgctgaaacaaaaatgagccaagttttagttattgctactagcctactgcggtccatcaaacaatgtcatgtacagtatcacgaacaagaacaaaccaacaatgaaaaacttaccagtaaataaaactcatcaatgacaaaaatcccacaagggctcttgaaatcaaaagatacctaacatttgctagaccccgtattggttggccagttttattcaaccacatatatgaacaaatcaagattattgtacatctgacgaatgcagtctcaaacaatggaattgactgaactgtcacaacaacaataaaaaataattaaaaagatttctatattcattttataaattagcaattaattaaggtgataatgatgaaatcatcaagtcaattgttgatgcttgcaatatattgctagacatattatataagcatgctaaagcttcatactgtcttactttagggaatttcacaattttagcttttttggtgaccttgtgcaatgcttactttttattgtttctccagcttctcacaatttttggttttgggaaacatatatcaggctaccaaaaatctgaatatgtcctgaatcttatggattttcaattaaggtacagaaattacttaccagagaagacattagaaacgactcccatgagaaaatagacggtagacgacacagccatacacagaataccagagtgtctagatccaccccatacccaaaaaacaaattgtgaaaccggagaagtctccaattcgactaatctcgttactggttcctacattaggataaccccaaatcagtaaaacaaaccaacctcccaattttcactatctgatgaaccaatggcatcaatttcccaatcaattaatacaaaacaagttagaaaatcaaagtccttctattttcttatcctcatctagttcttaaggtcaataacgaaattgaactcttcaaagcatttatctacaggttacaaattcattttcagataaaccaaaataattaatccaaatcaaaatacgtgcgttaccaaaagaagcttcgatgatcatgttggaaattcaattaacagcaagaacaatcaataaatgaatcaattttatgattgttaccttaggttttttacggggataagaaattgtgaaaatgttgattttgggcctctccgcctgagttaagagagggcttatctcctccaattccgaagctacaacctcatcaatttccgatgccaacctctcgcgcacgctcagctctacgacgtgttcaccgacagcgttgtccgtcgtcgccattaccttgaaactaaaaccctggtaatgtttacgggagctggaagttcatttagtcagccactaccgcatcgcaggcacctcctctactctcctcgcctctgtatgtggaaactgacggggaaacggtctctaagctgttggattctacacgtggcaacgggttggaaactacgggtcccacatggacacaccgttgacaaatcgacggccatgatactagtttgaaaaaatgtttcattgtttgtttgttttagagtttaatcttgttattcccttaaaataactatttttaagaagttaatgtt

SEQ ID NO: 185073 - DNA, 1204 bp, Cannabis indica
aaaaattatatccattttaaattagattcgaataagtgagtaatattattagttattgattattaattaaaccacaaaaaacgccagcaaatttgtcattcctggttgacattagcatatatataactagattgactttagagagaaaaagctatgttcatttattcccttattaatattttaataaatagataaatataataacaaacgcagaccacacaatatatataacatataatatacaccattatttgcatgcatacaattcaaaatgatcgggtcccgcttttaaaaaacaaatgaatgattgatatgaatacacatcatattttggtgtgtaatccgtaataatgtgatgcatttaatcttataatataataaaaagttttgaatatatatatatatatatatatttttctgaataaaaaggtttgaatagttatagaacctacgtttaacccgtgcagtcctatgtaaagaataatgtaacagcatttctgttttaacgcttgtaaatataataaaagaaatatatataaaagtaacaacgttagaacatgcacaaaaaagagagagagagaaattactgaaatccatgaaaacagtatattctgaactacagaaacagattaaaaagccatgtggaatctaatcgtatgtcagatgcaaataatccctaacgtctcacatcataaatgatttttcttttttttgatgggtgggctctacaataattattttgctacaatgaaacaaataatttgtgttgaataacagaaaaaacttaaatcaataaataattgagttttctgagtgataatttgataaagaaaaagaacgaacctgttcgaccattttgtgtcgaaggatttgttcgcggtcgaggattttaatggcgacgaaatctccattatcgaggttcttggcgaacttgaccttgccaaagctgccctcgccgagagttcttcccagctcgtacttccccacgcgggtgcgtgtagcggccctcgttttgtttccagacattatatcctgaggaccagccaaccaaatatatatttagataaatatatagagatagataaaaagggagtcgatggatcaaagttgtggtattgtgttgattgtgctatattgtgtgatatggatagatatatgaaagaagagaggaaaataagagagagagagagagagagagagtgag

SEQ ID NO: 185074 - DNA, 5752 bp, Cannabis indica
tattttattttattttaaaaaaccgtgttaaatttacgttaagcgagttgtgtcgtatttgattcgtttttattttgtatcaaatcgtgtcaactcgtttccaactcacatctaattttcttaactataacccgtaaaaattatgttttgttcgtattggtgtgtgtcaaacctcattttaccacccccttatgatatataattaaaaagaatacttaaactttgtcataaaaataataaaggcctgttatatttgtttaaaccaaggcccccaattggttagagacggcctgaagtcaatatctcatgatgctgacaattttgagttcaacatactgaatctattgcttcataaatgataagaagaaaaaaaaaccttttgacgtattcttgttcgaagacgacatatgattttttacggtgagaaaatatcatgcatgcgtttttctttagactaattttaatgttagctacgaaagtcaagtgcttacaacttacaaggggcttaatagaaattttattattattttatgtccacttttataaattatttaatttctcctgcaccatttttcaacttcgcatactaattcacctcctacttttacatcaaccatttttcttcattatagtaactagtaagtatgaaaaggaccaaataattaatgtatgggattgcattatattatgatttagatttagtatgcggtttcgcattaatttaaaacagaacaatctgacgaaaaagataagaaaataaaataaaaccaatcggtagagttgagtattttctttattaagcaatcgtgatttttgtagtacatgcaatattgcactacaatgtcaattacagggttgttttttggagctcaaggagtttagataattaattaagtaagcaaactaaatgaatatcaaattgaattttgcaggttatttttcgtaaaagaatatttaagaggttacatatggatcaagctgtcttggacttatttcaagtttaacactatatgtgacaaattaggagttctttcttgttgtcaaagtctttaccttagatttaatttttttcactgtatttcatcaacattcaacatactcgttttgtttgttcttcttttagcacttttttccccccgagagaaattactgctattattgatgaagaagctcatttagaataacagaagaaacaggtgttgcttcatttgtatctctataaacataagatagttttagtccaggaggaaaattgaatgacaaatgttttacaaccaaaatcaaatcatcaaaacacagacaccatacatacaaaactgaagattgacagcttgagaaactttcagagccatctgtttaaaatgttttattggttagtatcaaagacacatgaagatgatgctttatgggaaattgaaatcaagagagaaaacaataaagtaggtagaacatcaagtcaagtgtctttggaatatgaagcaatatttgagtgagcgtatgaggtctcccaattcttgccatcatggcttataacctcaacatggagcagagtaccagggtcaacgcacttgaatgtgactgcaaccccatctgggttcgaacgaggaatataaaaggaagttataccacaaactttgcaaaaggtgtgttttgcagtgtgagtaccaaaggtgtaagttgtgagaaactgattggaatcgcccaaaagttcaaatcttttagcagggacaatgaagtgtgtgttacccctcatgtagcaatctgaacagttacaatcccaagctacaactctctttggtgcttcaactcgccattttacattcctgcagtggcaacctccattgtgtctaactaattctacctccatttaccagtagtaatattaaaggatagtatacatagacctgacatggcaaacagttaaaacaaatcactaattcagctcttcactgcaaattttctgttaaaaatttaatttacattacaaaaaaagatttaattgctgtacgaagttaaaaaatagagaaattaatagctaaaattagaattatatggaccaaatagaagaagaaaaaaagtcaataaggaccaccgatcagattatcgatttcaaatagcaaaattataataacaatgctaaaaaagttatcatcttcactttatacaatgaatctttcaaacgagactgactgacccaccaattattttacaagagttactaagtttaattgtttataaatctataaaactctgttgaaacttgaaagttgtaggcatcggtgagtaaagtttagatgagagctaattttgtgctggaataaggataagaaaattacttacccgggttcacagttacaccttcccttgacttgaagccttttagtttctccgacaaagctctctctctctccttccttctcttttagtcccttcagttcagttcagcaaccatttttttccacaaagaaaagaaactacaaaatcctaccacttgggctggcctcactctttcacaaccagtgggctttttatacatgctataggcccatgtattaagcatacataataacataacacaaacgattttactttttctgtttttggtgaagaaaacgttaagagctaatatcagccaaagccctcaaaaattcagaatggtgcaaagacggcgtcctcaaaaattcttatttgaattgttagtctcttgttattttttatgttatagtcgttttggactttggtaaggttcatgtctttctctctcttcctaatttatgtcgttttcctttcacatgttattgtcattttagttcatgtctacaatctttcacttactatcaatctcagacttgagtaatgtcgttttgcgtccgtgacaatgtaaactcaaaacacacaacaagttcaagaatctaaggattttcttctgtacacaactgcttgccaatgatagtaaatacaagaaaaaacttcaaaataatagcaataacaatacattagaaataaatttagagaatatatgtacagcaaattttcatttaatttaccttatgaaagctcatgtgaccgaattagcaatatagggggtaattgaccaaaccaaagcttatgcagccatcttgacaacattattatcaaaccatatgctaacttattgctttacacaaaacactaaccaaaaaaaacaaagggttgtgtatgcagctgactcctattttcgatgccctgctgatgccatgagaacagcaacagccacaataaacatagacaacatactcactagcaatatatatgttctttttgatgattttctgtactctccaaacagaagaattccccaaaatgtactcactaatggaagtgcctgccatgccaatcaccacccgaaaaaagttcatattagtatgtgatgcattttggttaagttcaaattttccacacacaagtttatcccacaaagaaaatatgtttgaaatcaagatagaaaagatgcatttgaaccaacctgaacagcatctgctgcagcatagcctgcagcttggcctcccatgaattggagaccattgccaaatccgcatagcagaccagccattaaggcccagcctctgccattccagtcattcatataagccttaaatgatgatttgggcaagtccagcacagggtagtaaaggaatgtgatgttgaggatgatggcaatgatgaaacaggatattgagaagtaaaagaaagcagtgtagacaaccaagtgaggaaccccgtcctttaatgtatgccattgatcatttgttgccaagttgaatgctggtgagaagagagaaaagcaaacaccagcaaagaaacatatagacagcccaatgagagtgctcttcccaaacacctgtaccaagagttgtaattatcaattgtcattgagagaatttgagatgttgggatttgaatgtcaggtgatgaacatctaactactaactttgattgctcttcttttctcaagctgcaccagaaactctgcagtcccggctttagccttctcggaagagacaccgccgtcttccatttccccatctaacccaacagtcaatatccaatgttaaagaaaatgtaagaattactacataaaaacaatcaaggtgtaaaaagattagagtccagattttttttttcttacccttactaggcaatgtagaaatttccaactccctgtcaaaagtcaaatttgtggaaaacatcagtctatatagaaattcgcatggccaagtatcgctgtgtagtattttctcaacactagattatcacttttcatttatatgcatgaattttttaattgatttcccgtactgaaaactgtcttctacaatgccatctatagtggtgcagctatttttctgctcattctcattttgcatcaaccaacaagctcgatgctttcattttcgaaactaataacaagaattgcagagtcaacctaatggtttaacccaacacattgaccaatttctattactgaccaagtaattcagaaatgaatataaactaaatataattctcatataaccttaatgaactatacatacccttctttagatgaaaaaccttcaagctttgcttcattgtcagctgcattggatgagtggacagcggatgcaaggcaaactgcaaccaagaagcaaccgacgccggggaaaaggatctcggctctgttaattctatcgtctaaaaagtaattcaaggttgttcctatcaccattattaaagatcacagcagaagcaagaaagtcagcatctctatataaaaagacaacacagataaacatcaacatttagaaatggctagagaatgagagtgaaaggacctataacaactgttatgcttgcagtgatcacttctgtaactgataaaccaacaaaagcccaagcatactgagttgagagatttccaaggctgagcaccactcctcctgccattgcaaacatcacagaaggccaattatcctgccacagtcaccctaacatgaatcaaaaaccaaatacatacatacaatgcagctccattacagcaaactgaaggaaattttagtatgttgtttcccttacaatacacagaaacttaaaagaaagtgactggaagcttgcctgagagagctggactagaaagttgggcatctctagtgtgcttttcccaatttcaccaaatgtcaaggcaataattatggcagccaagagattggttattgaataatcaagataagtgtgctgtggcagcctgccccttctctccaaaagggtcaagatagctggccatgtccccaagaagaggagggctagaagcatgcatgctatggcgcctcctttgctctctaccacatacatttttagcccccttgagaaaaccccctcctcactccgtgaagtgatgaaataaatattatcagataaatcctgcaaaggaggaaacaagagtagattatggctccaatcaatgaaaacaaccatttgaagaaaatctcaaattgaaaagcttcctttttgtgcttttcacatcgaatagaagaaaaagataaatcccacataagattgaaagacagccactcaaatggaagaaattatatatcatcaaggatttttattcaatacaactacataccataatacattaatggcagagtaaaatgatctcaaaattaccaaccaagttaacaaccattaagaatttgtttcttaaaaaaactaaaaagaacaaacttttagatac

SEQ ID NO: 185075 - DNA, 1441 bp, Cannabis indica
tttaaatttaaattgtaatgtcttaaaaaataatttactattttataactacttttaatataaattacatatatatttttaacaaaggaaatttttttttttacgcgaaaggaaatattatttattcagtaatattaagtagttacaatatgtttaagtctaagaggagcattcagctcactaaagacaccatctgatataaaacaggattctcttgcgacacaatgagcagctttatttgtagaccgtttaacaaataataagagtagttgttacttatttttgtacttgtccaattcggatttcctttttttttgttagcttccaaatcagatttctacaatgacaaaattaaacataaagcacttttaaaaagacaaataccaagtattgaaatttatcataaagagacaaataccagtaccactaaaacaaataattatcactaattaatattaaaatattactatgttatatcatatatgatcctagtgggtcaatcatttattggataatacttatagataatattttttgttaggaagtccttgtttgtatctatatattttcctactcaatctaaaaataatatctccatataaattgtggataaatgatacaattatttaaaagtcaatgaatgacactatattatttaaaatttatatatgtaattatatatttatgtgtgtgatgatgtacaattaggttaccaaacaataatcttgttgttttctcataaatttgtttagtattaataaattataaatgtacctaattaagaacatatagtaacaataacacttaacatatacatattgctatatttggtacaaatattcttctaaataattaattagttgtattttttcttaaggaaaaaaaaaacttaaaagctattttgtacattataatagaccttttactatcacattttaaaatcagttcaagataaactaatttgttaattattcagttgctcatagttaagaaaatttcattaacacatatgtattccaaatcacttattaaactttgcacactaaaaaagttgtgagatccacatttataataatgtgttattgaaacactacacacaaaaattacaacacaaacagaattattcaaaatcaaaagatatattggaatctctaaatttttcttggatgagctttttcccattgtcaaccatttggggagtgagaatgttcctccaatctcccaccttaccttttctaaagaaagaactatttggtatactcaaagaatcatgcttaccaaccttgtttatctcaaaacttttcattctttcaatgctacaaaattttgaaatctcttcaatcatcccttgttgctcttcctccaaagaaaacgggaactccaaaaagtcagctaatttcttaacgaaaaatacattgtctttcttaagatcttcgtattt

SEQ ID NO: 185076 - DNA, 4081 bp, Cannabis indica
ttgttattatggatccccttatatttctggtaaattggattgctatactttgcttaatcggttgtatgatgttgcaccctcttctccatggataatcattggtgatttcaatgattatcttggtcttaatgataaatcaaccagcactaggccatcttccactgccatggtttattttcaatcttttattaataagtattctctcacctccatgccttccaaaggaaaccgattcacctataagcatggcaagactttcgaaaggcttggctgggctgtagtaagtaagaattggcttgatctttttcccaaagctactctaactcatctcccttactttggatcggatcataggtgccttaaagtcttattcactgatcctagccaatctcataagcattactctggttttcgctttgaaaatttttggctctcggaaccagatttttcccatgtgattcaatcgaactggcactctcctcctcataataacagcaacaactccctttcctctttccttgctactcagtccaactgtgtcaacaaaatcaaagaatgggggaaaaacaagcgtcatttcaaaaataccattcaaaatctccagtctgccttagagaacacttactcctcccccaccctcacttctgctgatcttcagtgtgccaaggccatccaaaatgaccttgacgttgctctttacaaagaggaaatcttctggaaacaacgagctcgtgcttcctggctcaaggctggggacaagaacaccaaatttttccatcatcgtgcttcttttcgtcgtagacatattaccatttctcaaatcactttggcagatggtactactactcatgatttcaacctcatctgccatcattttagagaattctatgtctccctctttacttcccagggcacggatttgactgccattaattccatcctccctggaatctcccacactctcaattctacccaataccttcttctcaatcaacctttcacccctgaagaagtccactctgctttgtttcaacttccaggagacaaagctcctggacctgatggtcttaatgctcaattctatcagaagaactggactacggttgggaaaaatctcactgaggctgttcttgatgttcttaacaatcaaaccgatttctcttcgatcaatgacactacgttggttctcatacccaaaaggaagaacgcttcctctcttaaggattttaggcctattagcctatgcaccacgatttataaagtcattgctaaggctattgccaataggcttaagttagtcctctgcgacctgatttctcacaatcaaagtgccttcctttgtgatcgaattatctttgataatgtgctcattgccaacgaggtcattaatgctataaaccaccgtaaaggaggcaaagttggctgggctgctttgaaacttgataagggaaaagcttttgatcgtgtagagtgggattttattcaggctattctaacccattttggtttcccttcctcctttgtctctcttatcattcggtgtctttcgtctgtcacttttaaactttcaatcaacaatacccttctccctcctttcacccctactagaggaattaggcaaggggatcctctctccccttacctttttctcttggtggccgaaggtctttctgctgctacccgagttcatgcttcccactccaatttcaaaggtatctccatctgtaggtcagcctcttccatctcccacctcctttttgctaatgatagctttctctttactaccacttcccacaacaactgtaggataataaaggacatccttactctttaccacaaagccactggtcaatcggttaacttttccaaatcctctattcttttctcgcccaatacggctgcttctgataaagatttcttcttcaacactctccaaattgacaataaaccctttgttactaaatatttgggagtccctcagtgttttggccgctccaaaaattcgtccttccattacatcatccaaaaagctaatgctaaacttcaactctggagtaataagttcttctccaaagctggtaaggagactcttataaaagctgttatccaggcaatatcttcatacgccatgtcatgctttcgtattcccgtctccatttgcaaaacccttgacaagctcacagctcattattggtggggttcatctgacaaccagactaagttgcattggaaaaactggtcctctctttgtgtttccaaattttatggagggttaggctttcgtaactttgtcattcataatcaagccctcctcgcaaagcaagcttggagaattctcacaaatcctaattccttggtgtccagacttcttaaagccaagtatttcaagaataatgacttcctttcaacttccaagggtcactctccttcctattcttggagtagtattttatggggtcgggacttactctccaaagggctcatttggaaaattggtaatggtgcttcgactgatactcttcaccactattgggttcctggtttcaaatctcttagtttcaaaactccttttccaccccctatttcaacagtctccttttttataaatgattcaaggtgttgggatcttcaaaagcttcacacttacttcactcatgacattgtcacagccattctcactatccctattgatctttctaaacctgacactctcatttggagttctcacccttcaggaaacctcactgttaacactgcctatcacctagcctcatcttctgcctctttcaatacttctgcaccttcgacctccaatctggatcaatctaaaaagtggtggaaaactctttggaatcttcacatccctcccaaaatcaagcacttcatctggcgtgcttatcaccatatccttcccacttcttctaacctctttagtagaaaaattattccttcccctcactgctctttttgttcatatggcttggacactgttactcatgcgctcctaggttgctccagagttaggaaaatttggaggaaaacaagtctaattgcttttttcactgcttaccaatttcaggacattaaagactttattctttcaggttatgactccttgtcaaaggatcagttgtgtctttgttttactttgttgtggactatttggaacaggcgcaatgagtctcttttccactcaaaaacctttccaccagatgatgtagaaggttatgttgttaactttttgcaggaatacgcccactgtcagcaacaacttgccacttcaagccctgcaccctctgcttcaggatctcaacctccttctcccccatgcggcagttactcgttatattcggatgctgctatttgaaaattaaattccaaaatgggttttggaggtgttgttcaagactggaatggtcataccatagctgctatttgttcctcaaaaacaggtgttctctctccaattttggccgaggctcaagctcttcttcaggcaattcagtggtgcatcactgttgatcttcctcggcactccattcactcagactgtttggacttggtcaataaaattaacaatcgttccaaggacagatcgccattatccgacttgatttggaaaatcattgaatctttatcttcttttcttagtgtaaagatttctcacatttctcgtcacaacaatgtacttgcacacactttagcacaaaaagcactaggaacggatatagatattgtttggaattgtaatagtttaaattcctttttcatctgattttgtaaccaaactttcagtattcttcttttaatgttacaaatcagtttctcaaaaaaagccaattctttagaataaataaaatgctgttaaaaataaatttgattttctagaccttattttgtaactaatagtacaacttttatcactaaaataatttttattaggtctttgcatttataaaataaattatatagtttcaagaggtattattgtaatttatttttgatgagatgtatttttattgaagtgatatgttttgagataaatagagaatgcattagcttgtttaaattttattagaat

SEQ ID NO: 185077 - DNA, 3345 bp, Cannabis indica
ctacttcaactagtcatgcatctcaggttttagaactgatacacacagacttatgggggcctgccccgattgcctcacacaccaactataaatactatattcatttccttgatgattatagtaggtatacttggttgtacccactcaagcacaaatccgaggcactgtctgcctttgttcactttaaaaaacttgctgaaaatcaattcgacaagaaaattaagcaactgagaactaactggggtggtgaattacaggctttctcagatttagtcagtgaacatgggatttattttcatcatagttgtcctcacacatctgaacaaaatggtagggccgaacgcaaacatagacacatcgttgaaaccggtttaacactacttgcacaagcccaaatgcctctcaaatattggtcagatgcattctaaacggctgtatatctgatcaatcaacttcctacccctatcctgaaatggaaatcaccttttgaaatcttgtatcataaagcacctgactacaagtttctaaaggtctttggggtgtcatgctttccttgcattcgaccctatcaaagccataagttcgagtttcactctattaagtgtgtaaatctcggctatagtgaagtccacaaaggctacaagtgcctcagtccacacggtcgaatatacatcaccagacatgtcatttttaacgaatctgagtttcctttctctgctggttttcttaatactaggcaacctgaacagtatgtcaccatgtctactccgcagtcttggttcactctgcctattgtccctttgtcctcaacaaatgcttctacatcctcacaaagtgttcctgcagcatcacctgaccctgcctcaccaatacactctgtaagtgactctccttctgctattggctctcctatttccttgcattcaccaacatctgcaggctcacctactggtgctcttccagaacctgtcactgcctcccttgaaaatcctgccaatatcactgttgctgctcctttacaggccactcaccccatgatcacaaggggtaaggctggtatttttaaacctcgaacttttgttggtcactcccagtttccttccagtcgaactcttcctgcttccgtggccatggcacttcagcatgaggggtggaatcgtgccatgtcagatgaaattggtgctcttgttcgaaaccgtacctggacacttgtgcctcgaactgatactctcaacgttgttgggtgcaaatgggtgcttaaggagaaatacaatgctgatggcagcctcgaaaggctaaaagctcgcttagtggctaagggtttccaccaaagacctggtcttgactttggtgaaacctttagccccgtggttaaggctgcaaccgtgcgtgttgttctcactttggctgctgcttatgattgggaagtgagacaagttgatataaacaatacgtttctcaatggtgtgcttgatgaagatgtgttcatgttgcagcctcctggcttcgaagatactcaaaggccacaccatgtgtgtaaattgcacaagtctatttacgatttaaagcaagcgccacgggttcggtacgaacagctgaagacaactcttatacagtggggtttcgagaattcaagggcagattcttcattcttcatacttaaaaacattaagtatgtcataattgccttggtgtatgtcgatgatatagttgttacagggaacgacttgagtcaggtcaacaattttatctcacgactcaacaaatctttctcactaaaggacttaggtcctctgcagtatttcctgggaatagaagtatatagagacaatacgggcatctacttgactcaaagcaagtatatatccgaacttcttcaacgagttaacatggagaataccaagcctagtgtcactccaattacaacaggaaagactctgtccataaccgatggcacacccatgagtgaaccaaaagtctatcgcagtgtgataggtgcattacaatatctcagtcacaccaggccagacatatctttcgctgtaaataaacttagccaatttctcaaacagcctactgatgtgcactgggcagcagcaaagagaatactcaggtatcttaaagggacaatgcaccacggcctacatataccaccaagcaccaatctaaacttaattggcttctcatatgctgactgggcttgttgtccagatgataggaagtctgttgccggttattgtgtgtttctaggagacgcattgatttcatggtcatcaaagaagcaaactgttgttgctagaagcagcaccgagtctgaatacagagcactcgctcaactggctgctgagatttcatggctgcaagagctgctaggcgaacttaaattcaaatgtccctctacaccagtcatctagtgcgataatctgagtgccagtgcactggcttccaaccccgtgtaccatgcacgaacaaaacacatcaaacttgatgtgcactttgtaagaaacaaggttctcgacaagcaacttgagatcagatacgtgccatctcatgaccaaattgctgacagtttaaccgagggtctgtctccaaccaggtttcaattccttatcagcaaactcaatgtgatttcatcaccctatcgtttgaggggtggtgtcaaagaaattgactcaagcaatattcaatcatgagctgtcagtggagaatggccgtacgaatgagggaattccaagattgattctgcaatcattttgtaatcattgttttgtaacaaacttttctgttgcacctttattctctacacgtgtaaagcctttattggcctctgcttttactctgtatcttggctactgctatttaatgaaatgaatatcaactcactcatttgagttgagttttctccattaaatccattctatatatcttcactgtaggcaccatatatgggtacctgtcctttagtatttctctattaataattgccctagttgccaattaatttttaaatgtaccacacctattaaaatatgtacataattaaagtattattgatggtcatttaatattttattaagaataatatgtgcaaaaattattattttttaattttttatttccaaaattatagtaatatactgaataaagaatatagattttataatggtcagtaaatcttaatatttagtaacattataataaatatatataatttaatattgttctaaatgtaacataatgttgtatcttattttgtgttaaatttaatactaatttttatcgtgtgtactaaatttaactaactttttttaaaaaaaaaaaaaattgaaatgtacacaaaagtat

SEQ ID NO: 185078 - DNA, 3929 bp, Cannabis indica
tgatgaaatattacattctccctaggtcgtggactgggcgggacatcatcgctgtcctttagtcatgttagaaatgcaaatatatatataaattataagttttgataaaattaataaaagagagttaatttaaaaattgaataattattaggacaaaaaattaaaccaattaatattataaatagttagtctagtttgatgaagactaatttttttttatttaatttaattgtgaagagaaaaacaatataatatattttgtctttctcgacaaaagtagacaagtgcagataataaagaaaaaagatgaacaaattaccttaaattagaaaagtcttttctgttcatcttgatctctaaagccctaattaataaattggagtagacaaaaaatatcagaggaaagaattaaaaagaaaacgttttacccatctttttctaattcattcctttccctctccctttctctctctcctcgccactaagaaccattggtgtttgcaggaagaagaagaaagggaagaaaggaaagagcaattttaggttttagggatttttttttgggacaaaataagtattattattattattgaaggcttcgaaatcccaattacatatacacagccacaggctttcttttcttccatttatacacacatcaggctttggttttttaaaaaattattaaattgtggaggaggatacattattaattttagaaaaaggcataatcataatttttacactgtttacaatgtcttactcaagtaattagttgtacatggatgttgctttattatatcattatgggatttttacactacatactgaaattttatatatagtttcttttttattgtgggacgaattttttttcaaaaatactgtgtaagtttcatactgtgtattgtgttaagttttttctgttattttatagttattttttagttgttctactgttgtttttaattgttctattttgttgttttacagtttttttaggttgttttataaaaaaacggtacttttataaaaatctcatacattattgtgaaatattataatcaaacatactatatacatactttgtcagaaattagagtactaatttataaaatattttaattgtgacaaactcattattagcttaactgttttaccgtttaataggttaattagttttgtcagttaggttcgttatgttagtttctttccctcctgctgttgttctgaactgctatatatacctctgtacacttcattcagttcatcaattcaattcaacttttctcttttcttcctttctttcattctgttttgcttattgtaatatggtatcagagcggagaatcaagattccccactgatttctacgctttcgcccttctcctgccaggccgtgtcttcttctccggcgatggtggtgccctgttcagctactctgttattcacgtctcactgatttctttgtgaaatcgtttgtttttctctcctggattttccctctagcactattcctttaaatcttccatggcgaacgacaatcaagaagtcgaaactggagtcacaactcctaccatctctactaatcaagtcgtcagtcaaagaaatccactggaggatccctcagatccctactatcttcatcatggtgataaccctggtaacattctcgtgtctcaacctttaacagggcaagataattacatatcatggagccgtgctatgcaacttgccatctctgttaagaacaaattggggttcttagacggttctatatctaaacctcaacctactgattttaatctctataattcctggattagaaataataacatagttatatcttggattcttaactctgtttctaaagaaatttcttccagtttgctttatgatgaatctgcagctgcaatatggacagatcttaaggtcagatttcatcaaagaaatgggccacatatattcaatcttagaaaaagcttgatgaaccttcgacaggaaagccaaaccatcagcttatattacactcgactgaaaactatatgggaagagttgtctaactatagaccgaattgtacctgcaatggatgtacttgtggtggtgtaaagaagctccaagaacatcaccacatggagtatatcatgtcttttctgatggggctttcagatcatttttcacagatccgtagcagtattctcttgatggatccattaccagaagccaaccgtgtgttccacttagttactcaggaagaaaaccagaaaggtaatcttgcttctgaaaaagattcgaatactaatatggcttttgcttttcagtcagataaaaataccaactcaaagcccaacaatcaaggatccaagaatcatcctccaagaaggaatagacccttttgcacacattctgatgtgcttggtcataccgttgaaaaatgttacaagatccatggatatccccctggattcaagaacaaatctaaagaagcttctgcagatcaggtccaaaccaacacagattcaaaaacctccagtgatgaaggacacacccttttgccacaaattaatgcgcttcaatatcaacaactcctaaatttacttgccaatcatcaagctggtatgcccactactgatcctagttcttcttcgggaactatagggatcttactatctcatcatcacattacaccagttaattaatcattgataatcgattctggtgcaactcgccatatatgcaacaatgttaaattgtttcaatatctatgtcctactgtaaaaaccaggttaattctacctaataatgactctattaatgttaatctaagtggttctattgctatcaatgataacctaactcttactgaagttctctatgtaccaagttttaaatataatattatttcagttagttgcttaactagtaatggttccactaccgttaaattccatactgatcatttttccattcaggacaagcacaacctgaaggagattggcaaaggtagtgtcatccatggtctctacatggtggatgcatcaacccgtactgctcatgccttatctgtttctgctgagctttggcattcgagattgggacatttatccaaacaaagacttgctcttcttagtgataaattgaattgtactgttaattctttacacaaaaccagtccttgttatgtttgtcctcttgcaaaacaaagaaaaataccttttcctaataacagttctattgccaaaaataaatttgatgttgttcattgtgatacttggggcgcttaccatattccttcacattctaactacaagtattttcttactttagttgatgataatacaagattcacttggatctatcttttaaaacacaagtctgatgttactgacataattccacagttcctttcctatgtgcaaacccaatttcaatgcactattaaatgatttcgttctgataatgcacctgagcttgtgttcaaaaatcttttttctaaacttggaattatgcatgacttcacttgtgtggaaataccagaacaaaatgctattgctgaaagaaaacatcagcacctattaaatgtggctcgtgctcttttctttcaagcaaacatgcctataaaattctggtctgaatgtattatgacagctgcatttctcataaatagaacccccactcctctacttcaaaataaaacacctttcaaactgttatttgatgccttacctgattattcaaatttgaaaaactttggttgcctagcctttgcttctactctaacggctaatcgcaccaaatttgaatcaagagccacaccttgtgttttcataggctatccccaagggatcaaaggttacaaactttatgatttgaatactaaacaaattttcatctctcggaatgtttattttcatgaaaatatttttcc

SEQ ID NO: 185079 - DNA, 4655 bp, Cannabis indica
atccactctatcaagaaagtcattcatggtgtaaactgctttgagatgaaggtcgcaccatagatgaatcatctctttgagcttggatacaagttccattacccttgcatcctcactaagcctttttgtcttagcaactgcctctaagaacagttgtatatagtccttaaggggctcatcttcctgttgcttgacatccaccaaatcgttgggctcaatttggcgttgtcaggaagaagagaattggataccaaaagcatccaccggatctgcacctgacatcgtctcttactccctgcagataggtctgcactttgaagtaatggatgtgagatagtggatcttcctccccgtgcatcaatgctaggagagttctaaactttgaagggattggtagagctttgatttgatcaaagggtgatgatcattgctctcttttgagttcaaactctgacaacttttgagttatgattcctgtcactaggaccgctaggttgtcaaactctgccttgttgacaccatggattgtggtctgcgtcctagttagacggtttttgttacccgatcagggtctcctgtagaatctctcacttccaccaaccgtcttctggttaaagtgtcacgcaggtctctttgtcttccaagtcaatcatggactctggtcgacttgggtccctttcatctcggaagttattttttagtatgaagcagctcgttggtccttactcgtcggatctcatagcctttggtttcaaagtaatgtcttcgactatcccttcatttcgagtagcaggtctctttccctttacaagttttcgaggtctggtgtcatgagagtgtagaggaggacatggtggaagagtcctaatggctctctcaatattttgaggtcgctccacatctggttgagggcccattggttggcgcccacgagtttgagtccttttgggctcttgctcaaagtttgttgccctccagggagccttagcacctggtgtttgcttaatgcttgcacggtttctaggcatggtagttgtgttttgtgaattaagggtttccccttgagctctagtttccacgtgaccagttggtcgatagggaatctctctcacaaacttgaaagacctctgcagggggtagtttcgcgaccagagtgataggcttatctaatctgttaagacaaattagctctttgctgctcctactcaactcgttggctctcaatgtttcgccagtagttttccatgaaccagtgttgaaactactcttgttgattgtcgagagagtctcgtagttgttgttgtagatcagccacagtttagctaagttgttccacttgaggattggcctcctcagggttttccaactccacgtgtggctctccaggtgggatttgcttgtcgattccagtatcaggaacatttggtggccttgggagcaagctatggagctagtttcagagcctcctcctagaacctgctgtgtaggagtagtctcagctccagcttcagcaattggcgtgcccccagtttgctagccagtcgttagggctcctctgtcgacacttgaagagcatgttgcaaccatcttgtaagtgactttcttgagctgtggctctcaatgaaagcaccaaaattttgactcaaaaatttggatagagactgtaaagccacacccgctccatagattggcgagaatgagatatatgttaagtataatagagagacacaacaatttatagtagttcactccctgtatcacgagagtaatggagctatatctacttcgagtttttattctcgcgagtcggattattaaaaaatggctaagtctggatgctctaatatctagagagacaacctagagagagatgctctaacctcgtggctacttttctgaatatgaaaaatgagctagaggagctctccttttagaggtgaaggaggtcctattaaatgggaataaaataatccaaaagaatatggaatagtacatgtgggctctttttgaccatagatgatgatctaacagtgaaaattattttctgaggctgatcatcgattttttggagctcgagttacaacgacgtgacccactctaggtgagctgtagcttaaatttgtaactctcttagggtgaaatttagagtcgatagcttcagaattgatatttaagtgtgagacactacttgatagatcattgaattaacttcaaaatgcaagttgaatcacgccaatcaaatcaatattgagtgagttatggtcattatactgaaggttgatctgggcccaacgacgaggttgacatgtgatgttaacctggacgttgggtgagtgggaaagcgtgtcaggaatgtatttttttattcctgagtgatattttggcatcacttagtccatttctatgttctggtgaagcttgtgaccagttctcagagatgttgctattctgtagagacgggagactcaaaacaacttggttttcgggtaaatcacgttatcagaaaagtgaaaatttgatgttttgaatttgactgttatgacttcatggctctgaattattctaagaaaatagatgaataatcaagacagaaatagaatctgataagcagacctagcgcaccagcccatttgtcaacttgggcactatgtgcttattttgaagcttccatgatgtcatttttgtacttgcaagttctagaacttgaggactaggtctcctaccctatttttgaccattttgaagagaatgcttggagtagaattagcatttgagtcatcgaaaccagtgcaccaggttgatttttgcgctaggcctagcaccaggtcaacctgggcattgggctcaatttcaaggccctcgagattgtggttttctgcccaagttttcttgtatcttcttttttttgatgattgaaaaaaagaccataacacttttttcggaaagctgattcgaaaggactcaggttgacaatatgtcaaccttggcctgggcccagtttcaggtcacctagaagatccatttggtcaccgcaaatagttaaatcttaattttttctaaacacggaggatatgcccggaagaattctcagaaaaaatcctcaaaaatggcccaggttgacaaaatgtcaacttgagcgatggattagccccaagtgtcaacctaggcgttgggcccctattctggcacccaggatgcgatgtttcttcccctaaagtacctatctctccatttttatgaagacaaagaagatgcatgagttggattttggatttgatgcttggaagtggcccagattaacaaattgtcaacctgggtgctgggtgctgggcattaggtgctcaaaaatgaatgttctctaaatctgattctagtgactcaaatatgtttgtggtatgtctatttcatgtcccaatacaaagtttgacccatttgaactaatacggtcccacaaaccgaaaccctagttgaggatgtcaacttgggcgctaggtgaaaccctaggtgcctaggttaacttctgaggtgctggttcgtgtatttttagctcttggggcctagacttggttgatcgatgtcttcatggtaaagaatactaaaataaagtgagttagaaatgacttaacggaatctaaacttccattccagagttcttggagtcaacctgggtgcaaggctaaggacccctcccaggtcgagtgctatgactcaggactactgaactctgagatgttatcttctttttatgtgtcaaacattgatgcccacatcaccacagaaattttctgggttaacaagaagaagcccaagacgtccggacttagtgcaattctctgtaagtcctaacatcgacatggcttaggcaccaagtcctaatgttgcaatgtgttaggcaccttgagaataagcccaagacctccgtgcttggcacaattctctctaaaacctaacaacatcatggcttaagtactttgagaataagcccaaaaccttcggacgtggagcaattctctctaagtcctaacactatcatggcttaggcacctagagaataagactttctaggcttggcacaattttctctaagtcctaatgttggcatgtcttaggtaccttgagaataattcgaagacctccaggcttcgcgcgattctctccaagtcctaacgacaatatggcttaatcaccttgagaataagcccaagacctctaagcttggtgtaattatctttaagtcctaatgtcgccatagcttagggaccgaaacctaatgctgccatgactttggcaccaagtcctaatgccaccatggcctaggcaataagtcctaatgttgccatggcttaggcactaagtcctattgtcgccatgtcttaggcaccaagcattaatgcgaccattgcttatgcaccaagtcttattgcctccatggcttatgaaccaagtcctaatgtcaccatggcttaggcaacaagtcctaatgtcgccacggcttacgaaccaagtcttagtgtcgaaatggcttagggaacaagtcttaatgtctccatgacttaggcaccaagtcctaatgttgtcatggcttaggcaacaagttatattttttgtcatggcttaggcaccttgagaataagcatgtgacctccaggcctggc

SEQ ID NO: 185080 - DNA, 1212 bp, Cannabis indica
agagagagagagagaagaagatatgtttttgatgagtgtgttcttcctcctcgtgtgcttgtcagtttcatcattctcataagtgcaactttgaccccattactagctagtagtccttctgctgtgccatctactaataataatatatattgtacgtactatatatatatacatcccatgcattcttcacatctgtttataaatcatattgtttcattatacttataattagatcatgtaataagtatatatatataaagtgtgttattaatcatgagataatatcaattcagctatctatcccaaccaaagcacgcggtataaaatgccactaataattatgctatgtcatatatatataatatattttatttagttataattttctgtataaaactatatacatattgaaataattacaatttacaggagcaagctgaaacagacagagatggagtgtgagtacttgaaaaggtggtttggatcactgactgaacaaaacagaagactacaaagagaagtggaggagcttaggtcgatgaaagtggctcctccaaaagtcatatcaccccacagctgcgagcctcttccggcatccacactcaccatgtgtccacgttgcgaacgtgtcaccaccaccacttccaccgccaatattgccggtgactaccccacctccaccgttgcattgtcctctaaactcaccaacagccacctctgatcgtccccccatatctgcatccacatgcattgtctaatattgacccccactttgtggaaaaaaagaaagaaaaaagaaaagtttgatttaaaaataattaattaaaatttaattatgtatattagagaatgttatatataattaaatagctagctattaaaaaggaaagaggaagaagaaagtttattatgcaacaacgtgttgtgaggggacactactacactatacgttgccttaattaagaaatctccgcatagatattataatgatgttttggttgttctttggcaatttgtttgccttggaaaccatggccaaaaaagaaaagaaaaaggaaaggtggataattttgacgatatgttacaacttacaacaacgcactacacccaatatatattactatttcaacaagttgtgtataaatttcaatcattaattattagggtgaaaaagttaagtggaaatttagaatttaagggtaatactactgt

SEQ ID NO: 185081 - DNA, 1838 bp, Cannabis indica
aaatatatctcttccctactcaactgtccagtcataacttttaagtactgaacttttatagctaccaaagttattactaattggtacataagctatccaatagccactagttttgcacaaaatttaaaatttaaccatagtacattctacacacatatccatttgtttccaaattaatacggagacgattacctttccatctgtagattatttggtattatttactataaaactattgagataatttaagccaactgatattttggaaattaatctaatctaatgtcataataactcatttatttttctacatctataatgtcataatttttttgatccaaaatttaatcccactacccaaatttaaccgatctgaaggaaaagtacaacaaagttaatatactataaataagtgtcgtactaattggtttcactttcacaacaattccaacacacgtgattgataacaaataaaagaaaagctataattgttataacaaattgggatttttagtttggaaatgattggttgaaattataactaatacttctatcttgctttttaattacccttttatgtatactttgtttgatggagtcagatcaagatgtgaagggccacatgatcaccatcaaacagagcacagttgtggacgacccttaggactaaaattcaacagaatgagcggtgatctgtacattgctgatgcatatatgggattgctcgtagttgggcctcaaggtgggctggccactcgtgtggccactcaagcacaagaaattccatttgcatttcttaacggcttagacatcgatgaccacactggacttgtctattttactgatagcagttctcactaccagaggaggtatatataataatactatacataacttaagtctcttgataaattcttcattcgttatattaaaaattagtaaattttcatacatgtatgaaattttgagtgttaattagtcttgtaaactaatgtggtttgtaacacttgttttcaggaactacctttcacttatattaagtggagagaaaacagggagactaatgaaatatgaccctcaaataaaagaagtaaatgttctagctgaaaatctctcatttccgaacggggtggtagtaagcgaaaatggcgattttctcttgattgcagagaccacagcttgcaggatcataaggtattggcttcaaacatctaaggctggaacttatgaagtatttgctgatttacctggatttccagacaacattaaaaaaagtcctaggggaggattttgggtaggaatccatgcaaagcgaaaatggatattcaaatggattctttcacatcctttagttgcaaaattctttcttgaacttccttttgatataacggaggcttatacacgtgtatctaactggagaggaagaggattaataatgaggttgagtgaggaaggtgttgtattggatatggttgaagatgaaagtggtgtgaattggaaggctgtttctgaggttgaggagaaagatgggaatctttggattgggtccatacataaagcttatgctgggaagttcaaattaaatgacacaaattatgtgaccttgtaatatatacatttaccataatttataataatagttaggcttgggtgccaacacaacaaaacatctatgaaattatttaatttcaataatcatgatgttaagaatattggtttattctctttactttttgtaattataattgatgtaatccttaatatatgctcctcatgatcaacagagatttaatacaaaatcatgttgaatctatatgccaaaagaaaaaaaaaaaaaa

SEQ ID NO: 185082 - DNA, 2609 bp, Cannabis indica
tgaatgtttgaattcgatttcctggtttatataagttagtaatttaatgcagtgtgttgctaattactagcaaatgtatgctagaaatgtgtgagataacattagtaaaggtgaagagagagtgttagattataatattgctgttagataatccctaaaaggttgaagttttgggtttgatagggaccctggggctggcgcggtcttagtgacttgtttgtttctctagaaatttatagctctatcaaatgaatgagaagcttaagaacaatccatttttgtatcttccacttgatagcttcaagcagttttagttgatacgtagccttaattagtgggacatttcgtatccttttgtcaaattttgagctccgttgagatcacctaacagtaaacaggttgcattcgatttagcacaatgatactagatttgtatagtctaaccaagctttgttatttatgtctttgaacatgttctgatttgaagtgctcttttgtttgtttattaattgatacagcttaactgctgcaacctgcaatttctttcttttcttttctttttctttttcccttttgtattccctcttggaatttggatgctaaataacgcgcttgctttaaattagatgagtctaaccatgtttatttccagcaaaaagcactggaagcagcaatgaatgacataaataattcttttggaaaaggaagtgttacaagattaggcagtgctggtggtgctttggtgtacgtgtttttctcctgatgtcagcgtttgttttcctttatttcttcatatgcttctatatctgaaagctgcatccatggtccttacaccattcaaatatataatttagatgaaaataagattacataacattctatctactgcagtgaaacatttcccagtggctgtttgacattggaccttgccttaggtggtggtctcccaagaggaagaattgtggaggtagtttcgcatgttttaatacattaattcatataatatgttttctgttatcaaattatagattgactagagcagtatatcttcatgaatgatgttctctgaaaaacgtgtttagcatttaatatttagaaaaaaaaagtagtttttgccagatcttgaatctttatcttatgcatggttttcagatttttggaccagaaagtagtggaaagactactttggcgctccatgctattgctgaggtgcaggtatggaaaatccatatgaatcttaaatgaaatgatggattggtaatgagatccaaatttagcttttattggtatctatgcagaggctaggaggaaatgccatgctggttgatgcagagcatgcttttgatccagcatattcgaaagcattgggggttgatgtcgaaaacttaattgtttgtcagcctgatcatggtgaaatggcacttgagagtaagatattttttttttttcccgaaggaaaatataatattgtaagaaatgtgtaattaaagaagaaaaagaaggagaaaataagacctaggggaaggactagggttcgtctacctagcaactagaaaaataaagcatacttaaaatgacattgaaatgcattctcccactgaaaatttaaatcctcgtccatgtcttaattcttggaagatacctgcattttcccttccgaaaaaagaaaagaaaatgatactgtaactttcaccagccatgaagaactctatgaagtatcaacaaaaaaccttatgtgtatgtataagatctgtaaaaatcagcactacaagcaatagaagatgactatttataggtgtggaacttgtccatgtcatcaagaaacgtattgaccaaagaaacgaactgtagcagattttatattcctagagttaagacagtaaaacaatacagttagaaaaaatgtgctggctaataaaaagataaaacttgcacgtctctggtgctatcagtttacctgtgtaaattatttattgtcttataatacttgatatatcttgattaaatttgagagttttatgcttgcctaatttttttttctgtcttctccaattcagttgcagatagaatgtgcagatctggtgcaatagatctaatttgtgttgattctgtctcagctctcactccacgagctgagattgaagtgagcttctttttcttgttcatatttttttttcagaggtggaggctgccaacatttgactcattccttgtggccttatctgttgtagggtgagattggtatgcagcaaatggggttgcaagcacgtttaatgagccaagctttgcgtaaaatgtcaggaaatgcctctaaagctggctgtacccttatatttttaaatcaaataagatataaggttaggattgtttcagtattagaatgtttttttaaaaaaatttaatatatatataaaataattaatgatcgtattgttataatatctttggcaatataaattactgttagggactgggtccaacagagttgagaattcttttgtttaactgatgttagttacttcctagctttacgtactactttaacttagaaccttatgaatttgctagattggtgtatattatggaaatccagaagtaacaagtggagg

SEQ ID NO: 185083 - DNA, 3045 bp, Cannabis indica
atctctctctctctcttagtttgtttctgaattcatctttcttttcttcatgttgttgaatttatcatacatctactttcttttaaattttgggtgaaatggagttactttttttttcttttttctttttccgggcagtgagaaaattgctcttttttctttgattttaattaggtttcttccatgtagtttgttagtatgatcaactcagcgaaacatgcaagtaatgatagttgtgtttttattttgttttggaattagggcatgattttgggagacagattataacttatcattcaacaaatttccttcctcgatacttggtgtgataatttcacttttgcttgaaaaaagtggagaatgtgatacatggtatcgatgataataatattcgatatagttggcttggggattgagtaatatgttttgagctttctggacctttgtaataattatgtttattgattatttgttagtacaactccctcgtagtcgtagctaaagtgtttggctactgagaaattgaagttgaaaaatgaagtaaatgacgttaatccaatcagtgatacatttgtgtttatttgtcaaatcaaattttgggctgattggttttgcattgccttatgtgaaccaaaacttgaaaatattgcccacaatttcttctaaaagggttttctgttatctttctttagtcttaattaatattgcttggttatcaataagaaatgctattcaagtgtttatggttttgggtttgttttctgtgtttgttgttcttgttggtatttgtaattgggcgtattcctttcatgggttattgggtagtgtgtaattatctaagaaccaactgtaaattgtttatttgttgcatatggacattggtttgtgttgtttcgtcaatttctatttcagttggttgggaatgttcagcttcaatattgtgtttttgttttaaaaagcaggaaacctgtaaaaaaaataccaattaagcaggggaatctaatttatatctctctcattgattattttgacttgttattcaatgaaagtaactgtattttgactatgatatctgtttagttgttgagaaagtgtgaaaacaagtaatctgaagtgtcaatgttaaatttcctgtatgcatcagataaagtgagtgtctagtgtggttcacagaaacaactgattactgagggagtctggtctatccacacccaaagtaccatcttaccctaaaaatctcgatcagaaaatactctcaaggatggcagagtttctttttgaagatgttttcaagattgatcgactgaaccccgatgggaagaagtttgacaaagtcactagaatagaggcaaagagtgagaagtttgatatgttcatgcacctagatgtgaacacagaagtgtacccactgaaggaaggtgagaaattttcaatggcgttgagccccacactgaatgaggatggaacacctgacagtgcctacttcactccaagcaatcgcaagacacttgccgataactatgaatatgtcatgcaagggaagctgttcaagatttctgaaggtaaaggacatcatggtaaggcagagatagatgcttcatttggcgggctgttgatgatgatgaagggtgatccatcttatttcaagaagtatgaacttgatcagaggctatttctcctcatgaggaaggtgtaaaattcagtagtttaagataatggtctcttggaatgaatagttgaacttggttcgcttttgtttcttctcctaagaaaggtgtaaaacttgtttatgccaaagtttctgtttgtgctgtatgaaaagtttaagctggtgacatattgagtaatggcttcattctcttactcacatttaatgttaattaaaagcaatatcctcttttaagtgcctttttagtgtcataagattattgtacatctcactagtctattgactaactcaattactcactagattaacctcaactaggttgtaaagaaaactggaggagtttacattgagcatgggatttaggaaagaagcaaaagtagatgggaaaactaattttgttggacttttatgggaatgtttctattctattgaggaagactaattagttaaatgtatgtatgtgaaaataatgtcatatacatgaaacaaacatcttggatttttttaataaaaatgtgaaactgagcaattatatgataattgggttttatgggatggagatttctaaaatttgatttatctttgaattggattgagtaaaatattaggccatatattatgaaaaaattgacatggagcaatataacataagtggaatttgacaaggagcagtatgacattagtggaatcgaccttgcagtggaaaatttactacatctaccccactaattggtaaaagaaagtaagctagagtaattatcaagctatatagacatgtgtgaactgaacaacaaaagctagtactggaattatatatatacctagtgtgcaactatacccaccatagatattattgcttgaaatacacttcatttttatttatttaaatttctatcaagcataagaatcaaagaaaatataaaaggaccaagtgtcaagctacaacatgtacatgacttcctcttgcttcaagcatatcttgaacagtcattaaattatactccacctacctatatatatgtataaataaataaataaaaattcccttaaccagaactacttgacatttcaaccacccttcaacatatgaaaaagaaagaataactgagaaaagtaatcagatggttagttctataaagtactttagtagtggattttctgaaaaggtaagaagttcaagagataaagacaacaacacttaagaggccttgaactatataacttgttaattgccttatgatatatctttcttttgctttacaaagtatgctaaatagtgaagcaaaagcaacacacaaaatgggaaacagatgttaagttaagaactgatattaattaaattgctattgagagttatataagaaaccccccaaaaa

SEQ ID NO: 185084 - DNA, 1387 bp, Cannabis indica
atggacatcggcctcatgctctccgtaagtacatacacatatattatattatctcatcactaacaattcaatcacaaaacgtaactaacaagtgtcatttttgtagaagttaatcttcctagtctttgtgatcaagttggacttgacagattcaatgattttcagcattttcacactcaattatatagtttctttttcttttggttactctgcttaggtgggacttggtttactcagagctcttctatacgtggctaggcccgccacttgtaagcttggaaaagtagaaaacgcgacgatataccgtgacaccgagcagtaccccggttccacagttgtccccgggataatagtgctgcaactaggttcacctatttactttgcaaattgcaattacataagggaaaggtaattaactaatattactaattagtgaaaaattagtataattagttgctcaagtttgtttgaccttgtggttgtgtcatgtgtgtgtgtaggattttgaggtggatccgagacgagcaggcgaattctaactcaggggatgctattgagcatgttttgttagatttgacaggtaacaaaagtgtatacgcaagtattatatgtatagtggaatttccactaccaaaatgtgctagaacgaaaacgacaaatatttggtcttttattattaggtcccgcacagacacacacacactcatctagctagcacactgtttcgtgatttgaaatttggtcatatttgataggagttacaactattgatgcgaccggcatagagacattgattgagattcacagatccttgtttgcacaacatattcaggtaagcccttcaataatccaatccatttgactcttttttcttatataaaataaaaaaattaattatccaaaattaaaactgatcttttcttttgggaattgattattgtagatgactatagtaaacccgagacttagagtaatggagaagttcatacagtcacatttcgtagataagattggtaaggagaatttttacctgtcagtggaggccgcagtagacgcttgtaagttttctcttcatatgtcaaagcaaaacggcaacgtttctacagaacaacccgttgtgattgacggagctgtctaaatatatatatgttcaagctcacactcgtgatcagatcatagtttcatcctcttgtatatattttatagtattaatgcttgaaatgggtcaatatttagatccttgcttcaattaatttcatgcttgagattggaacttttttattttttctttaacatttaatgttaattagataaattaaattgaagattttgtagaatgaaaggcaaaaaaatgtgcattcttatttcttatatattgatgttacag

SEQ ID NO: 185085 - DNA, 1687 bp, Cannabis indica
aagaataacaattgaaacactggtgttcacctttacaatcattatatttaaagtaagacaacatctcaattatctcttatatatatagatgaaagaaaatgatatgtggcatcaaagttggctatgtgcatttggtatacatagaagatttgaagattatggcttaactctgtatgtttttgtttcttatctgtgataagattatggccttggcagcaatacccattgattggtttgtgatggtttatgtcaataacaactataacttttatcaggttcagtaatggaggaagggttagtagattcagaaccttttcctccacaaggccctcaacactcagcttcattcgggcactggatttccacattaaggaaaagggcatgtgaagcatacagaagaaagccaatctcatactggtttcttctagttctgagtagtagtgcaatgcttgtggcattccctgcttcaagcctcctatctcgtctttatttccaaaatggtggaaccagcaaatggatcatttcgtgggctgcggttgcagggtggcctataacagctctcatcctagttccaacatacttagtctgtaaaacacttcccactcctttaaccttgaagctcacttttgcatacattgtgcttggtttcttaagtgctgcagacaatcttatgtatgcatatgcatatgcttacctccctgcatccactgctgcccttttggcatcatcttccttaatcttctcagcattgtttggatatcttcttgtgaagaataagatcaatgcttcgattataaatgccattgttattatcacagctgccatgaccatcatagcattggactcagattcagacagatatggtaatataagcaatagacaatacataatgggattcatatgggacattctaggttctgctcttcatggcctcattttcgcactctcagaactagtttttgttaaaatgctaggcagaatatccttccatgttgtgttggaacaacaactcatggtctcagtattcgcctttctattcaccaccattggaatgatttttaaacaatgactttcaaggaatggcatccgaagctaaagttttcgaaggtgggaaaacttcctactacctagttctcatatggagcaccatcaccttccagctcggggtgttgggagcaacggctgtgctgtttttgccttccactgttcttgctggtattctaaatgcagtgagagtaccccttaccagcattgcagctgtcatacttatgcacgatccgatgagcggtttcaagatcctctcacttactgtaacattttggggttttggttcttatatttatggcagttcatcagcaagtaaaggccccatatccacatgaaaaatgcatagtagtattagaggtttcatggcagtcagtttattatatattactcctccattatattatcaataaacatcagtatttatgtaatttatccacaaacaatgtaaatttattcatgtatcattttataattaagtgtacaaaattacttaaatgagatgaattttctgactaagatgacacattccaactcaacacacaagaattggaagtcatttctacagttgaagagacaagctgtagcttcttctaaattctaattcttttagccaatgagtaaagtgaagttggtggccatt

SEQ ID NO: 185086 - DNA, 1653 bp, Cannabis indica
taaaacaaaaaaacaaatcactaagtggcagataatttaaagtgatgcatttaactcattagtccgcacctacacaaattcaatacctgcgcaagtgtaccaacttcgtgaagacgattaaatagttctttccctttcagatcataaatgttcttgtcagcttcagaaccagatacaaaactaggatcagtccctggctcatccttaagaagaaaagctccagcatatggagcttgccgttttcgactatcttgtaaagctgccattagtttcggatcctacaatgaaagtatatatattggagctatcaaaagttcatggtcaatataatgggatgaagaaacacagaccttacaagcttcaaaaatttcaataatccgatgtccgaaacaagaattaaaagaggctcaacaagtttccataccttgacaaaaattggcatgtagaatcctggaaacagcggtctatggggcaatggtaatgctatgacctgtgacagcaatacgaacagaaatcatttgcaaagatgaaaaatagccacaagaccaattgtgcagaaaggaatcatatcattttacaaacatctcaacaaaatgtacgaaagatcaaaaacttcacaatcggaaagaaatgaaaatttagtttacctaaagtatgatatttcttatacatcagatgatgattaaaagacagtatcccataattgcttctactaatcagatgaacagaagataaaccaaaatctgttgacagacttttgtacgctaattagattagtagcactgatttgacaatgaaaagactagtgtattcggatcaacaatttgtgccaataatttaaacccttttcattattacaaaaaatctctatacaatgtcataataccaagcactatttcacttcatttctcatttgttactgatgtacctctatctttatctcttcctatcaaacatgactacgatcgtttcttcaaattctttcttccctcgcctcaatttcaagtttaacaattaaaatttcaaatcaactagattaattgatcaaattatcctgacttaaccaattgcaatcgcattatacatagcactagagttcactaaacattaaagtcaaaaacctaaactttaaagtcaaccaaccgttagataatcttcgggtctagggtttgtagacacaattgcggaagaaggttttgcctcagccccagactcggcctccttgacttcagcctccgccactggtggctccgacccatcactcgcgtccgaacaaaaaaatacacggcaacccagattacgatttcgtccggcgagaccagtgagcgagctcaaaactcgaagaaacggcgccgaagagccggttcggatactcgtcggagcgaggctgttgactcggttgtgaaggcttgaagaggatgagagaagcttcaacatttcgtttgtgagaacaattgagaggggccaaccgaaattgtgagtgttagggttttgttgttatgttttgtggtaggcggttttagtagttgtgatgaggaagaaccgccattgatacatggaagaaatgaaagagctttctgtgtatggtttctctgttttggttaaagccctcccaaaacccttgagtaattgtgacttgaccaaaataccccc

SEQ ID NO: 185087 - DNA, 2155 bp, Cannabis indica
gtacaattttttatatatgatatataatacacacaacatcaaaattttgaaataacaagatcataagagatcaagtaatataacttaaatctactaatttattaaaaacaacgaccatatatatgaagttggcaaaacaaaagataaaaatcatatgaatagtttgttccaaaaaaaaaaaaaaaagaataatatatataaaaaaaaaaaaaaaacgacaatttagtaattaactaagaacaatacaatatatatttagaaagaaaaagaaaatataatttttgcaataagtactaaatagcgtgtatattttgtattatataagaaaaattatatatatataataaaaataataatgagaagagaaggactcagagttgaaagatttatcatcaaggcaatttcgccgttatgtacgacgagcgaacattatcatcttcatcgtccattttcactcaaagagaaataagataaaagaaaaaaaaaattaaaagaaataagcattgagacacattgtgcctaatgaccaaatgagcatgattctcaattgggtttggttttgggttcaatttataatgaagatttaaaggtgttatttatttattaatgctactattattattttatttcccttgctcaccacgtacatgattattaaaatacacaagttggtcaaatttatcggttttaggacaactaaatcatatataaatatattattcaaaaaaaaaaaatcatatataaatatatataaatttaataaataggacaaacaatatacattaggaaatgttattggcactaacatgtttgtatacttgctaacaactgttgctgttttcatttattttttcacaaagtagcataatattaatagggtcgaactcttatatgagtttgccaattaacctaaaaccctaatcactcaacttttgcttaaaaaatatatagaaatatacttcaaggtagttgtattgataaccctaatcactcaagtaagggaatattggagaacattgtctcacatggattaaatgtaaaaatattgagccatatataaagaacatgagctactctactcatagctaattggttttgagatggaaccccatgaatctcaacggggaatacgtgctaattataggggttttatatttgatccttttttaattgggtcatcagtatgtatctcgaaaattcacatccaattaaggtttaatataaatatcccatgaaaggttgtagtgggattcaaactcttgacccaagcaagaaatgataccaattaaagtatgattaccgctacaccacacaacacgttgtccttttatttagtattgttattaggtattttaaggtgtctaacaagagataacacttcttgaaaggctaacaattttctataaggaaatttgaaattatatacatacatttggtacatattaaatttttagaatacaaactcaataaaattaaaaaaaaaaaaaaacatgaagacactttatattaatatccataatacccttctcttctcttctaactaattttatattaggtttagtgtatcaatcttgcccaaattcatgaatgttaatttaaattttcctttttatattacttgtatatttaacaccgatattaaattgtattactactaaaaatatgtcttgcttatatatttgagaccataaggtactcacattttttttttcatctatctacacttaaaaaagaaaaaccattatcattttgcaacttgttttgtattttattattttccctctaaattttgatgttatttttaagtggttcttcttttactcctatcttatgatttgggtatgaaatttttctcaaaattatttatttatttattatagctagttcaatttatatattgttttgacttttagcttttatctcaaagcaacataaaataaattcctagtccaataggtgacacattatctactctcaataaaatatgtcaaatatttaggtatgcttttaaaagaaataaacaaatagcccccccccccccccaaaactcaatgagaattattattagaagaacgctaccttacaaatacaacacaagttatttcttttctttggtactaaattaattttaagtatttattatttagttaataat

SEQ ID NO: 185088 - DNA, 3377 bp, Cannabis indica
ggataaaattggagtggaaacagagaataaggaaatacataatgtagagaaatgtattaagagatggacatcacaattgcaatatcttttcttttttgcaacaacaattgcaatatcttgaatataatattatggaagaacttgttgaaagactagcacttatctcattccccaaagttgtcatccttaagtagaattgagggttctcaactaggttaaagtgaaaaagttatgtataactataatgaacacgtataacacatcataattcatccatacctcggcatcatcaagtgattgatgtagttgtacactttcagctttagatggctgaagagacctgcgttcccaagaatattttccaaacttgacatggggaaagcaaagttgaccaagggcactagttgcaattataaaaattccacttgcaatggtgacgaagagcatttttaacagggtagaacttctctgaaataaagagaacattcaaaacatcaactatagtctttgaatgaaaaacagcatcaaaagtgaatagaagtatagaacacaaaacacagcaaggaccttataacaaaatgcagcacattatccagtactttcataacgaccattaataggaaattttccatggatgtgcaaccacagtagcacagaggttattacattgtccataagttattaaggcttcacgtatcagtcccaacaaactagaaatacttgcatctcaatacctttttagtaggcaaattagtgtaatttccaaccacaccacatgagagttctttactaggcaaggagtaaagatcttcatagtacatgtctactatgtctgacagtccagcctgcaaaatttatcgcatgcttatgataagaacaaaatccatacaataacttaatgcatcatttttctcatattaaatgtatctctatgtgactctaagtttgacaattaaacttagatctcattaatgggttaaaataatctaatgatcaattgtttcatcataattactggtcaaattgtttcaacaaggagagcatctacacacccctatctattcaacagttcaacttcacattgcattttagctagaaccctcatacactagtgtacttcacaatatgttgaagtttgaaaatcagacacataacatcaaaagcaaaatcagaagccactaaaagtaaggagtgaagtaccatttgggagtgtgtgagaaggacttcccacctattatccgaagattttctccagccttcaaattttacttctttgtgtcggtcagcatcaatttgaatctggtaagcaggaatatgctcaattgtccaagcaatgaattgacgaccacctatcttttccaatttagagtgcactgatggcttccaccaattgttctttgatttatttcctccaggcttaaattgtccctttgttgaatgataattttccagaagactcttggcattctcaactatctcatcttcaaaaaatttagttattttaactgaagaatctttcgacacaacttgtcttggtttttgaagccagttgaatagattacttgcacttcctccaagataactatcaaggaaatttctttcagtactctgaagagcagacatgcaaacagcttcagcaagcacagagataaccccttcatctgatgacctaagagtgaaagatgcagcgacctgctaatatgaaatgcataagagaaccgaacctatcagtatcatgtggcacctgcagggaagaacattaatataactatcacattttacaaaaactaatgcagacatgatacattaggagaattacacggcaagaaaggatgaaattcaacaaacctctcttaggttttcaagatcttccatatttctttcagtaccaggcctgaaaataaccagttcaaagctccaaagctgttgtagcactacttgtctaaaagtcacggcaagaatatttttagatgtagcaccagagaagatatcgtcattgaaggagcgtctcagccgactggctttttctataactttactcgcaggtagaaactagacaaacaattaaacttatcagcacacccaaaaccgaaagaacttcaggttacaacgtattattgtctatgaaaatatcaaacatcatcgataatccagaccaaaaatatttggcataatacatggtcaaatttaacctgagtttattgtattctgttaattgtaattatagccatatctctagctccctatacatatatcagccccaatgtaaaagacaattatagatcaatcaagctctttgtttctcagtgctatccacataagaaaatatctgaattcagtgcgaaagaaagagaatcttattctactgaacatagtaaatacagcatagatagtaaaatcgaaaacatcatactttgttgaagaacaataattcccgcaaatcatgatcatgtaccaaagtggtaatagtataaacgcaaatagtaaaagctggattgaaagtaatcaatttttaactataattcaagttctattcaacttaattaacaatgcgtttctcgaacaacgattcaaacagatataacgccgttcaattgcaagaaacctaagttatataagtgcattcatttctatattaaatttgcattgcaataaaattctatggacattaaaatgagctcaccagccgggtcgagaccgtgctatgttggtccaaagctcccggatatacggtctccacaaccatggctggcatgccattatctatatgctcggcggcagcctggcctccatcggcagcggcggccgtcagaccctgctcgaagtcaacagctccaaccagagtgagtcgagccaagtcgttctcgtatgttctgacacaagggagactattctcaccggaatccaccacttgtcggaggacctcctgctcggtgcccgggatggcatttgatgaagcatgagcaaggacaggaacgtaatttcggacgcttcggagaggaaaatttggaaatattgactggggattagggtaaagaaaaacgcaacggggtcggacaggaaggagaggagtatggagggtgagagtgtaaagaaacgccatcgccggagaactctctggtctctaaaactgggatgaagggaagtatttgttctttttcttttttcatattgaaaaaaataaataaataaataaaatcttttcttttagggcaggtttgtaatcaggattggactgcattggactaaaaagaattagattggactggacaagattgaattatgttaaaagtaatcccgtatttaatttaagaatagaatggactaaaacttttaaaataaaaatatgtaatcataaattaaaattaaaatatata

SEQ ID NO: 185089 - DNA, 1776 bp, Cannabis indica
tgaaaaaaatatgaaaaccacttctcctaaaattattttttgaaattattttatattttatagatttaataaaatcaaagtagcatttatccaacggttaaaatttaggtaatgtgagacaaaaataaacattacaatttttttttttttgataaatttaattaaaacaaggtagcatttatataattactaaaaccctattgtggagttaacttgtatgccaaaaacacacatatatcacttacacataaataatatagaacaaaacacacataattttattttctaataaatttaattatactaaaataatatttatccaattattaactaataataataataaattagggtaccaattgttttaatgtgtatcaaatttgagtgtatattattatgagaaatttttaaaaattctttttttttttctatgttttatttataattttacaacttaaaattttttattacaaaaatagccttctaaaattataaaattataaaaatatattttgtttagcaaaaagtcaaaaaataataacaaattaatctcactacaactataaataaacaatctcataccaactataaataaactataaaataatcaacaaaaataatttattattaataactgaagaactaattttgtaaaaaaaaaaataaaaaaaaaaagtaaaaataaaattttacatttttataattttttttcctcaaatttttagtttagtatgtaatattttctattattattcttaaataatcctacggcaaatgtaataattaataagaacatttcttactcaaagaagaatccaatattaatcaaagacaacaatatatgcttatttatttaatcaccaccttgtagtaaaacaaattagacaaaacaaaacctctaaccggttgtacttaaccaagtccctccgcgatacacctaatcaaaacctcccttataagacccaacaacacacctacttcttcttctgcaactaactaaagctccatcaatggcgtctcacacaatcttcctactcttcttcttcctccttcacttctctctttctcaactaacaacagcacagatcatcaacaacaactgcgattctttaacctgtaccggagcaactaatccaccaccagttcacttcccattccgattaagaaacagaaacacatcgcaacgaaatcgatgcagcaaccgaataggcatcgatctttcctgcaacaaccaaaacgaaacaatcatcagtctcagctcaggcgaattcaccgttcgccaaatcaattacgaagaacagagtctctccatcaacgaccctggcggttgcttacccaaacgattcttgaatcgagaattcaatctcttcaacagtaccgatcctttcgtagtcgatcgacttgaaaattacacgtttcttaattgttccttagattatatgtcgacgattaagtatgatctcagccctatttcttgtctgagtgacggaaacgacgaattctccgttttcgccgttccaactgtgctttaccactatatcatactagattcaccgtcaccacttacttgcactgtgatttctacggctatggttcctcgtccgtacgttccgcccgttaatttttcggatataactggagatatcaaattgtcgtggtggatcaacccggattgcagagattgcgtcgcgcgtggtggagattgcgggtttcagatcgagtctttcggatgctccgtttcgtcgaatcgcagtatgttttaattatttatttatt

SEQ ID NO: 185090 - DNA, 4939 bp, Cannabis indica
aaaaatatttagctatctacaacatctatagccattttgtctttgaattgtgatagttttacaaaaagaaatgttgacattgatttgaattttgaacatagtaatatttgctgaagtaattgctttgactaacaatataattaactccaaatacatatatttaaaacgattttatttcaaatcgaatttacatagttaaaaaagagttgaaatccaaataattgaattagggaatttcttatctcagaaaacataaaaagaaattaaaattaaaaacccaccccaccccaccccctccactcacactaataatacaaagccatgctgacatctgtatatgtatcacaatgaatgttatattaataagtaacctctcatctcaaggcttgcaataacttcaaccaggtagccaaacgaactaaccaaattcaatgcaaagagaaaaatggatatattatgccatactaaccgagattttccccacatatagattcatcgatatatagatctcttggttgagaagtaaactctttccattttcccaaagagatgaccacattgaatttaaaagcttatatacaaaacaataactgaaaagtcctatacagaaaaccgcactacataaaggtatagccagtagccacatcattctttccagcttttctgatttgtccacccacctccactccacagaattcatttctcaacaatactaattagtctattaggaaattaaatttaaataccacaatacattttcataaatatagagaaatagaagacatacctcttggcattagccacctcctttgcaacatcctagcaacatcaaagcaaacagatgaaaaggcaaacaagaataaagttccaatcttttccactacacagataacaagtaactatgtaatattaagctcgaaacaaaaactgaatatgctattcttaagtacctcaccttattttgcagaatctgatggtaagaaacagagtaacataggtgtcttgtatcattttcaggtgctaggatgcgaaacgccatcaaggaataacacgcatacacatacataagaactcaaaacaattcacaggaatgtagatataagcccaagaaatctaggcagcagttaaccgaaagcaaattttttgctcaatttttggagagcaaagtgaagaaattaattaaacttgaaaaatcaaggcaatgtcaaaatactttagacaatgaatgacaaatattctgtgagctcgttttcttgtccctaaaacagtcctacactgtacagattataatagtcataattataattataataataatataataaataaaaggtcaaaacaattagtatctcatctttggagactcaaggatccctgaataaaaactagggcctaaaccttccacccttggatgcacaaccttgatgaataagtgatgtctccataccattatataatgcgccaaaatgatgtacaaagcaacttgcgtcaacctcatcagtagttgaatttgtttttgccatttccaaaatctgccatagcccgctctaagcacatttgaagaagtcaccatattttgggcaacgtgcatgggagtgaaacatgtataatttactgggcaatgacaatgctattttcattcttcaattgcactttcatatcattaaaaacttatttggcagttcgaatcaagtaccaatcttgcatcaccgtgccaccaccaatgtgtgctgagatcatgccggtgcgaaatgcttcataatatctcagatgaaagcacgttggaatcagatgttaatcaatcattatggccatcacgattttacaattggcttcaaagccgccatgtgcctctcaatcaatctatccacaaatgcacggatctgcaagtgtaagatttccatgaaagcttagtaaacagcaagtattacaatagaatgatctgttcatcattactgagattcagacattctcaaacaatgacaaagatacagtttttcagagtgtagaataatgaaacattcacaaaataatactcttgaaatattttataaaaatttcaacacagctgccatttacctacattttgttttacattttgaaagtaccaacgcaatgtgaaatgactttctatatcaattaaaaaaaaaagcctaataaacattgatgaccaaatggatttctgttttaaattaggaaacagtaacacaaaatgtgaaaaagagatctacggcttttaacaaacatatgttttgtgcaccttgttcctgcgcttgaaatcgagaaactcagaaacagccatggctttctctgcatctgtagctagctccataacctgaaagtcatattcatagggaaaaaaaaaagtgagagtcagctctaacctcttttaatattactagtatcacatcaaatcaaaccaaaaataaaaaaacatatatacagaaagtaacaaaccttagttgcacttttcttcataattgacttgtatccctctctatctatttttttagctttatacaggggcatgagtaatgacgcgacatagtccacaacagcctgttttatacggtctgcccctcgatgatgaccttttacggattccttgttaattgtaacctgtgaaacagagctctcgtttgctcgtccatcaaacttccacgagggttgttttgaactagcatttgaatcttcctcatccctgatatgcccagatggatcagagaaattggattctgctgctgctgctgctgcttgtgactgccatctctcaatggcatgataatccttaattcccacactaccagctgtgtcaacccatgcttttgtataaatactgctgtctgcagcagcactctcacctgagtgctctctcaagttcaattgagtagcaatctcatttgaatggcttcgctgagaaaggttatcagctgaaattcttgaattatcaaggttgacacaagtggcagagaaatcaacagaccaatcacgcaccctgcaattcctagagtctatttctgataaacaatcttgttttcccaaaacaccaccagaccatttcctcctaaaatcatattcatccatttgagcatattgttcacgtctagcaaatttgtgaaatgaaggaatcttgggaagctgcagcaatgaagtgctctttgcctctgacgatgtatacgcctaaaatggtcagcaattgtttcatgcaagaagacaacaaaacagagtgagatagttcatctaatataataaaaaaataagatagttcatgaaataatctacataacaattaaaaacagctctatgacaccaaaatatttcctttgaaaatctagttgtgcttcctttattaataggtaacatagctgcagctgcatccctatctattatgtatttcaccaagtaataataatgacaacttgaaaaataacaattcatttacaggtaccctttcacatagtgcagactgcagatgattatggtttttgtactaactaatcatattgtacctttcaccaacaccaatgaaaaataatttttggatgggcaaatgagaattacaataataatggaaaaacatatgcagaaattttgaagaattatagaaaaaactgtatttagttcagcatcactcaacatggctattacatggttcaaatactaccaaataaaaggaaattaaataaacatccatactaattttcaaaaaaactgcaaatgaaagcaaatctctcattgaagaatttttaaaaagaaaaaagatccaatggaaaacaaacctcaacagcagcaagcgctgcagcacgggctgcttctacagcagcaatagcagtcttttcttcttcagtcatgccagcagcagcatctacctcaacatgcaaactgcttgttgagccctgggaccttaatgaattggtttctggtttgaaggtagttgctaaaacctgaatgtttcctctgttctcagaggcaccatgatttgcgtgtagaggtggctttcctgaagctggatctttaataggttttctctttgaaaaatccacagtagttgcttgccttgataatttcaaaccaccattagaagctttttccttgcgaaagacttccagccatacactaaccagttgacttgctatggcacgtatatcacggctagtatgaacacaaaccttttcttttacagttttcccaatgcctacactcacataagaaacaagtggttacataatgaaaacagcacattaactatatcaccattgtaccttgcactcatgcacaaaaatattatttatacgtatcacaaacagactgcaaaagtctacatgtagaacatcctcaaatatctttaacaaaggctgcagatgaagaatcaggaatacaaataacattttcaatcaagcttagctgcatatcaggaaggaaggagcagagagacacaaatataaataagcagattgaccaaaagtactctaaaacacataaaagttcaaattttaatcattaattacaaacacgtctacacatgtactaacaaaattaatatacaaccaggcaaatatgaatgcacgagataaaaagacaataccagataagcgcacagcaagtaagtctgttgaaacaagcacaagaagacgaacacagtgccgcaagagttgggtcccatccttccccatcgaatcctgtaataattacataattagtaccctcagaaaccgtgtgcataaaataaagatcaaatgccgtgaacagaaaatagcacccagacacataactgacttgatgagtgagctggaaaataatacatacatatatatataaatatagatatataatattatataaacaaaacactagaagaagcaaggtaccagtatccatgagttgagagtattcaacccttctttggtgccagcaaaggacttcaagattggaacaggaa

SEQ ID NO: 185091 - DNA, 3531 bp, Cannabis indica
atggatcgccgaagacgatcttcttctcaagaacgctgtcgaggtatttttctcttgcaattcttcaattgtttccattggcgatttcctttttgtcatagcgtttttttttttttttttttaatttttttgtttgtcaaattttcgcaggcaggtgcttctttggaagcacttgctaaaggtgcggttcgattctctcgcaaattcactgttggtgaattgagagaccggtggcagtctctgctttatgatgctgatgtttcagctgaagcttctgctcgtatggtggaatttgagctttctaataatcataatagcttgtcttctaagcctagtagtactagtagtagtagtagtaggtttggggtttctaaaggaggagcgagtgtaggactaggaagttctcctgcgaaacgaaaatctgaaagtattcgtaggaagtattacgagaggcgtaagagattgtgttcgtttaatagttataatttgtcttatattgatgaaccaatagctaataatgagcttttggatgggaattatggtgttggagatcatgttgagaattattttggatttgaggataagggtcttaatcttgtgggggtcatgtttcagttggtgatgttgattctctgttagatattcatcctggtcgaggattggttgaacatggtaaggagcagaatggtgatcaccagttgcttagatcaggagatggattggttgattttggtaattgctctaatgttcatggagaggttgggacatctcatacaatgccggatatgcctctttggaagacaattgaagatgtctcagcacccgaaatgcccatggatgttgaagaggatggcgttaaaataagttcgcctggatatgatgttgcgccctcacctatgacattgggggagtcattaccggatactgagatgaataggtcgattcctatctccggagatgattttgctgatttatcggattcactgttgaacttaactaatgaaaatgagcctgttattgtagttgtagatggggagaacatgaattttcccaaagatgtaaatggaaataatggttcaagtgtatgtcaatcagagaccttggatggaaaaacattgtatgatgtgtctggtgcagggaagaacgataatgctagtgtgagtcaatttggtggtggtaatcagcataatgtttctcattctgaaatcaacattccatcagtgccaaacccttgttctcctgaaattttccgtgaaatggagtgtacattaaacaccgaggaccctgaggtcccggataatgacgatgtgatactatccagatttacagaatatcgtaatcctcctacttcctgtttgaataaaaagaatggcaggcaagaaaatataatcttgaagaaagaagaaaaggttgcagatccatttattgcttccaaattgacaggacagagaatagttcagaaatccagccctagcttctcagttgtcagctgtgatgttaaggaagaatcttttgatgggaaccatctagcttcagtctccaaaaaaacaaaagaaatccatgtggatccaagtcaacacagatctgtacatccaactcctaagtattcagcaaaccaagtgctaaaacaagaggttgtcaatattagattggagttacttcatataagtggcgtattcatttattatgtccagttggtgatgtgctcttgtaattgcttaaactgcttcctgtaaacaggcattacctgctccagttacaattaaggggaaacaagcactcgtatctacagagctaggtccagtttcgttgaaaccagaagcaatctcttctgcactagatcatgatgaatctgaggaagaacctgatgatggcgatgatgatattccttctttttctgatattgaaaacatggtaaacataagtttttaatattttatcatgattctctaatttaagggttttttgttttctttcactgtctacttgaactactcattgatgtctttgctcttccagatactagagatggatttatgtccagatgatgaggatccatatatcagtaaagaaggtatcttaaattatgcaattaagtgatgaattattttcttctggttccatatcatttatggaggttcaaagtctctttatatgttacaaatctcttctcttagcattatattatgttatttggcaactattatggttcaagtatcagtaaacacacaaacacaaaaacacatgaccctttgtcaagaaaaccaattaccaatcatctttagcaaaaagctctttattttatttattgaatgagtgagatttatgttcaacagtactctcttatgatttccctggttttacagtcttaaggtatcagcatgaagatgctaaaaggaaaatcatgaggttggaacagtgtgctcgagcttccatgcaaagagccatagcatctaaaggtgcattggctatattctatggccgccattcaaagcaatatattaaaaaacctgaggtaatatttttacacttttgtataaattcggattttctttcatattgttatgaataagagggatgtaacacaaagcgtctagtgctgatagcttcttgtttacttctaagatccaatttcttggtaagtggagaatacctgacattttatatcgatccttttctaatttatgcttaatcatatcaatatgcaaaacccgtaccacacttgcaaggttgtctgatatactcattccattgattcaataatctgaatgccattctctttgtatagttgggctagaaccatataaaattgtgttattcatacatttctatgactacatgatggattctcctcccattctgagtgcaacctgtttctacttcacaggtcatacttggaagagcaaccgaagataatgaagttgacattgacttgggaagagaagggcctgcaaacaaaatatctaggcggcaggtagatttcatcttaatattctgatcgtcttggcctagttgtataacttgcatttatgtttctaaattgtatggaaccaccacattttcctaactcaaacaaatatgagcataatatgtttgcaactccacttttaaaatttatgcattatagaatgagagaaaaataaaagcaaaatgatttgagggtaagtgactactggtagaggaccaaaggggcttttctcccattagctcttttatatttgtacatgcccaggaaatgttttcttatttgatttcaactttaatatctccaaattgaaaagtatgataacttggtctatcgtctataacttttgatgaagttgtattgcataaaatataacggatcttataactgtttcttagttctgatgaactctgcatttccataaatttggactctttaactcatatctccgacttttctttactatactaggcttttataaagatggaaggagatggttctttctatttgaccaatatcgcaaagagttcaatcttcgtaaacggaaagaaataccaaccagacat

SEQ ID NO: 185092 - DNA, 9442 bp, Cannabis indica
  modified_base (161)..(161): a, c, t, g, unknown or other
tttgtggttgatgctctgcttgtaaatatttatgcatggattagaaggatgatcttacatttcttaatccaaaaattatgctatcattactctttctttaaataattaaatgtttactatatgggagttaaactctgtttttctgtttttttttttttttnttttttaaaatctattctatgttttaattactagctggagggagaagaagctcagcgaatggcaaatcgacatgttgaaagggaaagaggccgccgtgaagcaacggctgatatgtcagaagacttatcagaaggagagaaaggagagactattagtgatatttcagcccatggtgacagcaacagaggaggaacaatgcctagaaatagttctgttgatgtaatggaaaacttggctaagcagctcaaagaaaagaaactatacatagtgctaataaggtatatatatatagatatatgtgaattacacaaaccataatatgttgatctctaactgtgtgcatgatggtgtgtgtgttgttagttcttattaacaagcaatttttgtgcagtcttcatgggttgatacgtggtgagaacatggagcttggtcgtgattctgatacaggtggccaggtaactttaggctgtaatgtctcatctaatacttatataatatagttatccaaacagattaaataagttgaaacttttagcaaatacttacatggagtttaaaatttgctttgttatcaggttaagtatgtagtagaactagccagggctttaggctcaatgccaggggtttacagagttgatttacttacaagacaaatagcagctccaggtgtggactggacatatggtgaaccaacagaaatgctaaatccaacaacaacatctcatgagaatacaattgatgaggttggagagagtagtggagcatacataattcgagtaccatttggcccaaaagacaaatatgtagcaaaagaacttctatggcctcacatacctgaatttgttgaccgtgctctcgtccacattactcatatgtccagagttttgggtgagcaagttggtggtgggcaatcaatttggcctatagcaatacatggacattatgctgatgcaggtgatgctgctgctcttctgtctggagcattgaatgtgccaatgatctttaccggtcactcactcggaagagataagcttgaacaattattaaagcaaggacgtcaatcaagagaagaaataaattcaacttacaaaataatgagaaggattgaagctgaggagctatcacttgatgcctccgaaattgtcatcaccagcactagacaagagattgaagagcaatggcgattgtatgacggctttgatccggtaatagaacgaaattaagagcaaggatcaaaaggggtgttcattgtcatggaagattcatgcctcggatgattgtgagtattattgattcagattaacattgccttgttttactggttttttattttgttgtacttcctccaaattctgttagtttttttctatttgtctttggtttataggtaattcctcctggaatggaatttcatcatatagttcctcaagaaggggatgtagatggagaattggagagaaatgaagataatgctgcttcccctgatccaccaatttggtcagaggtgatttactaaagtgtccattctctttctcttgtcttcccaattcccatttgttttgttttatgaataattacaaatgtgaatatcacagttgtattttttgattggcagattatgcgtttcttttccaatccacgcaagcctatgatacttgcacttgcaagaccagatcctaaaaagaatatcacaactctagtcaaagcatttggagagtgtcgtccactgagagagctagctaatcttgtatggttattcaatatatcttttacatggcttcctagcaaactcactttttgtgtttcctactgatacattcattatatatatagacactaataatgggaaaccgtgacaatattgacgaaatgcctggcacaaatagctctgtgcttctttcaattctaaagttgattgacaaatatgatctatatggtcaagttgcatatcctaaacgtcataagcaatctgatgtccctgaaatctatcgtctagcagcaaaaacaaaggtacatatacataaatacatatgcaaaaacaagcatttcaaccaactgatttgagtttctctttgtttggtagggagttttcatcaatccagcctttattgagccatttgggcttactttaattgaggtgcttcttgtctctaactttggtttcagatattgattaatgtgaagtccaaacacaatctcgatctcttttattattttatgttttttcaacaggcagcagcttatggattacctactgttgccaccaaaaatggaggtcctgtggatattcttagggtgcttacctattcacccccctatcttttttctttggcacctttattattatgattatttttacaaaagcactcaaatttatgacaggttcttgacaatggtgtactggttgatccccatgatcaacaagcaatttcagatgcccttctgaagcttgtttcagataagcaactctggggaagatgtaggcataatggactgaaaaatattcaccttttctcttggctagcacactgtaagacatacctaactagaatagcaagttgcaaacaaagacagcctcagtggcaacagagtgatgctgaaaatgagaatataagatcagaatcacctggtgattccttgagagatatacaagacctctcactcaacctgaagctttcattggatggtgataatgctaatttagatggcgatcaagacaacgagtgtgatcgaaagaacaggatagagaacgctttttctacattctcaaggggagttttagggggaagccaaaagtattcatcatatgttgagaaagaagatttgttatttccagcatttaggaggaggaagcatgtttttgttatcagtgtggattgtgacacaaccttagagttagttgatatcattgagaaaattgttgaggcagcaaggaaagaagaagaaaaggatattggtatcatattgtcaacatccttaaccatatctgaaatttactctcttctaatctcaggaggttttgcaccatcagatttcgatgcatttatatgcaacagtggtagtgagctctactatccatcttcaaaccatgaactagatagtccttctggtcttccattcatggttgacttagactaccgttcacacactgattacagatggggtggacaagacttgaagaagactttggttcgttgggcttcttctgtcaataacaataacaatataaatgaaaatgaaaatcagcaaattgtttcacatgatgaatctggatcaactcctcagtgctatgcattccaagtgaaacacccctcattggtatattagtggttcctcttttctcttttatttctgtaatactataattaattttcatcttaaattatttttccccacctggtttggttgcagatgcctcctgtctcggaagtacagaaactaatgagatatcaagctcttcgatgccatgtcttactctgccaaaatggtacgaagctgaatgtcatccctgccacggcttctagagctcaagccctcaggtaaatatataattataccactgtaatgatcctcttttaagtttgaaaaacaagaagaattaattaaaaaggggattttgattttgttcaggtatctttatgtgcgatggggtatggacttggcaagtgctgtggtgtttgtgggagaatgtggggacacagattatgaaggactgattggtgggattcacaagacggttatattgaagggagttggcaacggttctcgtatactccatgctaacaggaattatcctctaaaccatgttgttacattggacagtcctaacctagttgagactcaacttggaaacataacaacatctctgggaaaactcaaggttctcaagtattagacaaatgcttcaatcttttgtttttgatttttgtacagcccaaaatatgtaccataaactctctttctcaccctcttttggaggcttagagggggataataatgatggtgctttcccaaataagtggtgggaattaattaaaattcctttgatttaaactcaacaacttaatggtgtaatgccagtgccacatgacatgaataataagtttagtttaatgaactatgttttttgttaatttcatcatctttatgattgtattttggtttacttattcagatcatgactcttgagtattgtctagaccttatttgcaactctcttttctctctagggaaaattaattaaatatacagaggtctttcacagtctttctctaaagcaaatatttttgacctacgtcaatggatcctattggtgtggtgactcctcatcctccgtctccaccggtccaccctcttcttctatacctcatgtaaccttaatcccacctccgcctatccacactcctcttcattccaccataaatccttttccaacactttccccttcaccaaatctctctgttattccaaccttcgagtttttggctcactccaaattattctcatcttcgggtttttggttctttgtgttttcctcatcttcgtgcatataatcaacataaacttgattttcgctcagctccatgtgtttttattggttatattcccaatcataaagtattgacctcacttttagccaatgccagtaaatcaaattaaagcgattaagaataattgaataacaacaaaaaataaagactaagtaaagaaaacaccagaattgttagagaggttcgacctcgtgatggtggtaatagtggaaatgtgtaggatgagaatttaacagagcactaacgagtgtaagtgacaaaattggtaaaatgtgtttccttgatctttttcattcacctttaggtaatatatatatatataccatattacaagctaaaaatgtgtctaccaaatcgtaaagagatatacaaaatatacatattctaaatattgaagattatgatattctaatataatcgtaataacccccccccccccctttttcaagttggagcatgaagatcataaatgcccaacttgccaagtagatacaaaaacttgcgcttgccaagggccttggtgaagatgtctgcaagctgatcatcagtagacatatgatacgtagaaataattccatcacgaatggcatcacgcacataatgataatcaacttcaatatgctcggtacgctcatgaaagacaggattttgagcaatgtagagagctgattgactatcacaatataagtgcatggctggcgaatatgtgacacccaaacttgcaagtaaagctttgagccacttcaactcggaagtgacagcagccatagaacgatactcagcctcagcagaagatcgagacactgtgtgttgtttcttggtcttccaagaaatcggagaagagccaagaaacactatccaaccagtaagagaccgtctagtcaaaggacacgtagcccaatctgaatcacaccaacctgttagagataattcacaatcagtgcgaagaagaatgccttgacctggacacccttttaagtagcgaaccgtacgaagtaccgcatcccaatgatcttgacgagggtgttgcataaactgagccaagatatgaacagtataaaccaagtctggacgtgtgaatgataagtaaatgagacgacccacaagtcgtctataccgctcaggatcgatgagcaatgggcctttggtgagagctaatgtgtgattttgctcaatgggaaagccagcaggacgagatcccaacaagccaacttcagcaataatatcaagtgagtattttcgctaacacaagaagatgctctctgaattacgagcaacctcaataccaagaaagtattttaggatgcccaataaacgtagataaacgtagataaacgtaaccaggttgtcagcacgctggtcagggtagataaacgtagaaaggctggacagggtaaatgagccttggtcctttcttcaacaagctccgtgaatatctccaaccgcatcctacatatgcaaatttgactcctctgcccaagattgtaggagtctcaacgaattgtaaataaaaatatgtgcccctcatttggttgctctatggagctcgagaccccatagtgtcactaaacctcagccttaaacatgtatctttgtgtcttttggataggtcatgatatccctgcgtgggtgggtcttggcaaccatcttagagactacgtataaaccccagcttactcctccatagtactcggaagtattaaaaagccaaaggaactaggaatttgatgtgcattacatgatcccattttatttagcaaaataaataaataaataagagtaagaatagtagtggatgaaacggttaaaagatttcccgccactcctaactgtcgagagtccgtacagttgagctggaacataaaggcggtaactctcagtctcaccatttcaaacagaccactcgtctctcctctctctcttactctctttctctctttctccatttcctcctctgtctcacactttcttgtttacttcaaccctttcttccttcaatggcagagacttcaatattggaaacccagatcgaaatcaagccccacccccgccattcttcctcgaaaacattcaagaacaaaaggtcgtcctttccttcttcaaatcctgtcatcggaggcgccggcaaggcgacacatggctcatttccatctttctgatcctacccatcatcgctttcctagtcaccatgttcgtcaatgactgttggcggaaatcccatgcagactgcgttgttaaacccttgggcagattctcctttcagcccctctcagagaatccctttcttggcccttcggcttccacgtacggtgaccggttcttttttctttcctttttctcattttgattttggagattttatatctttttccaagtgggctttgagtttggttaatgaatctttgagaaatgttcttgttttcccttaagttttgatgggtttcctctgtttggtttgcgggaaaataaaaaagagaagagattcccccacttattcactcaagattttgtattgtttggttcatgggaaatcagtgattctttgaggggaatatgctcttctcttgattcttgaaccgaatacttaactgtttatattactataatttttattgctaataccaacgccataaatctttaatttcttgtagttcagttgaacagaaataactgggcttattttatttctggttggacttgatcaagagttttatgtaatcttttgatgtggagacaaaattgttttatcttcctccattggactttattatatatcttatgttttcatgattagttcagagttttctcattttaacaatcaaacacatgtattgtttccaagattattttttaattttgttcattgcaaagataacttttttgggtcactcaagtttttggggctttttctgtgatttaattttgtattgaaattgcaggctaggtgaggtgggagctcttcgacgcacatttttgatagaacatcagcaaacatggcgcttctttgcctttcaatgtctacacgctggcttgatccaccttgtcatcaatctaggaagtgttgtctttgttggggctcacttggagcgggagttcggtccatgtaagtcttctgagcctagttctctttactttgtatgataattgccaaagatcttaaaatgacttttaggcaatgtatatgacattttttttttgggcagtaatggttgggataatctatctactttcttccttctctgggacattaatggctgcactctttgttcaaaacaagcctgctgttggttcatctggacctctttatggattacttggtgctgctctttctgagttgatttggaactggagaatgtacattgataaggtttttaaactctgcccttttctcagttttctacagctgataattatatttccatagtgttcttaattagtatgcaatgcatatactgactggttttgtttaaaaatgtgatcagtttacagctttggcatcactttttttggtgtgcatgatcaatctagctcttggtttgcttccatatgtagacaacttttcaagtcttggtggttttatagctggaatcctacttggatcagtacttttatgcagctctcaaatcgaacaaaactctcaaaacaatggaaaaggagtattgtttgagcatagtgaaaacaaacgctttacaaaactgaagttaaagcagaagctggacatgtcaattctcagaactctcactcttgttctctattgtgttatgttagtacccttccttacctttgtgagttttatattggtcattaattttggtttataaaataagtctttctaataatgccagatgtaccggatgtctggtagcactattacgtggcattgacatgaacgactactgcaactggtgtagatatattgactgtgttcctacaaaaagatggagttgcgaagacagagtaatttcttgtgaggtaataataagagtattattagattatttgttatgtagttgagaataatatcctttattttggtatgcattgcagaccatggtgagcaaggcagagttgactttgacttgcttgagtaacgggaagttcaaggtttttccttacaccaacatttcaagacccaggattaatgatatttgcagtgtgatatgcggatattgatgatgcttgcttcttctactataccacgtagcaatatgtactatgttgtaacattcttttggttaataaaagcatgactttagacttttattttcatttctcttgtcgttttaaaaggagatctctgcgttttggtttgattaaataatatcgaataatatttcaaagacaaagcgcccgtggcctaatggataaggcgtctgacttctaatcaggcgattgtgggttcgagtcccaccgggcgtgcgtgctttttcattttaatgtttattatgatttatgatacaaaattgatgttttggatttgttttcttcatttttttcacatatgttttcttctttttttatgcagatttcttctttctttttttcaaaaataaaataaaataagtggaaaaatagagtatctagatcatgtattttgacaaattatcaactttgtccttacataattcaaaaatttattttgaacttgtattttgtaattatatattatctttcgaatataatcaaaattaataatttatcaaaatactaagtttgaaatgatcgaaacc

SEQ ID NO: 185093 - DNA, 2568 bp, Cannabis indica
tttagcagaaagatacagtgaggattgtgttgaggacaagcgtttaaatacaagtatttgtgccaataattatatcataagaacctgaacgaatgatttggaattaggagatggttaagtactaccaaatccaattgtttaatataatttaatgtattactctcactgcctacctttcaactgaattttccatgtcaattgtctttcccaacagataacccaaaatctaatatatattctacatgagataaatgatgcacaaagtaaacatttaaagttttctttttaagtcttgaagctacctgcaccacccatccttgttttatctgaggaaaatttggtgataaaaccataaaaatagaatgaacaatagtactaaaaaagagacaggttatattttgcttgaatatggtcgtaaatgacttcaaaatatctatatagtagaaactaacttaagttagaaaactgttctatcacaaagctttcttcattgggaaaatttgaaatagaaagcctattatctaatatcaaaaatcatgccccaatgtgaagtttcgtaagatacaacggggcagactctgcatgaataactcttccgattatgtacaattggacagagctatacacgaaaaaccatcacaagatcagtattgtattaaacacttagttaaaccccaaactcacttgaaaatccccatgaaaaaagaccgtaattaaataaaattaagatgctcagcggcgattttgctgccaaaattgctgcaatcggtataattgtttcaattgctcagacttaagatccgaagtgtcattgctcaaactgccaaagttgcgctgctgatgttcacgggtcattcctgcttgcgaacgatagaggtcagagtattctaaagactcatattgatgtgagggctgctgctgcgggacccgtcgatacccgggatattgctggttctgtccaagtgagctgttgtagtaagcactttcttgaacagctgatggcattcttgagccaggaccataattcaatgtagaagggctggtattctggtaaacacggggaaacattcagataataacagtgaccagaaaaatacatttaaatatctaaggttctatttgaggtaaatgttagagcaaatcattacagcaagtatttaacagtaactaatttactttcatcaaatgcagaatcatgcaaaattacccatctgatagtgccataattttttaataaacctgagaaactaaaatgttccacagagatgaaaaagataaacatcgcagatgcatttgctataggcagaaacagattaattatttaaactgtaattacattgttctttaatctgtacctgttgaagagcagtgaaatgatttccatccttgaatcgagggtgaaaaacatcaccatagttgttattagccatcataggagatgcagatgaagattgtatatagtgtccaggatcattgttagacaccccgtaagctccataggcgtcaggaggagcacctgcaggaaatctgttccctgatgctccatgatctggaaggctgtacttcagatcagccagagattgctggaactcatcaccacctccgtatgcagatcggaaagttgaaggcaaatgcgacgaataactctgaggtaagccagaatagcccattaagttgttggagggttgttccacgggaaggtaatttggcacccgttgttgaggtagtacagaagatagcacagatgatggaatggtgttgctcagtggattcctatactgttatatcaacatataataactcaatccaaaagatcacaaaataaacttgcataaatctatcattggaaggggaaaaatcactgaaggacatcacatttaatatatgtcagtgagaccaccacacaacatgtaaaatcaaaatcataattataagaaaatttaaatcttgttagacattccaaaaaaaataacaagtacgtatgaatgtggtcgtgtaacatattaatccttaataatctgaaaaatgaaataagtaaatattgagtaactaaaactagagcattggttaagaataatgatccaagttttttccaattgcaagctatagacactgttctttatggcttaccaactaatatatgtaccaatttggtaaatacttcttgagcatgaaactacataaatcacttcacatcatagtcaatcacaaaataccactcctaactcacctctgaaaaggggatgtttggattgcctatggatgggactacattgctgtgcctggaaggtaaagattgtgttgcatggaactgcccttggagattatcaggagcttgtaataattgcaactgttgcactaggtcatctagtgtgcttttcggcattgtctgcttaaaaaataaaatccaataaaggtttcaagatactattaaaatgttcaaatcacagtaccaaaaaaaaagccacttgactacttgagtatgtcataacatatataaaacacgttcacctacattagattatatagtgatgaaaacatgattatctttaatatgagtatatgggt

SEQ ID NO: 185094 - DNA, 2136 bp, Cannabis indica
tatcgggaatcaaagttggtaaagaaactcagccaatatctcatttgttttatgctgatggtgccatcttttttttcgtgctaatacagaaaagactgaaaacttgaaagcttgttttgagacatacgagaaattgtctgggcaacagataaacaagcagaagagcgggatagtgttttctcccaaggttaaggcggaagagaaagcacttattcatgggattctaaatatgtaagagcttgataagaaggagaaatatttggggaacccgtttttctattcggctaagaaacgagatgacttcaacttcctgaaagataagattctgtctcggttggaagggtggaaagaaaaacaattatcgatagcagggaggcacactcttattagttcggtgttacagagtattccttgctatacgatgtccactattaaagtgcctgtttcaatttgctctgagttggatagcttacttgctagattttggtggaagggatctacacatcatggggagcgctaccatgctctgagaagttgggcggactgctgtcaacccgaaacgaaacggtggactgggttttaggaaattcaaagatataaacatggctctcttggctaaattggcgtggtatatgctcgacggggagaatagcagtaaaccatgggtcaaaatattgaatgcaaagtattgtaaggttcaggatttctggagtgtgcaggaaaagcaagatgattcgaaggtatggcgaggcatacttgcaaatcgggacttgtgtatcaagaatgctgggttcttagtgggagacggtaagattgacatttggaccaagccgtgggtgccgaggtacagcccggaagaggttcgtcatgcattcacttacaatgttactcatgccttcacatcagtctcagatctttacatccctggcacgcttcgttggaatgagcaattaataaaccagtgctttactccggaagtagcggaagctattgtgcgaattcgacccctctttggaagcggggatactctgttttggcaaggtagtagcaaaggaactttctcagttaaaagcgcgtactggtgtgcgcaaaatcacagatttcagacagaaaagcaagtgtggaaggacctttggaagcaaaaaatacatgctagacagaaaattttactttggagaattttaagtggctgtttactgctcaagaataggctgggatatgttcaggaaagtgacaagatatgtggtctttgtgggctagaacctgagaatgatgttcatctttttagggactgccactttgcccgttgcttatggtttgccagcccgtggggctttctcaatggcaatctgggtaatctgaacttcgaagagtggtttttgtgggtattagagaccgagaatgagtctctaattctgtttggtgcttgtgttttggagcacatttggcaatgcaggagcagcctcatcttctaaggagtcaaaccgaattcggccaattcgataagacttctgcagcagaggttcaaggagtttagcgaggtgcttctgcagaaaatggaccctgttgagcgcagcactcctaccccgcactctcaagtgatctgggacttccggctgagggtagatgcttcagtttatgaaggcagagcggggctttgtgcaatgcaggtgttggatattcaggaagaaggcacagtgcttctgcagaatgttgcagtagacagcgttttggaagcagagtttctggcaattctaaaagctttgaagtgggcagaagagcaaaaagcctatgctgtgttggtggagtcggattccctaatagcagttaaggctttcgagacaaaagacttaccgtttgcctggggttctttcccaacgtttacagaatgctgtatcttggtttctttgtttgatgtttgtgttgtttcgtttatccctcgtgatgacaactctgtagtggatactcttgcttgctattctagagtgtcttgcgtgaattcgaggtgtttgttaagggaggtagccccctttgtggctgctgcactttaagtttctttgttttcaataaagcttttacttataaaaaaaaaaaataacataacctcaaaatcgaaataacttttataaaaataaa

SEQ ID NO: 185095 - DNA, 1716 bp, Cannabis indica
acggcgttctaaacgagcctaaaattaacttatttataagtgagaaattaatacttcttatcttttccaaatcataataataattttggaagtagtttattttttaaagaattttttggaagtagttgatgagagagaaatcagaacaaaaattattggatgtgtcaaactctttgactaatgtaattaattaaatcttaatattatttttattactgcttctaaattaaattaaactacagttttaagcgtcaaatgcatgcaatctcagctactcaatatttgccacgtaagcaatcatccagctggcacatataaagagaataaaccacaaagagaaaaagcaatccaaacaatggaatctacaatctagtgtttcattattattattattattttattaaaaagattaattattattattgttaattttttaatttattgaaaaatacactagctatcaataaatttggaatataattagaattatttaaccactaaataatactactacgtgccgataaaataagtttgaccaatgtatgagcaatactattataagatctattatgatagacaaaactagcaacttaaaacttattataaaaatcaatgatatcatctaaaataagactcgaagtaataattgaattgttttttttaaaaaaaaaaaatttaagcacaacattcaaataattagactaaaaaatgatgttgtcatatctaaagaagaggcattgaaataaggcatttcagataaccaaaacttcaacgacttcaagaacaaaacaaccttctaagtgccaacttgtcgaaacattagccactctcaaataattacgaatcaccatacccaaaccacaacacttgctcgtcgaattaattgcagcgtctgtattcactttgaaaaaatcaggaaggagaggagccccttcggagattggcagaagtgaactcggcatcaccaccaagcttccgtgaggcacatccactcttgcctaggaagggaaaccagtcatcacttgttgtttgttgtgaaaagtcccaaggtagtcacgagcctaattaacaatgagctcaagagtcaactcaacattattaaagacttttttgttacgacgaaatcaaactctccgaaaaattaacataattaatttaatcatctcttttaaaaaggaatcgataaatctatgaataaacaataaaatttttcggcattatgtcaataaattacaaccctaaaaagatgataatgataatgtaaaaaaaataattttaatcttgtatttattatatagtaatgtaaattgtaattattttaaaaatactataaattttctaaaaattcaacataattttatccattaactattggatatgaaaacacccattcaaatataaaacactcaaaagtaaaaaatttatctctaaaaaatagcccttgaataataatagtaataaaaaaaagcaactagttcttttattctctttcaattttcaatttttcccagccaaaaaagaaagaagaaaaagaaaaaaaaaaggttttagttttttgttttatttttaaaaagtaaattgtttttttttttgtttttttttttttttttttttttaaagaaattgttatgagaaagaaactgactttttaactgaagcaaaatggttttatagaggcattcctttatagtcggcaaaacccattgttttttcttc

SEQ ID NO: 185096 - DNA, 5171 bp, Cannabis indica
cacaagttccaacattttcattcacttcatttgctccgacgatgtctaatttaatctctgccactacaacaacatctcacactactactactgcttcgttcagtctagaaattttttctcacaaactttctgttaagcttgacaatgataattttcttctttagcgaccttagattctctctgccattaaaggttaccagctattgaattttatctatgaatcttttgctcattcatcgtgatttctcaccaattaggataaagcagttgaatttgttaatccacagttcactcagtgggagattcaaaatcagcttctttactcatggtttctttcctctatgactgaaggtattctcactcatgtaattggctgtgaaatctttgcctaggtcttgaaaacgcttgaggtttactttgtcactcaaacatctaccaagattgatcagtttgttactcaacttcagaacacctcatgcgtatcaagattgttgtcaatcgtttgagcttcgttggtcatgctatttcgactaaagaacatgtagatgcgatcttcaaaggtcttcctcttgactatgacacgcttttcatctatttaactctaaaaatattttatacacagtcattgaaattgaatctttgctactctctcaagagcatcaaatggatatcattctaaagatcttggctcaataaatctggctatgaatcaatctaattgtaacaagcatctaagttattctcccttttctagtaatcgacctacttcttcaaacgtagttggtcgaggttcatggaatccctatgttattaatcctcatggcaatttctctcctggtctgtctactcctcctcctcatggaattggccgcagtactcgtcctcaattcaccccaattctactctcacacctctggcaacattagtgacctatgtgtcaactctgctccaaatttggccacattgcttcccgctgctaccaaagattcaatatggtgtttcgaggagttggtgcaaccaatgttgataggaaatctactaacataatcactactgataccattgcagatgatgcttggtatccaaattcaggagcagtatctcattgcactactaatgtaaataatttcactaacaaggatccttattttggctcaaaataggttcatgtggaagatggtgtcggtatgcccattcaaaatgttggtaagacctctttcacaactccttactcatctaaacctctataccttaatcaaattcttcatgtccctcaaattactaagaacttaatgtctatctcaaaatttgccactgataataatgcctattttgaattctttcctaatcactattttgtgaaagattaaacttccagggaaatcctcctacaagggcagcttaatcaaggactttatgtcattcaacaatctcaaatgcatctctctcatcatccctcttcaacttcatcctctcttcaatcatcaccactatgttctatcaataatgttacaaattctgccttcaatgtactaagttgttataatttttttttttgtggtatagcaggttggatcatccctctactaaagttgtgtaaagcacatgcaatcttgtaaaatttttgatgtcaataaaattattcataatttttgtgaaatatattgttgcaaaagtaaaattcactagtttccttttcctcactctaacactttttacactcaccccttgtaactcattcatattgacatttgggatcccttgctcatttttttatgaaatgactacaaatattacatacatttcatagatccatactctaggtacacatgaattttttttgctaaaagagaaatttgggaccttacaaactttcatcaatttcaaaaattaggttgaaaatgaatttaattgtgccataatatttgttcaatcagactagagtggtgagtaccagtctcttgtcccaccactcatgaactgaatggtgttgctgagtgcaaacacaagcatttgattgagtgtgttcttacctttcttgctcatgcatctatgccccctctcttactgggatgaagttgtgtgaactgcaaccctttgttataaatcgattacatattaatgttgttcttcaataacaatctcctcttcaatttcttttccaaagatctcctaattagacctcattgagggtgtttggttgtgcctacttttctaacatcaagctatacaactagaataagctttaatttaggttagtcaatacattcttaggttaacataaatgttacaaatatttgtctcctactggaagaatatacatttctagagatgtgttattcaatgaattctctttttcctttgccactcaacacactcctattccaaactctcaaactaaatacttatccatgcctactgctacacctgttttttctcccactcaccctgctaccacacctattgtgtctacctcatctacttctccatcctccttttctggttctaagtctccatccactgcttcatctcataacacttctacatccactacatccactccatccacatcacattctccaccttcccaacctgaccttgcacctgttctgtagctccatctcaaagcactcattacatgatttctagagccagagctgacatttctaagcctaaagccttgctagctactactacatcactttatgtaactaaagcactataagataagaattggaataagactatgaacagtgagtaaattctttggttaagaagaaaacatgaactctggttaaattgcctaaaaaggagaagagctataggtttcaaatgatcagtgcttaaaataaaagaaaactctaatggtaccattgaaatgtataaggttagactagttgtaaaaggttttctccaacaatatggcttcgattttcaagtgacttttagtcttgttgtgagatcaactaccattaggattgttcttgatgttgctctctctagacagtggtcaatcaagcaatttgatgtaaaaaatactttcagtgatctcactaaagagatttatatgttccagcctttgcaagttacataacaagcctcttgtgcttagtttgagaagctaaaatagctcaacttaaattctctcttagtgttttgttatttctcacaacgttttcattaataagttgtatttacaacttttttatgatagcacaggtataataatgtaatttagctataaatttattgtgtttttatatgataaattttaactatatacataatatttattttaccaaaaatttatatgattgaaagtaaaagaaaagaaatttctttgattagaatgctgaaatcaaagattgtaactaattcttctataaaaactacgccaaaacatatgtaaaagttttatataacatatatgatatgctgtaaaccaatttgatcacagaataaaatttgatttcttaatcattaagcaataaaaaaagcatgatttaattgccttgtgacttgttaaataatttctccatattttccttaaaaaataaaaaataaaaaacacatgtcctccatagtccatattcaaattaactttccattaactataattaattaattaattaattaaccttttgaaaacacatgacttattaactcgttgtacattctgagattattttaaattattcaacgttggcacgctttactgcttaatttgacctttattttttctcatatataattatatatgtatatttatttatataatctaattaaccttcaagtaaaaatttagtcactgtagtttttacaattaatatattttagtatatacccactcattggacaataatttattaagacctttttagcagctttgcatgactaattataatttaattaatcttacaaaactattctccaccaataatatccttaatttcttcttcatgatctttttacacattctcgaatatttgtgaattttgactgataataatatatgtaaaatttaattactaattactaagtttacacatttggctctatcaactatgttatatatcaatcattcatacatacatgttgataatgctattatttagttataatttattcaaattaaatattctttaaatgaaatggtcagcaaaggccacataagcaattaaaaagggtaattaaattaagcaatatttaagtaattaatttatcatgacatatatagttttgctagctgtactaattatatatgaactccaaaatcatcaccatcacattgacaaacacatccaaactatcttttgaaaatgtctacatattaatgtgccaactttgtaaaaccccaaacatataaaactataaattattctaccatatatataataaagttttccttgcttacatataaaattgttcctttcaaagtgatgaccctaatcttatatatattttttaaacaacaaccattaatgatcaatagattcccttagtgcttgcttaagatgctaattaatcaagaaaaagaaaaagttaaagaatgataattattttattatgcaaattaggcaagatgggtactaagacatgcaccaccatgatcatatgagcggcccatgtgcctcatatatacgacaatattctcgttttattattatgtccaatatgtgtggtgtgggcctagtggcggacccatgatttagagtgagtggacgtaatttgatattttttgctttttttcctgcatttttaaaaataattttttagctactaatagtgttgataagaaaccaattagttacttttatattaaaaaaaattcattttcatattatataatttgtgatacattttggttacctctaaaacttatttgtatatatatcttaataattaattagttatttttaagttatattatggtaaattataaatttaaagggtaaataccattttagactctgtgttttgcaaaagttaccgattggaccctctgttttattaaatgacaaaatagacgctgtattttctaaaatggtaaaaataggaccctgaactgattttttgtcaaaataaaatttaataataatctgatctaaaagtgttatgacaaaactgtttacatactctatctgttcgtatttttaaattggttatattaa

SEQ ID NO: 185097 - DNA, 4387 bp, Cannabis indica
ttcttttcttctttcttgtttttcttttttctcactttcaaatttctttgaagataactgctcccgcctctctttttcttcttccctttcactgggtttctccttctctgttacaatccaactactttccatgcattctgttatggacaaccttaactctgttctttcactcactgatgaggaaagatctactctcactttgcctgataatgctgctttagactcacaaacatctcagcctgtttttgctcttttagcaagagttttgactactcaacatgtctacaaaccgggcttcatagatcaaatgtcggggcattggcaggggcgataccccgtcacgatcactgaatataagaatgaagagggtctctttcatatccgctttggttgcgagggtgataaacaacgggttctaaacaaagaaccatggcactttcaaaatcatttgattatccttttggcgccaaatgttctgcaaaatgtcacaaaggagaatatggttcatactccattttggattcaaatatatcgcctaccttttttaagtaagtcacggttccttgttgaaacactagggaatatcattggggaatttttaactgttcatgatgattccacaaatgagggatggggtccatttctgcggatccgagttaagcttctcgtcactaaaccacttatgagaggccaaatgatcaaacttccaaaaattaaagatgaattctgggttgactttcgctatgagcgtttgcctgaattttgcttcgaatgtggttgccttggccatccttttgaacgatgtgtggcgttcatggagcgaatggacagcggtaatgatgatgattttcagtacagtccatggatgaaaggatcaaagctaccaacaaatggttatgaccgatatcgtacagatttttccaaagccaatgcttggccacttttcactcggttggctcgaaactctttatcaccatccttaccaacaacccgaacccgtggccaacctcagccaagatttcttcttcctggggagtcttcatcctcacctttgacacaaaactcacattccaatctccccacttttcaccatcaccaaactgtgccgcaacaaattaacaccttatttcatacacctggtccaacacccactgttgctggtgctaatgccttaattgcttcccctcagcaatctccatcttacccccatacccctgcttcaactccctctcccgtggtctctacagcccctataatctccaccccaactactcactccatcaaccaatcaactccttcctctacactaaaacaacagaccaatccctccctttctattgttgatctttccactatctatatgccagatattgattacaactcccttcccaatcattctacctccaatatctttactacctatcctccaccaccctccttccacttacctacaccagtcacatcccacctcacttcccatatctcaaccacaccagcttacactactactactccacatgtcacggcctaccttggacaagaaaatatctcgccaaatgtctttccgaagcgacaaagtgagactatgccagttaggaaaatgctcaaacgaagccgatttctgaacggttcttcatcaactgcctcgggagatgattattttgtgactgatgtttctgcactttcggattctacagccacctttacttcaacagcggaggttgctatgcaaccccgcccatcgccatgaaaatcctaagctggaatgctcggggtttggggaacccgaacgcattcagacatttacgattgcttgttcaacaacaatcgccccatgttttgtttcttatggagacaaaactcagttctaattcggttactcgatttcgtaatagtcttcatttttctaatggtttagaggcccctagagttggtttgagtggcggcttaatgcttttatggaaagataatgtcaatgtcaagctctcccatattggacacactttttttgactgttttttgaattttgaagatggtccctcattccacttcacggccttttatggtgcacctgctacacaggacagaaatgcttcttggactcttttgaggagacttgctgatatttctcctcaccagccgtggctggtaattggtgattttaatgaggttctttccaatgctgataaagaaggaggcccgttatgaaatgaacgtttgatgaatgactttcgcgcttgtcttgaccattgcaatctgactgatacaccttatggaggagactccttcacctggatttaaaaccgtactgctgccacaactttaaaagaacgtcttgactgggttttcattaataatctctggaacaatgtgtttcgggttcccaaagttgttcatttggactattttcactcgaatcatagagcaattactgctgagattgcagctcatggtgcaccactgcagcagcccaaaagacgaagtcgattccgttttgagaagctttggttagctgatgctgaaagtagggatatcatctctcgataatgtgctcaataaccttgatgcttgtgccactactttacaaaaatggcacattgggaaatgtggccgaatgaagaaaagagtagccgaggcacaaacccgtgtgaatgatctcaacaatactttgaatcgatcgaatcatatcatggaagaactcaaaaactctaaatcgatacttgatgattttttagagcaggaggagatatattggcaacagcgatcacgggtggaatggatgagttcgggtgatcgtaacacaaaattctttcatgcaaaagcctcagcccgacaatctaataacagaataaaatttctcattactgatgctggccaaaaagttcattcacgttcagatctggtttatgtcattgaagagtatttcaagaatatttttcaagcttcaacaacagatgatgctacaatgtcctctgttctcgacacaatccccgtcacggtcactgctgaaatgaaccaaggacttacacatccatttactaaagcgaaagttgatgcaacgctgaaaagtatgagtccagataaaagccctggaattgacggtatgtccgccatgttctaccaacaacattgggatttagttggggacttagtctccaaggcagttttgggtgttcttaatgatggggctgacccaactcccttgaaccgtaccattataaccctgattccaaaaaaaaaagcagcctcagaacatgaaagattaccgaccactcagcctatgcaatgttatttccaagctcattaccaaagttcttgttgcaaggtttaaagttgtgcttccacatgtcatttcagacactcaaagtgccttcttgccgaaccgcctcatcactgataatattttagtggcttgaacttgtccatgcaattaagaacagaactacgggaaggaaagggattgtttctcttaaattggacatgagtaaggcctttgacagagtagaatggagctttattcacgcagtgatgaagaaaatgggctttgatgagcaatggatcaaccttatcatgacttgtctctcaatgaacactttctcttttaatgtttatggtgaagtctctggatctttgaccccaactcgcggtttacgccaaggctgccctttgtcatcatatttgttcctcatatgttctgaagggctctcgagattgttacaatttgaagaaaatgaaggacggttgaatgggtttaggctcactagaactgctgcaccaatttctcacttgctcttcgctgacgatagtctccttttctgtcatgcaaatgaaagttcatgtctagctatcaagaaagtcttggacatctatcaccgagcctcaggccaacttctcaaccacgacaagtcagtcatgtctttttctcccaacaccactttggcttcccaagtgttttttcatagacatctttcaatgcccatctgtgaatgccatgaaaaatatttgggtctaccatcttatactggtcgagacaagcaccatctgttcagtgacattaaggagaagatttggcgtctcatgcacaattggaatgagaaactcttttcagctggggggcgtgaagtgcttcttaaatctgtggtacaagctatccccacatatattatgagttgttttcgacttccagcctatgttggtaatcagctcgaatctatgattgctaatttttggtggggatccaatgaaaacggacgaaatacattggcgagcatggaacttatgtgtaagtctaaaatagagggtgggatgggtttcgttctttgagcatttaccagcttgttggctagcagcatggcggctgttggagaaaccagattcacttcttggc

SEQ ID NO: 185098 - DNA, 6584 bp, Cannabis indica
tcatgtttgctgtctctgcatttggtttagtggttaatattgccatggcactgttgttgggtcatgatcatggacacggggggcacgatcatggacatggagggcatcaccatagccatggggatcatggcgacacacatcacgggataagtgtgaccagacatcaccaccaccaccatgggagtccatcacatcatgatgatcatggagatgatacaactgcacccctgtttaagaatcactgtgaagatgaaactcaaactgaaagtggagttaaacataaaaagcaatggaatgtcaacatccaaggcgcttatctccatgtgctaggggattccatccagagcgttggagtgatgattggtggagcagttatatggtataaacccgagtggaagattattgatctgatatgcacactcattttctcagtagttgtgttgggaacgactatcaggatgctgcgaaacatcctggaggttctgatggagagcacccctagagagattgatgcaacgaaactcgagaaaggtctctgtgagatggatgaagtcgtcgccatccacgagcttcacatttgggctattactgttggaaaggtcttgctggcttgtcatgttatagtgaagtctgatgctgatgctgacatggtactagataaggtcattaactacataaagagagagtataacattagccatgttacaattcaaatagaacgcgagtagatctgtagggctgtatttaggtgagacagtctttcaaactggatattttactatgtaatttgaaatattattgaagcaggcctattgctttaaataatatttatccctgatttcttgtgtatctaatatttttggcagaaagctctttttcaagtgcatttctttgtgtgacaagctttcacagttttcttttctttactcagacaaaaataattcacagtaagaaaaattccggttaactttaaacaaggagctctcttggccgaaaactcaaaacggatctctgtcaaacccttgatctttcaaacaaatttctgacaatttggttacaaggaagttgagaaaaaaaaaaaaatttgctccttgactgtcttttaaatttgctttgaaaaattctatggtgacgagttggccttggcaagttgtttagcttgtgttgccagcaatgatgctagtttgcttgcacattttaaaaaattgacttgtattctgtttgtgttttatctaattgctaatgaaattaaaggcattatcttttagtctagattggtgttctggcaaggcttcttatgtatgtacatctgtacataaatatgtttcgaattgaacacaattttattgagcgtaatggtacagaaaatcagaaagaacatctgaaagttcatgtctatttaaaaagttcaacaactgaaaaatcgtaagcagaacaagccacacgaatgctcgaaaaccctgcttcttttgctagaccttcaaactctctttctgttctttccttccctgtgagattggtattcatcatgaacatatcgaactgaaataagcttctagcagctaggcttgattctggggcttccaatatcaccatatccactactattactttcccagaatcaggtaaggctttataacaattctttagtatcatcaagcagttctcatcatcccaaccatgaagtatccactgtttcattcgagtcatttcattagtttaaagtaacacttttctcacaattgttacattcatttgaataaagatttaagaaccatctaaactgaccttcatgaaaatggcttctcctttaggaatgtttacaaacatatctcctgaacaatgcccaatacctaaaccaaaatcatccaaagtgattattaagtgtaagaaaaaagagctctattactactagatttatcttttggattcataccaggatatggaggagagttctctagaatagcagctaaatcatagttgatacccttgatatgagggtacttagagatgatcatgttaaggatggcaccatcaccaccacccacatcaaccaatgaagttaaaccttcaaaaccttgataaatctccaaaatccttttcatgcatatggggttaaatttcttcattgacaacttaaaaagctcaccaaatctaatatccttcctcacgtattcgaccatattcatcccatgtgccctgttacatggatgccctccttccaaaattgcatctttcaaatggtacctttaaccacatatttagatacatgttagtacagaaacaccatgaatcaaattcaacccaatcagaaaaacattaccatgtttcaatgtaggccttgtcttgcatggtcaatagtaaaggtgctagtgaaactccctcatgagtagcttttttaatgaagtacttggcaactgggcccaacccatatagcctgaggaggttcccatgattattattgttaggggaaagagaacaagtaagaagagaataagatgagagaaggcaaagcattcggtcaagagtcataggggcatttgggttctgagttgggagctgggaagctatttgggccggagagagacaagctcctggacctgatctctcgatgatgtcaagaaggcccaattcaattgctgctttgagaaccatagggagtacggacgaggtcacaagttgcatggcatattgagagtggttctcattctcattctcctctttgatttcatctgagttcatctcttttgtgtaggaattgatgattcaattctgttcctttcgatattatgcagcttttgcagtatttatatatatgattggcacatgttggacttttgcttttgagttatcgggtcaattatttgtatgttaaatcaaacctgaaaccaatatgatattattcaaatagccgccgcaacgtggatttaattcgagaatgcctttccaatcttcttaatttttttttaataaatagtatttttactctcgaacattttaccttactaaatttggccctcctcaaattatttaaacttattaaatttcatcctttaatctcagtttcattttggtttaaaattaatgatgtgacatattacatgtagaaaaatcatgtaatgacatgacattacaatttaaataataaataaaaaattatctcaaaaattattcaaaaaaattttatctaaaaaattaaaataaagtgatgttgcatttttttggaaaataaataaaaaattcaactcctattttttttttttttttgttttaaaaaaaagaaatgaaaatgtgtcatttttacaccgcgagttgagaagaaagggtttagggctgatcgaaggtggctgatcgattttatggggtcctggtcgaaggtttttaggcagttcaaataaaaattgtgaggctctggttttgttgaaaggtttgggtttgtcaaaaatagtgaggtggttgcaggcagaggtctgtgactgacggtggttgcaggcctagtttgtttaggggcggctggtggtggtgaaaaaaaaaatttggtaactgaaatactcatgggaaaaaaaagcttggccaagtcaaagaagaaggggttccgcactaagcagagaactgaacctccattttattttaaatttgggtttttttttttgtacatttcaactgaatattaaatgtggtgtcatatgtgggtattgctgtagaataattttaagctttataggaagaagttgaagttatttttggtaatttctttactgtttgtagggtcaaatcacacatagttagatagagaataatttttagaatctattgggggatgggtctgtggggttagtgtgtgtggatttatgtggtttattattgactttggtgtagttttattcattatgtggagagcctttttggatagaattaattgaatcttatataattagaaagtaaagtctcttccttgttttgtgcagagccaacatcagggtcatttactcttaagattcattacaaaggacaactgcaaagacatggtaatattcctacttactttggtgggaagattgattatgttcattattgtcatattgatacacatgcgcgcgcacacacacacatatcactcagcttaaaggaggccctatttcacattatgtaaaatgggtaaatatcttgctaaaatgttttcaaggacttaaacttaaaatcgaaagttttcctatcgataaatagtttgtaaataccctaaatatcaagaaaatataaaaatcgaggttcttgaaatccatcccaaccagtgaaccagatcccaaaattataaattattttttatgatccttcctggaaaaatgattcactgtttctggaaaatggtagaccgtttttctacagaaatcccaaaaaactttgattttaactcaattcaactccaaatcacatgaaactctccagaatacctaataacatccaaataaacatatatcatgcaatgacagcagctataacccacagaacataaaaatgctattattgaaccaagtttgagtttgtgaactcaaacttgttcaactcccttcacatccaacaaaaactataacccaacaaacataaaacaactctgaataacccaaaattaaaaccatgaacaccctaggtccgaacagaacctaaccctaaaaattacatgctcaagctaacacttttcttccaaaaatcaaagagattggtgttctagggtttacctcaaatttagctttccaattttccttcaatcattgttgaattcaaagaaaattagtgttgaaatgatctggtcttctggtttttcttagggttgaataaaaaggtttttgagagagagataattgattctatttttgataaaaaagacatgaataaactttaatttaatcttttttattccttaattaaatccgctaggaaaataatggaatagttactaatttcactaaaagataaaacccacctctaagaaaaattaccattttgcttttacttaacacttaagtaatcttaaggcttaggggtaaaatagtcaaataccacaactctgcctaaacccgatattctaaatatcaacaatacttttcctgttaaataaaaggttctaaaccatactcatgtgactctaatggccaaattgtcgcatatccatcgttatcgagcaaaaattataaaaataataatttctacatatatcacttataatacacctaaattttaataaaatttctagatttgagtattaaaactgcaatgccaatttcttgaatataggcccataatataaaataacttcatataatcatataatacagttaattaatgttaattgccttcataatcttatattgtaagtatgcggtcattacaagaacagtggtgtgaccaagattaaccttgggtggtcatcagagcgcaagaagtagggactataggcatcttcatgggtagggtgcaagggacttgcattggtttgtagtcttgtagcttcgaagacaatggtagtcggaggaatgtttggaggagcatctgaaatagtggaggaattattcatcaaaactatggagtaacagtcctaggtccagtggcttgagttctcaccatggcgatggctatagcaaaattcttcaaaagaataacaaagagattttatgtctcagagagagattttaaacgtttgagaagtaagttatttatttatagaaacactttatatacatagtagaatagccaaaggttaatacaataataaaaatctaatcgacgaatagaatgagtaatatactaccataactaccattatacattgtataattttttttttttttattttttttccttaagacttagcatctctaatggagtgttataaattttgtgtatacgtagtttttagtccatgtttataaaattgaattttaatagtggtgtataatgtagtctaaatttagcacatgttaaaaattgtgccaaaaaacacaaaaaataacatgagttaattaaattttacattacaataaatattacttttatatttactattttattattcattagtatgattaataactttttacatttgtatttatattaggttaatattacgtacaacacacgtgtaatttaatttttttttaattaaaatccaataaacatcaattttaacatcacacattctaaataatgtgtctaatttaaatatgaaatctctcttatgatctgatttaatttataataaccatatgatgataataatattcttttattaatcatgtggagaaagagaaaatatttaaattaaaaataaaattaagttaaatgttaaaaatatagttaaaaatatttacaaaattttaagtattttaaatttaaattaatttttgttaccctttgttgaaattcaatctaatagctcatattaaaacacatactaaaaatttagatcaaattaaatatgaaataaaataaatcataacattaaaaaaaaaaactaaaatagttcatcgccttcttcctcttgcttgtgtgctctttgcctatttcaattcattaaatgaggctgctac

SEQ ID NO: 185099 - DNA, 3476 bp, Cannabis indica
ttagtcatttttaacccgtgttacagtatggaattttgattctgcgtagctttaacttctagggtcattggatgctgtccaacaaacaagtggaaaaacaaatggctacatattctgtggagcaactctagttggaagatttgggctctctgatacatgtcgatctggggccgcagaggccattgaagggctgaaagaattaggcattagatctgccatgcttacaggggatagtaatgcagcagccatgcttgcatgggatcaggtgcagaactaagctgtttccggctatccaaaaatactgttaagatacgtatcaatttgattaaatatttagttgtcactggcttattgcacctttcgatgattttcatgtttagttggaccgttctctagagattatccatgccgaacttctgcctgaggagaaagccaaattcattgaagagtttaagaaggatggacctacagcaatggttggagatggaataaacgatgctcttgcactagctaaggctgatattggcatatctatgggcatttcaggttcaacactggctatggagacaggagacataattctcatgtcaaatgacatccggaagattccaaatgccatttatcttgcaaaaaggacattcaaaaagctggttgagaatgtccttatctccatcactaccaaaagtatcatactagcattagcaattgcaggctatcctcttgtttgggcagctgttctaactgatgttgggacatgcttagttgtaattcttaatagtatgctacttctgaaagacaccccaaaccttgatggaggcgtttccaggtctgagtacgggactttctcttcagtgtcatgtaaaaacaatgaaagcaaaggtcacttgaagaacaatagaggttatgggctcctggagacaaaggattgtaacaatgaatgctgcaaaaaaatcacacgtgaggtgaaaagttagacccgatttccaagcaaggtggaagcagcaaacaagtttgcagagcaaaaaaatgcactgatggaagttgtcagaaggtcataaatgttggaggctcgaacaagtcgcattcggaacaaaatacttgccagaaaaatgacagtcgatgctgctctaaatctgatgtacaaaattgttgcaagaaaaaatcttcagttagaacgaacaatataaattcgcactgctgccagaaaaatgatggggcttctagtgaattaaactattgtgaagccattgacgttgcatggggtactaactttgtggaaaacaatgttactgacccctataaaagatcaaagaagatggaaactgataattactgcaagcaaatggagaagcaatgtcttaataaaagtaccagcgtctcagaaattaatccaaagaagacagagattgctgggtgctctaagcaatccagggagcaatgttgtcttaattatgaacatggggctagttctagagaaaacttgttatacattgttattgaataggtgctgattgatgtaattctggacaatgatattctgtaaaatttcagttgtacaaaaataagagtctttcctttttttcttatttgaaaatgaaaatcatatattgtgactggtatcatgtatcaggtattccacataaaacaccaaattatgtattctattcaaattataaacagtaaaagaatcgatgactttataaagcaatccttgaaaagaatatacaatgatgtttttcaataaagtggcaaacatgagacgaaatttcttttctttttcaaagtagctttttctataaatatgttttctttttctttattgactaggtttctaaattatctttttgggttggagttcccaatttagataaaaacctgttctgttatggtcaaaaattgctgcagttgaactgaattggcttagtaaactgagctgctactttgcccattgtcatgaacatatgccttgatttcccaagatctgccttgcaagacgcctacaatatgcagcaccgttaactacaaaatcatcagaattttttgtcgcggctgaagactatcacccatgcatgtttggttcctgccaaaattaatcaatacttgctataattagagctgagatgcaagtaatataaaattatcaaagataattattgaatctactcatacgcatacaagagtatataattgaagaaaaacgttacaccactagtcccccagcgttgtacagtatttgcatattgaatgacctttttattttggcattacgtccatcaagtattgttttacttgcaatatcaacccaacaataacatttttgtcaaaagccaatgaagaataagcatgtggttattgagtatcatcactgttttgtccttgtatatatatagagacagaccatcaaatttgtgcacagtaaatgaatttaataccaccaaaataataaaccagcacttctaaaagctacagaataagcttagcttgtaaggctactttttttttttgatgaaaggaaactgttagaagttaggatttcatataatcacatcaagtttcttctgaattacaattgtgtgactgaccgaaaagcttgcaaataatgcatgagctgaatatggaaagatgaccctaaaccagtagaggctaattaaattttactacatttcggcttcaccgtgatttcaaaacctgaaatttctacatttattaaatgggaaaaataacagatgtaggtgtgtgagaggaaactaataaaaataggagtttactcacctttccagtaagagcatgagcatgaaagatataataataataatagattgcattctataacctgccctagcccaacaaaaaattacatttgtttgagattaccaacctgataaaaggatgataccatgtttgttctttggagggacaagtgtgagtgcaaaaccacatttctttatatttttttatagaacactaaggttaggaacataaccttctctcttcaggtcatcgtttagcaatctaaatattaggttaatctcagttgaactatcatttaagagatctccagcgtgaaactcatgaagttgattctcaaactcaatccagctacaaccaggtgtcttactgacacccttctctctcattaatactctcatctttgctgactcttcccacttatttaattttgcatatatctttgatgagataacgtaatttccagagtttgatggctccaactccagaagaagctgagttaccctctcagagatatctacgttattgcatttctgacaagcagcaagtaatgcccccaataaaacttcatctggcttttcagtcattttttcaatgaagttccaagcttcttgtacaagtccagcacgtgcaagaagatcaaccatgcaagaataatgctctatttttggggtcaaaccatatgatgtactcatcatatcaaaccatcgacgaccttcatcaaccaa

SEQ ID NO: 185100 - DNA, 865 bp, Cannabis indica
gtatccgactcttccctttcgcaatgccaggtcccacaagtacatccaatccacttctgttctatggttagcaataagcaaaacacgctcatttgcaggaagagtttctccagaaaagatgactttagtcttgtttatcttttcaaaaaggaaaggccacaaagctagccaagcaccaaagaagaaggatgttacttttctgctataatatatgcttacaaatcggatcataacagcacccacaaagccacaatacactaacatcatgaatgctgttaaaataagaacaagtaaacaaagcagacccctaaccattctaagaagagttaaactggaacgaccagttccatcatttgtgggcctttgaaactccatttgcactaaaccagtaaaatctcaatcacaaatacaggtcataggtagctatactgcattttcgtatctcaatgacttgataattattagaggatgataagacttgaccaaaatgttcacacacacaagctcgtctccacacaaatggaacagagttgaatttgagataactgagactacgagatctaatggaaactacaatgaataggcacaatcaaatgctaggaaaatatggaaagggtatgcaactgcatataacaacaaatgtatctcacaaagtcatcataatcataaatgctggagtcctgatgatgcttcagtgttcctatcctatatcctgcatgaagaattttataatgagattcaacaatgtcatttgtgatgaaacatgaatgcaaaaaacgaaatcaatacacatttaaaaagtgaaacagaaaaaagaatcatggagcaaaatactagagaatctaatgatcagaacccaagatgc

SEQ ID NO: 185101 - DNA, 5370 bp, Cannabis indica
ttgtggcaagcatttttaatctagttatctgaaatagacgtgattgattgaaaagaggtaagtgtgtaatgtttcgtgccaattttgtgtgctcatattattactcaaattaaaatgcaaaaatcttagttaggaaaacttttgtttttgaagttttcagcaatatgtgttgatattctaccaactaaagtttgattttatgttggaaataattcagctgaaactagagattatggctttgcttggtgcagggaatttatttgcttactaaagccttaaacataaggcatttcttctttctttgtaaatctcttgcttaactaccaatgtcaagtatctgtgttttagcttctcatataccatgcagaagcatatcttctctgtttttgatcctcgtttgacatccaagcctattttctctcattttttatagatttattttctaatctatttctcctgttataagtttgaagagaaaaatagttgggagtccaatttcatctcttattttcttatgatgttgagattttgaagagcaggttaaggttgtgaagtgcactgtcaaaagtatagcagtggatatctctttcaatcaagtagctggcctctgcactctctgcttcatggagcaggtctggaatcctaaaatatagaagctttgtcttttgttttctttgttacgtacggtcactatgtagctctgaatattggtgggtggtataagaattcttataagcaatatatgatcggtcattgtttagattatttgcaattatttactctttgatattgctactttttattcttaaaagatttcctgcttcacttgagttaattctgtaaattatttaattctcttattgtatttgtgagcattgctccagcttacttcaagttttcttgttcttaagcttagcatgattcatcagaatttatttgcttggcccctcatcattttctcattttatcacatttgttctttcttcttttctatgtaaatatctgactttctggagcttccattctcaggttgatcaacttatggggaaggaccatctatttaaacgcagtataatcttggccaaagcatggctctattacgagagccgaatcctcggtgcacatcatggtttgatttcaacctatgcactggaaacgatggtcctgtatattatcaatctctttcatgcatcactacgtggtcctttagaggtattgacttttgtgcttatctttgcgtctttgttattcggaggtgcaagtatataaaacactacactatgatatttgtgtaaccaggtactatatagatttttggagtactatagcacatttgattgggataatttctgtgtcacaataaacgggcctattgcattgtcttcccttgctgaaattgcgagtaagttatataacttcatttagatgctatttaatccgtccattgtttataatggatgatttaattgcacctgttgcagctgagagaacagaaggcggcgatgataaattacttcttggtaaggagtttctgaggaattgcagggatatgttctcaattccaatgagggcaagtgaagctgaagtgaatgaattcccaattaagcatctcaacattttagatcctctaaatgacaacaacaatctaggtcgtagtgttagtaaaggtatctgattagtagttttacttgatgaaagtttctctttatgtttaatactatttaatggcttgtgcatggaactagtaatttttagctattgttagaacaagagaagtgaccatgctggcttcctaatttctatgaaccaatgctgatatctaaaacggttgaaatgaaaatagccccacttactagcaaaccatatttgattattttggatccaaaatggcatcttttagcatgtttctatgaagtgacctctcaaaaactgtaacacattcattcttttgttgtctgattctagacgtttctgccagtttacaaaatttgggctcttatgctaatgctacaagtctgtaggtcattaaaagaggtaaaaagaacaggacattgcaatttctaaacgacaggaaaagctacaaaatattgttttcttctagaagcctgtgttttttagacattatttgtgttgttttactaattaatttgataatgatgagctaccagtctaaaatttcatgtaggcaatttccatcgaattatatgtgcgctttcacatggaactcgaaagcttggagagatactcatgctaccaggagtaggcctgggtgtaggacttgaagagttctttacgaacactttggacagaaatggaaggggagaaaggccagatatccaagctccagttcctgcattcggtactggaagatgtgaactttatgaactcagtggagactatgagagttactatggtggtctacagtatacacagtggtaccatgattatttcataactatttctatgcagtcaaatcaaaccctttcttatgtgtgggatgagagcaccctgtcctggacagtgcagccgaaccagaatggatttcaaagactgggtacggaattatatgtcccaagcatgccgctttatcatcctaatttgtcactactacctgctgcaacttttcatccttctataatggggaaatcaagaggaacaggaacatacattcctgacatggtaaatttttcatagtttgtattcgagcccttctattctagcatgaaatgtctgaataagcaacttaccattattgtttggatattgcagactcatcaactttacaaagatatttataagaaagagtggaaaaggactacagaacctacaaaacatagtcttcctctgaaatcagcccaaaagactaatgaggacaacaagccctccaaaaaggataagggtaaaagtagcagcccacttgatctctcgcttgatgaattcccattcctttctggcacctcgaacaccacacaatcagaaacccctcagcctgttgagctcgccgtgaattcttctccaacatttagaaacgtcgagtttgggcttcaacgcactcaccgtcaccatcagaaatgcattcccaattagcatgcaaacagacagattcagttatttcgtgctcattcaactctacaccaaatgctcctgtcctggaagttgagaagcaacaagagttgcagagtgatgaagtggcgtaagttgtttggatgccatgaaactgtagattgtgttggttattcaactcacccatttgatttgttctcttattgtgtgtttgtctggtttccatggcaggaatcctgtacaaccttacgagctggaagctgaaaaagatttcccgcctctgacatgttgtagtatcacctcaaagaagggaaatgcaaatagaacagaagttgcagggcatggaaaagataattggctcgactgaagctaatagtccagccaaaaattgaggctaacatgagaagagaacaatttattgttaatttatctttgtttggttctttcttttcttctcgctaaaccattaattagctcttttcaaaagacaaaaattacattatgagagcctgggtgggacgactaactcttctttgatatgataggttcaattttacctttaaatccattgatagtttaatggtttcattgatagttaaatgaaatttaaagatgacataacataaaataaaaattatatggggattagtctaaaagtagtctaactaactatagagtgaaggagttctctaggagcttttcttcataggaagattatcgaagtatactgctagtaactttggacacaaacaactgttttctacaacttcttcatcttacattgcctccttcaaaatggcagacaacagcctaagtcacctgtttgaagaaaccgttcaagtcacaatagacacaatagaggatctaatataggctggatccagaagaaatagatacccaggaaccactggggaaagttctgttgggtgaacttatatgtaaaggcaaacttagtagaacaaccatcgcaggtacgttaaagaaagcttggtcctcttttaagaggtagagttggaaggaagatgatgatggtattttgcattttcacatttgcaacgaaagaggacgcctggaatgtcctccatcgacatccgtgaattgtttgcggggctctactggtgatcatgccttggccgtcttggcttacgcctactgaagtgaagttcgatagatcaccattttgggttaggctcagtggtatactccctttttactggaacaaaacaaatttggaagagcttgcagcaaggtttctccaaattaaaagctaccaagatacattgattttgagcgtggttcttttggcatgggaacagtcttgtttcgagccaccatcgatatgacaagcccctgttctcaggtttctttatgaagagagaagccatcaaggatctttggatacaatacaaatatgaaaagctcccaaaattatgcctaaaatgtggtatcatctcacatgatcaaaagttctgttttaaaccacctacggtcattaaagatcaaactggagctttctttcccatgtttggcccttggatgaagcatgaggagactgccaaatgacctttttcccctgatcttcctaaatggtttcaggcttggatcatccaaaagaggcttactgtggatcacacctttaaacaacaatggaaaattcgtaattcgattaaggtggctgacgattgggaagctagggaatctcggagacaactgccagggaagaggtgaatggttgaataggtggtggaagatttgccggccacaaaagaggagaaagtgtgtcgttttccgatggtgaccttgaccttaccaggcgtggaggacatttgcccgtttgaggatactgctactctggtaattcgaaaggcccctgcgtgcaatctacttatggaaccaatgtttgatcaacaagaaagagatgcggaccctagcatgcaacagactcaaggcaaagaagtaggggttgggtctagttcccaaactgatacaagtccatctgatcgccatcaggaccatgtgcagatgccgcagaccaccatgaggaagaacagtcatattgttgcctctttcgtgtcaagctcctcttaccatggttcagaggggtatgagagagtcctccctaaaacttgtcagagaggtccctgctaaacccgtcatttagatgaaaaaatgccataaacctttgctccaaaataatcaaatcgggaacaagagaataaactgaaggttcctaaacatgtcatccagaccatagagctgtttagtacacatgactgtattggattggactggactggacaaaattag

SEQ ID NO: 185102 - DNA, 2509 bp, Cannabis indica
tcttgtttagttatattgtttttattctttttttctctctctgtttttttttttttaatgatcatcgtgtgtgaattctactaaagccatgcatattttgtctacgtgttaggtgacctgccgaccctaattaccttgagaaggtcctctatataaacctcacttagtcctccgattaattcatcagctgatcatcacaaaataatatttgctagctagttaatacaccacctatcttaactaactagtatactataataacatggcttcttcttctttatttatgaccctatggagtttgggtctcctcatgctcgtcatggggaatgccaatgctcaactttcaactaatttttactcaaaaacttgcccaaaactcttgcccacagtcaaatccaaggtgcactccgctatttccaaagagagccgaatgggtgcctctctcctccgcttgttcttccacgattgctttgtcaatgtacgtaatatgactatatagtacttctctctagctactagttcttctaattttataatacttagcttgtcctaagttgtcaaaaatcccaagctcatcacttaggctagtcgtacgtaagtctaaataagtaataaggatatgtatcgctaataatattttatatatttatcatctacttaatagacatatcttaatccttgcaaagaaaaagaaaaatagacatgttttaattaattttctagctatgtttgctatatgtgcaatttacaatatcatatgcgccctgatagtactatttaatatgtaataatattaatatttagagcgcataacacgattaactaacaagtgtacaatttttgtgtatctctaactttgttcatgtgataattctaaatttctttttaatcaccatatgatattagcggaaaaacacgtaactaggtagtgttttatacacatatcattgctacttatatatttatagaatattgatattaggcatgagtatgttatctagctaggatgacctattcaattaaaagtatatgtaaaacttaattttaacataaccaatatcgacatgaaatttttaaattggtgttatatattgttgggccattttacaatctcctctcatatttatattgaacacgtttctttctgaggaaagttagataaataaataaaggtgcttttcttgtgggtatatggacatgtctcaaagtaaatggaccgacaaaatgtaaatagtgacatatatataatatcgtctgatgacaatattgttttatattatatataatcaacgtcgttttctgttaattaaaactaattgatcgatctctgatatagggatgtgatggatcagtgcttctggatgacacatctaacttcgtgggtgagaaaactgctaatgctaatcgaaactcagctcgaggtttcgatgtcgttgacgatatcaagtctgccgtggagagtgtgtgtcctggtgtcgtttcatgtgctgacatattggctattactgcaagagactctgttaccattgtgagttcattttattacttaattaattattatttcaagtaataacacaatatttctttattatatacataattaattaatatgtttcaaaatgttgctgatccagcttgggggtccaaattgggatgtaaaattgggaagaagggatgccagaactactagcaaagctgccgcaaacaatggtattcctcagccaagctctaacttaaacaggctcagctctagattcagtgctcttggcctctccaacactgacttggttgctctatcaggttacctcttatccctttcttctttccttaaagataaacgtccccacattgatgaaaaaaaaatgagacattaataacacagacccattgtttacttacttcatatatattattgttagtaaaaggaaatattggaattattgaagtgtcttttttcttccttcatgagtacgtatcaaatgaatatgtatttatcataactaattgaaatggtaaaatgatatgaaaattacaaacaaacaggagctcatacaatcggacaagctagatgcacatcgttcagggcccacatatacaacgatagcaacattgacagttcgtttgcccaaacaaggaaatccaagtgtcctaagtcgagtgggtcaggagataacaatttggcaccacttgatatccaaagccccacagcttttgacaacggttacttcaaaaaccttatccagaagaagggactactccactccgaccaagaactattcaacggtggatcaactgattccactgtcaagtcttacagcaacgcccagaacactttcttttctgactttgcctctgccatggtcaagatgggagatatcagccctctcactggttccaagggagagattagaaagaattgcagaagagccaattaataattacaaaattaattgatatatatatatgagcttataattgatggcatgtgtgctctatattttgtgtgtgt

SEQ ID NO: 185103 - DNA, 5884 bp, Cannabis indica
ctatttcaagatttaactatggtttgtttcttgaagaatccattcccagaacaaagctcgcagatgagttaagacaacagatcaccttctacgagcctttcaaggaagagttgagggtggaggaactagtgaccattaaattgttgcaccaatatagtctcataaccacattccaatgcattaacagagtcaatggtatgggctaacctcaacccccagtcaccttaaagagaaaattgtcttagaactgttggttgcgataaccaaagcggccaaatatgaggaactccttgtcgcttcctggaatagtcacaatcttgaacccctcacagaagaagaggaaatcaaagctaggttccgtgtagcataccagatacgaacacatctggaaagagtactttgggaagaggtaatcagcccttttgcgtaatttgtacccctacctatctcaaacactgatagactaagggggttttgaccactctttcctaagcctagatcctcgtagatatctaatgaagcattacattaatagggtaggccaattagttaggaactccaacaaccaagaattccccccaaacatcgttaaagtggtcattgccttactatgtttttccagacttcaaggaatatgacagcttcattgaccaggaagaagtcactttatttacaagagaggaatcatataataacacgttctatggttgcactcccatgatatcttttacttgaagttgtgtcatttgcgtcgttactttctacttttttgactaatttgtttgttgtggtgtttcagtttttccagatacgctcgaatcaaagatgcttagcgatctgatgaacatgatcaaggaggttaatgttgtggctgatagcaaggggaaataaaataaatctcaaactaaaaaatctagccaagtgttggaccctctaacacccccactcaaaattagggattccaccaggaccagattaacccctagagggggaagtagtggagtggctaagattctggctccacttaatgttgcttttgaaaatagggaacccatgatcccctcagacgaagaggaatccgtggaaggaatggtgttcttgatatttgacgcagcgttgaagcatgctgatactgctccccatcccagaagggaggaaaaagggccaagaactatgcttcctgagataccaaatctactagagagagaagtcttcctgctgaaaaccaataaacaacctcatcgagccaaccaccaatcaccaatgctaatgacaggtatctggtcctcgtgaccccaaactctttcaccaagattcaatccaaacaaatgcacaatcaatccaaaacactcccaccagcttcaggtagtcaagccatccctgcctcaacttcttttagccatctagccaaaccagcttagggtctttaaaaaaacttaccctacatcccacgttttccattgatatttcctatgaagcccactcatattggggtcgaggtcttggcataagagtgaagtgtagtccagttccagatggaacaatgtctgcagtaaaaagggctaaaattattgaaggtatctgcaactcggggtattcagctcctataacagatctcccaactgtgagcaagtaattggtcccttgcctagacaaggagtgaggacctttcagcaccaaagtagtcaaagacattgcagttaacctgatagagctgactaccaaaaaatgggcgattggcagtagttctgaccctgtgatcctagccaatgctttgagagaataagcagctggggtatttcctacttccacttcaattttctttttcttaatacaaatttccattcctatagctcattactttcgattggttctagatggatttcttcgcgaagtgaacctgtagggaggtgtaaacgatggcagtctaactatacttttccttagcggctcagaaggctctaaaactcaaggttgagggcattaagaaggaggttgagtagcactacaaggaggcagacagaacgactgacaaaaagtacttacaaaagtacaatgagtataagacgacctttacatctcaaacaaaagaaaaattcaagactcgcttcgaggagctagaggctaccaattctttccttactgcagaacatgacgaagccttgaaggcaaaaattgacatcaagaattaggcaatgaccaaaacccttcagctctagaaagaaactaatgtcatctaggggcatgaggctaaggttaaaactgctgaggggctgtggaaaattgcaaaagatcaagtcaccactctaaaaggtggcatcgaggagaaggccaaacgagtcaaggctcagtccaacaccaaaaaagggctacaagatctctcatttcagtagaaccgtgatgattccctgagggaggtctcctctctacacaaagagcgggatgccaagaggggaaagcattgagaagagtaagagtctcaccaccgagccttaaattattctatgaacctcgcccatgtcattctgttacctcgtctcaaaaaaaccatccccgaaatcttcagccacctagataaggatgctgaggaattttcaaaaagggttgaggtcctcaaccgcaacattgatgaataccttgagacttatgacgggattgcaaccactactaatgacagaactaaaatagttgctcaaggggtagaaaatgcacaggttggtgaaaaccaaactttggaaattatggacattccctccgaataggatgattctttgcctaaggatatctttcaagtgcctccttaagatcaaactgcccagttagacattccatctccgagccattcataactttccttctttatattatttttttaggaaaatttattttgctatttacggagctatttttataagcccgatccgcttggcacttcatttataatttacgagactatcaacccttctttattctacaaagagaatattatctacctggtctgcgaggcattgtaatagtttttagacttttatgctttattcattttcaatttctagcttcaattctcatgcattggcttgttagatcattttaagggttgttatcttaggtgttttcaagcttgtggttccaatggccactacttcaagccttagattttttctgatgcttaaaccttctactgatctaggaaatgtttaaaaaacacttgtttcctatttttaggtaggattgtcttggtctcagcccttcatggagtctacaaacctaagctggttaaatgtcccaccagcacaaattggcttttagactgttcccagacaatcacatggtcacggagtcttggtacttttcaaattctttgaatagctacttgtctatctgggatgctcgttgaatgctcagtcagggatggttttcttgcagaagaatgtgcctccgcgttccaagcgttccatgacttacttttgtgaaattgtgccttaggaaaaaattgttgaacacttgtagctgtcaggcgctattccttacgtaggacttgggctaaaattgtgataatgtccaagcgtattttcttatttgaacttcatccataaaagtctaatgccactaaggcttctcactaatctgggggcctgttttacacactatgaaccttagacaatatctttcgagcaagaaaaggctaaaaatacataggagttcaagggtggccttcacattttaaccaaattttaaaatttgagcaatgcgctgaaaaatttgagaagggattcaggtgagtctttcccttcttggtaattttagctaaaaacacatctaatttttagagtttacacttatcttaacctcaagaaggaattcaagcatatttttccttttcagagaatttggttgaatacgcatcttattttaactttgtttgtatgctataaaaacatgcataagcataagcaaagtaactaatcataacgcattgtacgttgttgggggcatacacagctaggcatagtaccccccaagtgagctaggaagtttagacatctccaacttcttggtcacttgtttaaaacatagcttgtgacttaaaaaatgtaaagcataaatttaaatgtaaattgctttcattatacccgaaggttgtacataaagaaggtgattacataaatatttacactaagcttaagggatttcatcaaggctttgtcacctctgcctattggtagtactgacgcgactgttctgcattccaggcatgaggaaccctctattcatccattctcttaagctgaaaagtttcttggcccactttcttaagtatttcataagggccttcctaattttggccaagtacctccactcccgattcctacaaagctaggagtactctaagacgagatctctaacattaaatgtctgaattttcacttaaaggttaaagtgccgagaaatctttccttggtacatcataagttggacttgtgacttttcccagagtttttctattaaatccaatgattcctggagcaaggaatggttctaggaaggatcggaagtttctcatcgatgagagaggaccgtggaattattgcttcacacccgtaagccattgcgtatggcgtgtgtcctgttgaagttctctctgtggtttgatagtcccaaagaactcataaaagttcttcgagccaatgagctttgtaggcttagagtttcttcttcaacatagtttttagaatcttgttcacggcttccacctgcctgttggcttgtggctgggctacatctaaaaactcttcacgattctctgctgggcatagtcgtcggtgaagtgctaactatcaaactatttcctgttatcttagacaatcttgtatggaagtccgtatcatcactgaatattcttaatgacaaagtccaaggccttcttggaggtaactgtgttcattacttctgcctcaagtcacttggtaaaatagccaatcgtaactatcgcgtatttgactcctcctttgcatgtggggagggatcccaccaggtctattccccaaaccgcaaaaggccacgagctactcatgagtgtgatttcagtgggtggtgcatacggaaccttagcataactctggcattgttcacacttccttacatattctatgaaatatttcatcattgtggggcaaaaatacccttgggaaaggattttcttagagagactgggcccaaaagtatggtctccacaaaagccaccatgaatctcatggatcactgtggcaatttccgttccagcgatgcacctttaatatggcattgacagtcctcgtcaataaagtttctcgtccataatcacataacggggagcctaataatgaacttccttggaagcggccttgtcccttgaaagctctcccaaattcaagaagttgtaattgggcaccatccaagaatgagagttgtcaactatggcatttaatccttgatctcaatgcttggtttttcgaaatagaaaattgggactatttcgtgttgaatgatctcaagattcgttgcaacttcaactagcatgtcaacgaatgaattttgttctcttggaacttgacagacgttgtaacttttgaatccttgaaaatattcttaggacatcatgatgtatgtagccatttttcacccttcgtctagtattcactagaaatttgattcaccaatagctatgaatcaatgtatacttcaacctattaggctcccacttccttagccaattttagacctgctatcatagcttcatgttctgcttttttgttggaggcgcaaaatccaaaatgtaaagcactctggagtttgtgcccttgcgaagaaataaaaatgaccctagctccagctccctttttgt

SEQ ID NO: 185104 - DNA, 2748 bp, Cannabis indica
tctctatggtacaaacaatacaagggtaaaattttaggacatggataataatcctttggagactactaaatctagagtgtcacagtagtaaaaggacctatacatcaaaagtatcgaaagagaaggtgtcttaactaggtacctttgtttgagttgagacagcctcttcccacccatatagtctcggaactacatcaattaggtacaggttccatatggtcgtcagggcggtgtggttcgggaatatctcctgctgctgctgctgcagctgcagcggctacaacaacagcctgtcggcgttgtctctcgcgaagatatagaacggtaatgagacagacgaaaagtgttagaatagttgcgtttccttcctctaagagcacattctctacccattcctccactttcggataggcttcgggtaatgaatcaataaagtgaacctacatgtaaaaaatgttggaattttagttacaattacacccaaaatgctttcaccaaataattacagtaaaattcagactttttattattattattattaggttaattacaatttttacttcaaactttgacatgtactaaattgtgctctttgaatgtttcaatccgttaaaatttcctcttaactattgatattgttggatttaaaaaattttgtttcattttccgttaggatgaaagtttaagggacaccatttagtacatttcaaaattcaagggataagatatggtagatatcaaaattcacagggcacgatttagtagatggacaatctttatggaagtaaaattgaacgaatcctcgaacccagcaatctcatactttgggaggaatttttaaccgtgtgaaaagttaagagaacatgatttagtacatgtgaaagttcggggagcaatggatatataacaaaagctacaaatccaaaacatatatttttaaaatgttccatttattagtgtttgtgtgtagatatttgcactaagatttaaaagcctttaaaattgattatttagcaaattccagcaatcccaagatttttcccaaattcccagtgagcagacactgaaaactctactaatgggaataatgacagtcatgctcaagtattattagtttctttgtataaatattctaaatggggttttatcaagtaagtactactggggaaggacacttaccaggaaactatcggcatagtttttacgtatccaaaggctcatgagtgccagtgtgacgggcaatttggcattacgatcaaccactagtgcttggtcatagtatctcttagccagatgaagatctagaggtagcccttgaccatgctcatacatgtaaccaagattaaacatggcttgtgcattagattgtgccttggcatgctggtaagcatcggctgcacgttcataatctctctcggtgccctaagaaaggaagtataaaaacatagaaagctttagttaaaatgagagggtaaaaaaaaaggatcaagcagctcgacttttataatatattttaaacgacatactcggccataataatatgcatcaccaatcagcaaagcagcatgctcgttgccctgttcagaagcttgccaccacagaaaatgtgcacgctggtgcctttctgcatcggtgcacaatccagactctcccatgcacaagctttgttctccgtatttatcgagaatccatgcggcattactttgtgctacctcataacctaggtcagccatccttgaatacaaaaataatgccttaccaacatcccctttcaagtatgcttccagcgcccatctagacaaggaactccatggtcctcgctctgccacaagtttatataatgcagttgcctgaaaacaattgaagttgttcatgaagcagtacccaattatcaataatgtgagtatgtttagtatatcttagttttacttatggaagtttttggggtttgagaccaaaccagtgttttttttacataatattgtaatgtttgtatatctctttttccaaagctctttcaaggagtggaacagaaaatttcagctgattgaatagaatataaattaagatcttcatatcataaaataaatggtatatgcatttacagagttctcaaacatgtatatggccactaaagattcaagcaccaagtacaatatagggtcaagaatataaattatatcatcttagtttaagtctagccaaccccaagatggtgtaccattcttaaatattttatagtgtgtgaagatattcattctagaagggacggcacgggacaatcaattgagatacatctcagttccatagcatcaaagcaaactatttttaaaagactaggcgacagaaaaatcttcatctatttatattatagctagaagctactatttcttctcgcttcgactttcaccttacttcgatgcatgctaaagaacacacttaataaagagtctgatgttaagcataccttggttcaaccataatttcacgaaacttatcatcgttctgtgacaaagtaaagagcactacactaactgtatacaagttcactgacctaacctactaagggtcctaagggatcaggtccacgaaacatgatagtcaaactaagaaatgaaccagttaagcgtgcaatataatgaaaataatatatcatttttattagaaaaaatatcagagaaatgtaggagcaagtaaaataaacaaacagggagatcagatagaaagattaaaaataataatgatgag

SEQ ID NO: 185105 - DNA, 3962 bp, Cannabis indica
taatttttttttgtgttttatagtgtatgatatccatgtagtgttcttcactaatattttggtatttcattcttttttcagagtgatagattgaagcaggttcaggattacctttgtactttaaattcactttgctcagttctgggaatggatttcaaacagacaattagtgaagtccatccagctttaggtgattctgaaggacctaagaatataagtaatactacaattgagctgctggctgctgctatacataatttacgaggggtgaaagtacagaggatgcagagggtaaattttgttttatatttctcgtttcctgcctgtattttttcctctttcagttttggtttatgttgttgaccctctatactggcagctacaagatctagcaacaactatgttggaactatggaatttaatggatacaccaatagaagagcaacagatgtttcaaaatgttacttgtaacatagctgcttcagaggatgaaataacggagctcaacgcactctcactggacttcatcaattatgtaatgatctatctgtataatctttggacgtgcattatttttccttttattttctaaatcataaagggaagtgacctttttattttatttatttcataggttgaggctgaagtgtctaggttagaagaattcaaagctagtaaaatgaaagagcttgttctcaaaaagaggtcagaattggaggagatttgtaggaagactcatatggtcctagagacagatagtgcactggaatgttccattgaagctattgagtctggtaaatacttttatttaatatcttgtcatagttccattaaattctttgctgctctttacttgttttcttatgccttcatatttgtattttttcaggagccgtggaccctgctttgatccttgagcaaattgagcttcaaatctctaaagttaaagaggaagcatttagcaggaaggatatacttgaaaaagttgagaaatggttggttgcttgtgatgaagaatgctggcttgaggagtataatagggtaggtgtttaagacattttgtcattttgattgttgtatccatattcataagccttttcaaatacattaatcgataaaacactttccttgggttaaagtgccattttgctattttatggtgtttttttaggatgaaaatcggtacaatgctggaagaggagctcatttaactctcaagcgcgccgagaaagctcgtactttggttaataaacttccaggtgagaactgtcttaccaaagtcagtatttttttcatttaggattatgttcggcatctaaaacttgttggaacatcttgatacaatttagcttccattttctttgtacctccatttattttatatcggtaaagcttaacattcagtcaacattcttgggttacattcagcaatggtcgatcaattggcttcaaaaacagtatcgtgggagagggagaaaggctctgagtttacatatgatggcgtaagtacatgtctcaaaattctgaaaatatataaatttatttattcattttaaattagcaagtcacttattaaaaaagagtcctctaaaacgtttatttgctgttgtttgtttactgtctcaaataattttaacaatgctttcttttcttttcttttaacattgtttagattcgacttctgtccatgcttgaagagtatactatattacggcaagagaaggagcaagaacgtcgtagacagcgggtatatttgacttgtttcttccacagtttttttcgtcagaaaaatgtttcgggattagtataacattcttcgttatatctactaattgatcaaaataagtgagctagcaatgctatttttaactagtgagttttataacttcttgtgcctaactacacaatatctctcttacaggaacataagaaacttcagggacagctgatagctgaacaagaggcactttatgggtcaaaaccaagtccttccaagccaagtgttaaaaagggtcctagaatgtcaactggaggtgcaagtaatagaagactctcccttggaggagcaatgattcaaactcctaaacctgatcactctgtcaaagcgactccacattcacgtccaggtagtcgaaagagtgatcgagtggttccaaacgagctgtttaataataagcatatggatgatagcttcacaggtttatcatcaaatggtaaatctcattatctgccaatgtttattatgatagcttcttaagcaagttgggcaaagctcttctactgttattttcttatttattatgttcgtgtgtttacgcaggtaccaaaggctttgatgctgcattaaatagaaaccattcttttggtgctcgtgaagtcgaatcgccaatgaagcggaaacctttctctccaatatcttcaacatcattaaaaaccaacataacaacaaatttatcagaagatcatttgagcatagcacatcatgacaacacagtacagaaaacacttcatgcaattaatatgccgttcactacaccttcaaagaattccactagtgttgcagatgaagagaataagactcctagggtgatgccaatgtcagtgccaagtaccccttcaacagtatcagtcccaatgcaaacggtaatgactccagcacattcattgattccttatgcttccaatgtaacagaagaaattcctgaagaaatcgagtactcttttgaggaaagaagagctggttttgtgcttcccaaatcacacattaagtccctcgtacaagtttgatatatttgggatctttgcgcttcagtgctattcttcatcttctgtttttttaggaaattttattttaagtcaattgcaattggcttgtttggtttctgtacagagtctaaaagcactgaacatggacttttaagtgtttgaagctgtttttgagcacactccctttctcactagttttctaaatgtttgttatgccttgttttttcatctttcaactatgagaaaacttcattgaaattgaaatgtgtaagttcaaacccgattctttcttttcaactatgactcgtgtgaagttggatatatatttcaaatgatcaacaagaaaatcgatagagtcgaataagattcgggttaaaaataatggctgtatatacagtcaagacaggaagattgcaaaatattccaagctctactctgggctgggaatctttgattatgtggataacaagtgtagcactttttgtgtaagcaagcttgtctattttgtcagataatggccaatccttccttacaaatactagctttgattctttttgttcttattttgtttgtgaaaaaaggtattgattgctgcttctttctttgactgtttccgcttttcatcactaataaaagtttcttcacaatagaaaataaaatgttgggttgcaaaatgtgaaagaaaaagatcggatggggaataacaaaattatctttgggttaaggtgacttccattgaatcaaagcaaaatgatctaaaattgtcaaacagtcccactgtccttagccctagaacaagtggtacttcctcttgagtctatagcaatatcttttaaaataaaaatacatacatatatttttccgagattctttttctgctctaatttgatgagttcacgaaagtggtttatttatatttttttgaacacgaaagagttttaatttcaattttttttgttttgtttggttatttttattttacagtggcattaacagtagatagcttaaacaatgggggcatttgtcattttaattaaattttaaatggtcaactttaatttaactgaaaagacaaagagcttgtcagtagttggaaaattggtatggctccaacgtttgctttacagctttgaattatgtattctttatatataactttaaataaagaaataacaatataaataataaaaaaaaaa

SEQ ID NO: 185106 - DNA, 4386 bp, Cannabis indica
ttattattagaaggataagaaaagaaagtcatgaaacttaattgtcttgtccactcctaagtcattaaaatcttaaacgaataatcaatataatatgatacaaaagtcatcttttgacttcaaatactcataatcaatagtctgaaacttaaaccctatcatagagaattgtgtttgagattatattctaaaacaaaaacgacacaagccctcgaatttcataatttgatacaacaacaagttttctttacaaacacaaaacaaactgacataaacataattttattgacactcaccagtcactcgacaccaccacaaaggcctggactggcatctcttactttatatcactatagtttcatttttatcaagagggatggttcgttttttctatagacaacttaatatatatatatatcacaaaacatcatgaaaataaaaaaaacagttactttgaggaaacttcagaagtacaactagcattgataggtaaatcggttggtgtgcataccagagccctttgctgtaaatgtctcaagctttgctccatgctaacttgcaccatctcggctagcatcttcttagcttttccagattgttcgtctccatcgatctgcgagattatgttgcacacgatattctctagagtgtctggttcgagttcagatctcgggtacggagagtcccttagtaacctcaaaagggtttgtgcttttgactgagatttcggtgttccttgtactgttagttcaagaagtcccgggattactccttctttcagaatcggttccctgtatttacaacggtcactttgacacattgtcagtaaggcaccgacagcgtgttcacggctctgaagagagccgttttcgagcacctcgataactgcaagaactccaccctcttcagatgttaaggcagatcttccctcgtcgaaactcaccaaagattctatcagagcgcagcatttttcagcaggctttgaagatttcttacagcttttaagcaaactaatgatggatgggaccggttttgattctagaatggtgctgaggttgttgggatatgtagagagattcgaaagtgccattacagcatcaaccttggcttgtgagctcccatgtttaagggtttcgacaagtagaggaatcgccccggaagcaccaataactggcttgttatttgcggaagcagataaagtaagcaaagaagcagctgcatactcctgtagattcgaattttcggaggttaagaaactgattattggttctaatgctccggcttcaacaatttttgtcttgttcctgtaaaaatcaaagatacgaaacagacacaatgtttaattctctccaataaacaaggaaaaaatactcagtacaaccatatgaatgttaagtgacaaataaatcaaagaaaaggtaagaatttgcaattgaatttcataaccatacggacaaccaaaatgccaatgctcaacaactacactgaacacatattttaaccgctgaaaaatttgggggcgcaatttagtatatatcaaaaatatgaaacattcaacttcaaccatacgaatgttaagtgacaaataaatcaaagaaaaactaaaagaaaaagtctgggaaagggtaagaatttgcaggtgaatctcataaccatatggacaacctaaatgccaatgctcaacaactacactaaacacatattttaccagtctgaaaagttcgggatacaatttaatacatatcaaatttcgttgggtaaaaatcttaataaacccatattttagaatcatttatagtcttgccaaagaaagaaagaatcatcagttaattcagtctcaaaagcttaataaagtgatttgtgttttagctaataagcttggattaaatgattccaaaactaaagaaagaaaaggataaaaaagaacatgctgaaagttacatagaagaactaaagaactgtcataaagatatattaagatatcttcacaaaacagaatcctttacttccaaaatacgattaaataaattaaaaagtgcaaaataagaaaaaggtgaacagatagagtaacttatcaaccaaagaacatattattagccttccaatcccacgaggcctcaaccataacatgtcccaattcaaattcaaataaattaataaaaaaactcttcaaattattaccaaaagaaaaaaacttgaaatataagcaaccaaccacatattgaagaccccttaattcataatactttttgtttccttaatccttaataggcttatcaacatatatacaatttgaattttttcttaacctaattttaaaatatgagtatgaggtgataattatttattaatttttaatgttttgtttaacaaaatagttagtaattatataagaaataataatttttagtacttagtatctcaaacaaatatatacaattgcctaattaccttcaattacactcaattctaattcctcctaaggtacaataaagctcattcgaatttcgttacaatttgtcttagaccaaaaacataattaaaataaaacagaaaataataaaacctgattaaacatgctttcttggcatccaatcacatcaaaaagaaagaaaaaaaaaaggccaattacctaatttaaaattacataaaactccattaaaaggaaataaataaagtaattaaagaactcattcacaaattccgagaaaatcttttataaacaagattattaatttaatttaatttaattttgaatcaagctaaaataataataacataagagagaagagagaatatcatacatttcgtcgcgaacggcgaggttgagtatggcgagaagagccgactcgttcaactcgggcgagtcacgaactcggagcatatttataagcggaaggacagaatcagaaagcaaccgacgacatcgctgagatgttttagtaagacgccgaatttctcgagcaccttggagcttcgattcaacttcgtctgactgaaccagaagcagagctcgtcgtacagaggaagaaggagaggttgtttgaggtttggaattagtgtcggtggaagctccagtagagtagtcggatgaagttgaagagcagaaggaagaagaagaaggagatgaggtgtaggaagactccatggaaggaagggaattgaggttgagattagtcacagagagagagagtttggagggtttggtttctctgtcctaactcctgtgatggagttttagagagagaaacagaaagagaaaatctgaggattataagagaagagagagagagacaaaatacaataaataaatattatgagaaaattctataatttactctaaattctattttggtattaaaataatttttagttaagatttttataattataattgtttaagatatttttataaaattttaaaaaaatatatatattaagagtgaaataaatcataagaggagagagagagacaaaatacaataaataaatattatagaaaaattctataattaacaatacactaatatacattttatatttattttggtatttaaaataattttttaattaaatttgttttcgagtcatgtaatttatagttatttaatatattttataaaattttaaaaaattgaaaaaatttaaaatttaatgagtattgcactcatgattattttatttatacgtgaaataaattatttaaacattgctttctgtattgtaattattttgaattttttaaaatttttgaatttttaaaatttttataaaatattttaaataattataatcaatatgaaaaaaatagactaaaaaattattttggatatcgagataggtagataatacattagtgcatctcttttataaagtatattatagacgcatctaatattatatatttttgggtgattctacaatgcacaatcttataaaatgtgcaccgatgcaactcctatctatttctgcattcgaaaaaaaaaaatagtttaatttttttaatagttgtgtacgttatagttatttaaaacattctataaaattttaagaaatccaaaatactttacaatatagaaagcagtgttcaaatagtctatttcatacgtgtgcaacagactatttaaactttatttttagtatgttaaatttctctgttggtctcaaaattttgtaagatattttaaataactataaaatacacaattattaaaaaaaaatagattaaaaaaagattagatgccaaaatagataagagtgtatcggtacatctcttttaaaaatgtatattgtagaatttttttatattttttttattagaataatttagatttttgtctccaaacttttcgtgcttctaattttactagggaaatttcatatttt

SEQ ID NO: 185107 - DNA, 5050 bp, Cannabis indica
acaaaaagaaaatttccatttaagtcagataagcatacagtattgtgagcttcagagccaccatattgttgtgcaagagcatcacccatgctttggtacatatccataagagctgcagcaattgtgctatcaggatctactttaagcatgtctgttaaacccattgcatgtagttgacgacctaaagctgcaagaccataggcatattgggcaacatttgttcgatccaagcaatcgatgcagtttgtgcgcagaaccccactttgaaaacatggtgcttcactataaaagttgtcatttctgttatgttcaccaaaatcagcttgtctgtcttgattgacagcagaactaagagtctcgttactgcttccaaaccttgcaagatccccagaactagctctcaggtctctcaaagaagcatccctgaaaataaaagtgtaacaaaaaatgactcgataaaccttcaatgaagaaacacgaaagtaaataaaaatggttgtccaagcctactatttcctgcctcagcataagtagcgggtaccttgtgatggcacatttacaggctttatgttaaattacttaagtttcaaagaactaatggtatacacagcagtagtgtatctcaaaaaaacagagagaaattagaggaaaatagggagaaactttattgaaataaggaaagtgagtccatgatattaaagagacctggtttctctccagagccaaggctcaattacaacaaatctgacatgcccagctctaaacacgtgtaacggattggtggtatatcaataatgtaaagatgctatttcaaaataatcttatatgttagtcaaaaaaaaaaaaatgcatacctcgcagtacttgttcgacttaattgattgccccttcgcttaataatgctaggtttgccgctatagtagaaacctgttaaatcaagcgcttgtcttgccacattacccaaaactgctaatacattggcagacttgctacaatgacaacacagacacaaataattgatcagaattgtttatgaacataaaagatcacatactatttattgtacatactaagaaagaacaattctctcattagataaaaatgaggcttacctctttgcaaacttgtggaagtcccagtgaataaatctaacatggttgtcttgtgaaagaatttggttcagatatccaaccgcatttgcatactcacgcctcaacatcatttctcgaggccttttctcaacagtctacattttaaaaattatatgaattaaatcagtaagaccagaaagcataccataacaagcacacacaaagaagcgagaacaaaatgtacaatcacaacaacataaactaaatggtaatatcctgggaaataacaaatagtaatcaatattaataggtgaagaaatatgaaaaaaaaaaaaaagactaatgctagatatgcaaagaaattgaaggttgagtttgtttaatccaatagcctatcagctgattgtttacaattttgaaactctgtttatctccaaaagttcaaagatgaaatcacaacagaaatcagaaaatttgtaaataagaatcaaaagtaaaccttgatcaaattaagtacgataattggatttccgtatctttcaacgaggtcttcaaaatgcagcttggttgcttgatatgtgggatcatatctttgtactgcagtcaacaggaaaacaacagaagagctgaaatctgaaatctgaaatcttaaattaagctagaaaaatgttcaaaaaggctttattgaggatcacctcaaagtgaagcttccaaaagaaagcctcaaggcttacatacgccttagggaagaaaagggaggctaacacctaactgggaggcacccctgcctcaaaggctaaccccaaccttcttattcttattttgatcttgtttgaagtgttgtgcccaacaaaactagcttaagaacgattacatattaagtttggtgcaataaaagtgacttttataagtactggcccagacaatagtgcccagaatagtaactaaattggagcattagttaataactaccacatgaaatcacttagaggctgctagttcaaagatttaattgaaagtttttttttatctttcccataatttttactgttatgatttgttttaatactttattagttttgattatgattatttattgttcattgttttagaatgtattagttttgattattagtgtttagaagtttacaatttaaaaacagattttaataggcttaggcatcaaaaccccttgaggcttaaaaaggattttttaaaagcattatgctgagttacagtacaaacatcaaaaagcagtgtccttacatataatatcaggttttgggaattttgagacttcttgagaccaaaaaagcggaattgaaccacgcatctgtacgaccgaactcatctttcccttacatgacccagcttcctcatcaagaacaatctgctctgtttcaacatcatttgcaacccttccccgatcgttcactccccttttcaagtaactggagtccagggaaacatagcaatgagaaaagtacaaataaactagtagtgtagcacttcctacttaatgtgaaagttatacttatttagtactacatggtaagtttggtattcaaacatcaaattttttagagtatgtgaaataccaggctctcaccactaatttaatatcacttatcaaacgttgttgtgataaaaaactccagaggcacaaaagcttcatcaaataaacaataggaaggaccaattttaaaaggaaaacttgagcttctatgctttctagtatgccatattgagaaaaaataaaatgccaaccttattaattaatgaaaaaatagggttgttttctaaatgacaaaattgcccctcccattatcagccccattcctcactcaaaccatccctcaagctcacactctatctaccacaatgacaccaccaccacctccctgaggcgactgaacaccacttcatcactgcaatgctgccacctcctcccatcaccattgaagcaccccatggaaggatcactctaattttactttcttttttaattaattaaaataaactctaaaacataaacctccaagaatattcacttaaaacactaaataaggtttcaaacacatatatgtatgctttataagttttacttccaactttatttccaaatcttaacttttgaaaatttgtaaaattttaaacaaaataatgcttttgcatgctccaccagtaatgtttttgcgatgctcccattttattagcttttcatgggagcatcgcaaaaccatcattggagatcatcataaaagcaccgttagttcaaaattctgcaaatattcagaggtttggattttaaaaaatatgccagcacaactaaccacacaaagatgtgtttgaagcctttaaattagtgttgtaagtttaagttttggatgtgatttcgattagttaaaacataaaggggaaaaaatataaaaaaaaaatagattggtgcttccatagggtgctttcacaaggtggttcagtggtggtgggaggtggcagcgttaatagcaaagacgatgttaatggcaatggaaacattgaagtggtgcgctgccgctataggaagatggtagtggtaccgtcattcaacataatgaccctgaaaacttgaacaaccgttaatagcacacgcaatgacccatcatcgtcaacaagaaaattgtgtcgtctgcaaattgcaagtggctgacttgaatcttatctcttatctcttctcatcctacgaaatacatccaccaccagtgtaaataaaaacaatgaaaaagggtcaccttgtcgtagtcctctgtaaccattgaatttgcctcaaagtgtgccattggagaaaaaggaaaatgaagccaaggaaagacagcctttgatcacttcctctaagtctctgcgaagcccttcttgagcattacaaaatctcgaaagtcccattccacccgatccataagcattctcaaagccaattttgaatatcatgcctcttttgtttttgcttctacacttttttgccgcctcgttagccaccaatatggcgtctaaaatttgtcctccttctcaaaagccctttgtgtttccgaacagtatcagccagcacccctctcaatctcgtagccaactttagaaatgatcttgtatagactcgtgattagactattaggcctatagtctttaattttacaatcgttgagctttttaggaataaggcatgtaaatgtctcattgatacttccttgaattaaatcttctcttgcaaaggccttgaacacctccaataggtcacccttaatgacctccaagtttgattgaagcactgccattataaattcgtctagagctttactaccattacaattgaatacggactcttaaatttcatcatcctcaaaagatctttccaaatgtctggctaggtattcagggatccttttccgctctataccctcaaatccacacacgtatcttcttagaactatatcgactcttgtaaaaatagatgatcacaccttctatatcttcctctctctctaggactgttccatcctcttgttcgataatggatgtggcatgtggtattccttgctttcctagcactcaacaaactgtgaaatattttggaattagcatcaacttctctagcccatttgcatttagattttagccacacacctctttctttttcgaacattaacttttgcccttcctttttaacctccatgcgctcttcttgtagtgtttaaatccaagaggcactacctttcacactatcgattaccatcagccttttctctatagatttcttcttccactctttgttcccaaactcttatttcttcttttgctctatagtttactcataaatttagcccataaccaaccagccccatccgccttcctccaccattctccaaagttcgcatgaaaggatttatgttccaactattgattgtcaaatcgagaaagacaaggac

SEQ ID NO: 185108 - DNA, 2845 bp, Cannabis indica
catccctgacctggttagaagtgaagacacccgaaaaggcaggcatatgagatcccccttgtgcttcagccaacaactcttcatccccatcagctgtatcattttctgttccagctatagcatcaagaccatccatggaatcactaagatactgaggaaaaactggtagaatcctcaccattccagacccagtacgcccaccttgactttgcaaatttcccattacagatttcttaatcaagaggcaaccaaaaccagttgggtcagctccaaataccctgtaaaatgatgttataataaaatctggcctaaagagagacagtccaagagaatccatgtccttgggacccaatgatccagcatcaagcaacacatgccaattgttctgctgagcaagtgccatccactggtacgagtacttggccccggtcactctagactggacagggaatacgaagagtccagtagcagaatccttcttccttcttctcttgtttgttatctgctttctcagctccctagagcagagtttcagggtaggccatttgaaccaagcactgtgaaccttagcacctttttctttggcactctgagccatccaattaacagactggctgtcgtgatcaaacatggttaacaaattcttatttgtctgaaaagggtaagaatcagcaagcaatttaaaggctgatcctctactaacagtgaaaacaaggccatattcgttctcagggatattcaagtaatccataatcctactcttaacatcatattcaacagtacctttctcagcaccaccatatagagcatggttactcaaatttgcagttatctcagataaagtaaaagctgatgactcccaatactgttgagtctgtaggtaagaaaatagcccaaatccgcagtaatcaagacataccttagcaaaagattcgacaagatggccatactcatctgatcttaggtaatcaatcttctcagaagattgaaactttgggtacattgtgaggaatttggaaaaggcatgatgaaggtcaggaattgagtcttgagaggaaaagattctgtcagctgcaagagcagtagcacgaaggaactccttctgggcatggagtctagcaagagacctggacctcccaaagctgttgtcttgatttggtgtctccgaatcgacgatgtcttgggatttgaccagagacccatcttcagatgcttcctcaagtgcctccctcagcttgttctcttgcaattgcctgagaattgaaggcttacgcttggcgtcccctgtcaaaccagaaccggctctcctccttgtcttcttcttctccattattagagaagcacagtgagatataggcttccataatgaaagatgcatgaatcccaatttcccacttgatttttttctttctttaatctcaaccagttctgactgatagcaaaaggcaaagtacgatttcaaactggagaagctaaaacattcctcccaagtaaagcagaagggaaaatgaaagaaagcaaaaggagtttcttaacaatcaaacttcaaagttcaaacacttgaatttgaaaatcgaatccagagagctttagagatttagtcaccgcagcaaaactttagctgagctgcatttactttactacctaaaaaaaaaaagagaaagagagaaacaagattcttccattaaaacttttgtgggatcaagagtctcggtcttaaagataagtggggagagaaaaaggaaaaggaaaaattaaagaacataggcaaagcaaaggaaagcacgaacctttaaatgtgatcaaacagacagagaagaaaaatcccaactttagcattctccaatctccattatgattgtggcttcaattcgaatttaacaacaacaacaacaacccttttgaaaattcattaaaataaacaaaacccatgtttcaaccccaccaaaaatatacttccaaagacaacataactaaaataattcccccaaaacaggaatatatcatgtactcagcatttgcattttacccaaagacaaaaacaaaaagctaccattaacagttcagaaaactacagggaagaacaaaatcatagggatataaatatataaaaactcacgagagaggaaacagcaaaaaatcagctccaaccactatactataatatgagttgagtatacaccaccaaccactctttttttgcctatgttgtttctctctctctctctctgaggctgaggctgagctaatagtagtagaagaagtagtaatgatataggggtataataaaggcaaatccttcagcatttactatggcagtcaatacaaacatgtctgcattaaatgcttctgttttctctcacttcacaccattattacacacacaccaccaccccttcttcttttctctactcttctttcttttccttttagtcccaaaattctcccttttttccctcaaaggcccccacacagagccccgcttcttttgtaaaattcaaattcaaataaaaccattaattaaaataaaaaaaattagagcagaagacaaattaatatatggttctttattttcttgccattttcttctatactttaaaatttgatgatgcaaaattgtttttgaacaaaaaaaaaaaagtttgggcttgggcttgggctgctttgacttacccatagcctatggaaaatttacacagtttactgtgtttttccattttctttcttttatactgttacactcccaaaataacttttgtacttgtttttttttttttcggtctgccaacaattttatgttattgttttgttttttttttagattgattgggacatgggctcaatt

SEQ ID NO: 185109 - DNA, 4824 bp, Cannabis indica
gtgtaaataaaatttccctagataaatggggaaaaagaaaaagagtaagagaacgaacacgcgcttttagtgcgtgaagtaaacgcgtctcaacttcaagttccttccttcaaagatgaacaaaaactagcagtagcagacaccgagtgagatagaaaggaaccgagttgactcacctcaccatattctcccattagatctatatttatatatatatataatatgttttctattcctcattaccctttttataattattattcaaatataaatactatatacgacaataatataactttgtagacaatccaaattcccatatcttcttcttcctttcatggtcgatcgttttctcaggtcccatttcatttttcttttaaaaaaaagtttaaacctttgtttttattgtcttttcaagtttatcacttttcaattgatttaactttatttttcttttgggttgtgtgtggttgtgatgcagtttcatattctgtgatcggatccactggatacctatcctcggtgttgaaaaaggactgattcgaaggatttcttgataggtaattgctgttcaagcttaattatcagtcttaattctccattttatgcttaaaaatctttagtcttctgtttgatgaaactgaatgggaattattgatttgtaagtttattatttgggttataattatttttctgtaatttggatttattttctgctgtttagttgctgagaaactagttgagaaatgtgtggataatgttgatttgggtatttaaaattagtattttttttataattaaatttggtgaaaagcttggagttggaacaaaatgttaaaagtgtttttatattggattcttgttccatcttacaaaatcatattcatacttaactatgaactatcaaccaccttagtaaattgctagattaattttcatatggagtataatgaagccttttcacatttggttctgaaattttctatttagctaattagaattgagatttgacaaatttaagcttaatggtttttaccagttgttgatttgtttttcctgttattttgaatttcagattaatgatctgaccaagttatctgatttgtaatgcaatcatttggtgatgacaataagaaaaatctgaagcgttcgagatccaactcttgcaacatgccagtcacagactccaacattgttgatgaatgtaatcttttccctgttgaagagattgtacagtacccattgcccggatatgttgccccaacttcaatcagttttagtcccgatgatagtattttaacttttttgtttagtcctgatcaaactttgagtaggaaagtttttgcttatgatctaaaaagttccaatcaagatttgtttttcagtccgcctgatggcgggcttgatgagaataatatttccccggaagagaagttgaggagagagaggttgagggagcggggattgggagtgacacgctacgaatgggtgaagacgagcttgaaaagaaaatcaattatggtgccattgccagcaggggtttgttcctaaattattcctctacaatttctttttcatatctttatattaatatatagagattagacaagtatagagcttttagaaattttcatgaattttgctaatatagcttttaaggatgctgtttttaatacctttattgcaagttgggatttagtgaaagtggaatatttgtactagaatctagtatttattcatgaagaaagtcatgcttttttcccaaagtatctatctcaaattcaaataagcttgtttattaggaaacacaaagttattctctattgtttattcttttttttttttggcttgaacatttctcatttcttataactctactctcattttgtaacacattgagttacttttactgtaataatttttcctgtgaaacagcaatactctatatgcatctcttactttagtgttatttacattgacagatatactttcaagatctttccagttcaacgccagagcttaaacttctgagcaccccttcttcgccaattattgacccacatctatcccctgatggttcaatgcttgcttatgttagagattgtgagctgcatgttctaaatttgctgtacaatgatacaaaacaactaacattcgatgctaaagaaagtggcgtggtaaggttttatacaagattatttggaatctggagtttcattcagctgtaatctatgtagaaagttcacttttagatttcggcttttgactgattaaactcaaattttctgttttttgtagactcatggacttgctgaatatatagctcaggtgagaatatcatttcaacaaccccgaaattccccctcataaagtgtactttctttgaatttatagggtcttgtaggtttgtcctgtctttgatggttatgacacattcttttgtttcagtaacaagaaactaatttcaaaatgcaagtgatgctttgtttcttttttctaggattcatgaaattgtttcagagatttcgaaatgtattcttattacaggaggagatggacaggaagaatggatactggtggtcactagacggcagatatattgcattcacagaagttgattcttctgagatacccctttttaggattatgcaccaaggtaaaagttctcttggttccgatgcacaggaagatcacgcgtatccatttgccggagcttcaaatgtcaaagttcgtcttggggttgtttcttctgttggaggtcctgttacttggatggatcttttatgcggaggaaaagatcaaccagaaaatgacgaagaatacttggcccgagtaaattggatgacgggaaatgtgttaaccgtgcaggttttgaacagattgcacaccaaactaaagatcctacagtttgatatcagaacaggcgaaagagaagttatgttggaagaagaacatcccacttggattaatttacatgactgtttcacctcgttggacagaacaagcacattttatggtggatttatctgggcaagtgaaagaacaggttttcgacatctttatcttcacgatacaaatggaaacctcttaggagctatcactgaaggagactggatggtggaacaaattgccggtgtcaatgaagcttcagggctagtgtactttaccggaacctatgatgggcccttagaatctaacctttattgtgctaaactcttcagagatgaaaacgaaccgttgcaggccccagtgagactaactcacagcaaggggaaacatgttgttgtccttgatcatcatatgaggaactttgtcgatattcacgactcactcgactctcctcctaaggttttactacgctccttgcatgatggtagcttaataatgtcactgtatgaacagtcattcacaattccaaggcataaaaatcttcaccttgagcctccagaaatagttcagttacaggctaatgatggatctccattatatggggctctatataagcctgacgaaacaaggtttggaccaccaccttacaaaactatgatcagcgtctatggtggaccgtgtgtacagcttgtttctgattcttggataaacacagtcgacatgagagcacagtatctgcgaaacaaaggggtattagtatggaaggtaattacttagcttattacaaagcatttaatatttaatttgttatgtttcaggtcataatcatagccatttacttgttttttacagttggacaacagaggaactgctagacgaggattgaagttcgaaggttctgttaagcacaagttcggtagcgttgatgctgatgatcaactaactggggcagagtggcttatcaaacaaggtctagcagaagcaggacagattggattatatggctggagctatggtggatatctttcagctatgactctagccaggtatcccgacgtcttccaatgtgctgttgcaggcgcaccggttacctcatgggatggatacgacacattctacaccgagaagtacatgggactgccatctgataatgcgatggcttacgagttaggatcggttatgcatcatgttaacaaactgaaaggtcgcctgctgattgttcacggtatgatagacgaaaatgttcattttaggcacactgctaggcttgtgaatgcgcttgtggcggccgggaagccttatgaacttctgatatttccagacgaacgccacatgcctcgagggcaaagagatcggatttatatggagaagagaatttgggactttatagagaaaaatctttgagagcttagttaacttttgtgtgaatatatgatgctgtttggaataagttggttattttccattttgtaataacaattaacaataacacatatccaggtaaattaccatatgttgtggaacaatattgttatactgtggaattcattctagaactgactctaattaacaataacacatatccacttttttttttccttctttcaagcacacaactttttttctttgatttgactaaggcttcttcattagaggcgtgagcaaataggtggatcaaaggcgaaattataaattttatgggtttttatactttttttgtgcaaaaatgaggttttttttttttttcatttttcgaaaaagttattttatggaaaaattaaaaaaaaaaaagttaagaagaatatgggaaaatcaagtaagggtaacctgatactcttatggtaatcagaggggtaaccagttaccataaaaggctaaccagacaaattgtatttgagatttttcttttaagttgatttttttttcttttttttt

SEQ ID NO: 185110 - DNA, 2961 bp, Cannabis indica
ccccctcaagttacactcatttggtttgagtgttaacttgaccctgagatagttgaattgtgggttgtgaagaggtttcgtaagaagatcagctatttggtatgttgagtcgacatatcgaacatccaactttttgtccaggaccctgtttcgaacaaaatgcacatcaatttcgatgtgttttgttcgagcatgataaacagggtttgatgtaagagagccagctcctaagttatcgcaccatagaatgggagttgttgcagtaggaatggagagttcattgagtattgattcgagccagaccatctcagacgcagcaagagccagagcacggtactcagactctgtgctggaccgagcgatgacactttgcttcttggagcaccagctgactagattgtttctgaggtacatacagtacccagtggttgattttctatcatcactgcacccagcccagtcggcatcggagtatccttgaagattgaagtgtgtaaaggcagtaaaggtgaggccgagattagtggtgccaaagagatatcgcagaatgcgtttgcatgcaccccagtgatcggttgtgggtgctttaaggtactgacttaatttgttgaccgcaaatgcaatgtcgggtcttgtcatcaaaagatattgaagtgcgccgatgacattgcgatactgagatggatctgcaagcggtgtgcctgaattgagactcagtttggcagtggtacacatgggagttggttgagaattggcccctagcatgttggttttgaccaatagatcttgaatatatttactccgattcaagtatattgcagtggaatctctcaggacctcaaaaccaagaaaataatgtacagaacccatggcttttaaggcaaacttttgatgaagggctgttatagagctttgaatttgttggtggctgtcccccatgattaaaatatcatctacgtacaccagaagcaacagtagctgaccattgttgttgataaagaataggcttgtatcggctacagaatttttgaaatcccattgcagaagtgtactctttagtgtgtcgaaccaggcccttggggcctgtcttaggccgtagatagcttttgtcaatttgcaaacatgattgggataatcttgatcaacaaatccttgtggttggtgcatgaatacatctttctttaactctccatttagaaatgcattaataatgtctatttgctgaatgtcccaccctttttgagctgcaagagagaatataattcgaatagtgcagggctttaccacgggactaaaagtctccaaaaaattgacacttggtgtttgttgaaacccccgagctacaagccgagccttatacctattgattgtattatctgcattatatttcactctaaacagccacttgttagttataatcttcatatcaggtgtaggtggaacaaggacccatgttttcttatttttaagagcataaaactcattattcatggccttgttccaatgtgggttggcaagagcctgttttacagatgttggttctaatgcagtgccgagttgagtgataaatgtcttgggtttgaacacccctgctttggatctagttaccatgctgtgggtattgatattttgaagtgggacaggttctggggggatagtattggaactggactgtgagtcttcaatagatgtaggatagggtaatggagactctgtatgctgactggtttgaggactgagagtggtagttggggactgtattgtttaaggaggtgaagtggactcagatgtagtagctgggttgtcgttgttttgtctggtttgaggacaagtgttaaactgtcttgaattaaaattgagcagggagaagttattgccatcgatgatgacaggtggggaagttgtgttggatttctgtgtaaacagctcacggtaaggaaattcggcctcattgaacttgacacttctagcaacatacacacgaccattgggatgtaaacacctatatcctttttgtgtgctattgtatcccaagaataagcatttgctagatcgaaaggcaactttgtgtgtgttgtatggtgttagaagtggaaagcaagagcaaccaaaaactttaagaaggttgtaatcaggtttatggttgtatagcttttcatagggggagacattgcctaaaatgggagttgggagcctattaattaaataggcagcagaggcatatgcttcccaccaaaagtgtaggggcatttgtgcttgtgctagaagagtgaggcccatatcaacaacatgtcgatgttttctttcaacacgaccttgttgttgatgagtatgagcacaagattgtctaacttggattcctaactcatgaaagtgtttgtacagaggggaaaatttcttaccgagatcagtttgcacactctttattttggtgtcaaacattctttcaacaagattttggaaatgtgtaaaaagaaccgtgacttcagctttagattgcataggatatatccaaacaaatcttgtgaaatcatctacacaactaagataatacttgtagccatctctagatgtgtaaaatgagggaccccaaatatctgtgtgtatgatttcaaagggagaaacagtcttattagcagtaggtttgaaagtaaattgatgcattttgcctaattggcatgcatcgcagaaatcaacttctttacatctgatttgaggacatacttgagctaaaacttgaacaagattgggcttggctgggtgtcccagcctacaatgccatgtagaacttattctatttttatcaaagacaggattagaagttgtagtacaattgaaaactgaggtattacaatgagcagttttatgtctaggctggtgtggttcttggacagctatggattgagtaggaacttcaagtttgtagagtccattactgagggaaccccttagaagaacttg

SEQ ID NO: 185111 - DNA, 3353 bp, Cannabis indica
agagagagagagatgactatgtcccttacccgaagatccatgcaaatctcatctctgctctcatcgcttttgctgctctgcgtttcgggtatagttctctttctctctaatttttttttgggaagcagatcgaggttcgttggtaaattttgatctaacatgaaattttgttgttgctgaaggtctagcgaccgcgattgatcccgcaatttcgaaatctgagagcaaatcaagctcggcagggatcaaggtactgattatattgctgggtttggtggcagtaattggattctgtgtcttgttattcaaattatggcaaaaaaagaagagggaagaacaacacgctcgtcttctcaagctgtttgaggatgacgatgagcttgaggttgaattaggtattcgcgattgatgtagctcattaccctaatacgctccgacgaatgattttgattcggaatcggattaggtgcgctttgggttaaatttaggtcatttacagaattattgtaattagtgatatacatcttttcttgtatactaatgtcatttgtgcttatagtagttgatccgtttgtggaattgttgaaaattttgtatggatgttttttttggggttttgccctaaatctttgatttgcattctgtattacattttggaataagattttatttgattttttttcgtatgtgttgttttgcatgcatgggcttatatatatatatatacttctgtataatcaattcttgtgcattcagttttatatgttggtccaatttgggatttaggatattgattgacaattatgccaattgttaagaatgctgtgtactcttttattatgtatattcggattgtctgtgaaaagttccttatcaatatttggagatgaattcttttatcttttattctttttatgtactgggtatgatataggatcagaagagaactagctaaatgtgtgtttaaaaattggtgatgtaggtattgtctatttgttattttaatagcattttggacatgttagcacacatgcatcagatcagggcaacttaacatctttgctctaaaacttgctatgctccaaactgtgggattggcaatgttggatctagataattccgtagtaacatctactgaagtaccataattgttgtttatgctctttcgtatctctttatgttttagtgttatgtcatattcagtaacttgctgttctttttagctttcttccatctaattagaatttttttctacacaatcatatttaaccagacattaatcacatgatatctatgttatatttgacttccacataactatttccttttgtattctactagtccgtttgtcttgtgcatcagtttatttttgtaaattatgaccaaaatagactactctttttccttaatggcctattgtatgtcagcataattttatgtcatatcatatcatacactattttattttccgtttgtttttcatggtcctttagctaggtagttttgttttgtctttagctctagcaaacatgcttacaatcccaaaagggaaaataaatccagtataggattataccgataggtcatggaggatttggcagaggtcaatttgttttagttcattgatgaattatcattgatttagattgttcaaaaagagagggagggagggaggaggggagatggatgtgctatgcttaagattctgtgataatataatgggagatgttgatggaaactatgatgtcaaatgtcaaagacttgtgataaccctcgtcctttggtggatgatagacttgtgattccatttgttaatcttttgctccttgctggtatacctttaaattcgtctttgtttgtctcatttgttgtttgattgttcaactatatcattttatttctaatattccttttggggaggtgaggtggattagtatatcttatctttgaaattgccacgatgaatggatcaaggcgttcttgaaagattcatgcccgatttgtactcttcttcacgatataatgagtttgtagttaaaaagatggccaagatctccgatctggtataacttccgttaaactttttattgctttccttctctgaagctgctgagcttccctcggagaatggtgatcaagacaagctgattgtgtatgatggtcaattactagacaaagtgaagattgctatccaaaattgatatttagaatttaatttagacctagtcctaagcatttttttccccctgaaatgtttaagctttcggaataaagggtataaatcttatttacctttttttggtattgtttggattgttgatgggttagggggtggtgatggtggttagattgctgctttctttatattctaatattgtataggagagagagatgtaatgtaagcacctcacgcacgcggtgttaggtacaccaagtgtgaaatcaaaacagcaacttgtttttagatttttcctagttatgcaagtttcctctgtggttcctttacgtataacaaaggtaatatccttatattagaattgggggtagtgattttaaactttaaaatacccaaaagggtaaagaataagtgaaacgaaaaaggaagactcctgagtagattatgagaggggagaggttgtagtgtagagtagtgtaggtaattatacaacacctaaagccttattcaactgtgcataaatgggttgttgttgttaatttatctgcttcctcctagtagggaaagtgaaaccatgatcatggaacaactcagcttgattatatttatatttatattggcctgttttttctcccccacaaaaggaaaagaatctatttatgttaattgcgattgagcatttatgagacccataccatgccatatgacgacttggtcgtcatttcccacatgataatacgcaggtgatatcagaagaacaacgcgtgctttcatatcccaagatgaatgaatgaatgaatgagagtcatttatttgttttttttaagtttattttcttctccaaactagtcaaagtcaaataatcatatgtagagagaaatatgattaaagtattttattttcttcatcacctcttttagttttgataatcctggggtatttaaaaaaaataataataacaaattcattagaatggtattctagcttgtatatcatcatatatcagcagtttcttttattgaatgtgctttttttttcctcagtcctctcaattccagctcctcatttgtggtttatctggaaatccactcatatcttttttttatgaatttagttgtattaatgttttgatcagttaatcggtgttattaacatgagaatgggatatttatatcgg

SEQ ID NO: 185112 - DNA, 8506 bp, Cannabis indica
gtgcgagttcgcaatgcctgagtcattgcaccatctccataaccacaaagaacacaaacctataaaataagaatgaaaataaagatactatcaccagtgagaatcacaaatattcactagaaaatcacaggtcaacagtgacaaaataataggaaagaaaacaaaagataaatatgaccaatgaggcagaggttaatactagagacaaaattttggtaacctatattatcttcttcctcgttcagtaagctctccaattcttccattacaaaataataataataataataataataataataataatactaagccaaacttctagttctttcaagtgcaattaatactttattttcaatctagaaaaaaaaatactttacttttcattaaaataaataaaaatagatggaaaacaactttttcgatatttctccttctgccaaaagatttcttttccttggttataaattttatgttccccacaaataatgatcctttcccatgaaaatatacaaaaaccaacaaaagctgtagaatagcatacatagcggaaaggaaactaatttcttattgggagaaacattaaaatatagagaaacaaaaggcaaaaggcgtgtgttaaatagtacacgaaacaagcaaatcaaatgtggactaaaataaatagtagactaagctctttcctcacaatattctttgaatttgtacggcatggtctgcaataccaattgcctttcggtaatctggaaacgccatagcaaccttgatgtacctgccatttgtaaaattttaacaacacataatcggcacaaaaagataagaaaaaacactcatgttgaacagactatctatgacacatactctgattaaacaacgactgcactccagtatattattaatttcatcttcgtttgagctaccacagacacagcaaaatgaagtgcatgtttgctcttgtagagatctgcaccaatatgttaaatgaaatactcacaatatgataccaaatttctccagttataatatagcataatatacggtaactaaatccacgagctctggaaattctactgcctgagacgtaacccataagattactttgaaagtaatttttttatcttacatttcagcaactttgcataatccatgcttcctatcttcatcattcttgcatgattcatgcttcatatcttcatcattccttgaaagttgatcctctataatttcagaaaacatttgagatgaagactcataactaatgaaggaaaaaacaaaaacataaaatgaaaaaccaagaactgtttaccatcagttgtcagatcgtgaatactgcgcttccgattttctctaggtctgagcttcatccgaacatggggaatgcaatctccttttgcattatctttctcggctctattatttgtctctatctccaacacagaaaactcttcagcgtacttcttatctctgttgtcgcatccattcttcattgtttccaagaaagtatcctctttagtgattttaccagagacagcagtttcatggcttctactttttttattggtctccaaaaggtgaaatggattacagttaacatcagtaccaccatttcctgttatcttcaactcttccatagaagtaaataaagctttttcattcttgggaagtttgcaccttttcgcacgtttaaggactctaccaagaggaacaatttttgccggtttcgacatttcttccaccaagtcactatcagatagttctccatacttcccacatacaattggtcttgatttccaccgacaaacatcttcctgcaaaatacaggatgaattcatctcacttgtgaacttgtatgtcttcactgttctagtctcattattgaaaatacattccctcttgaatttctctgcatttgatgcccctggaatttcacaattgctaggactttgttctgtgcaacaaacaactttccctctgctgtcattataaagattgcagagatctcttttacgaggaggtttcttcgtggaagaaattaaagaaagtttatggttagaattatgttgatcaaaacaggattcaaaagattttcctttgccattggacaagaaaagcatttttgtccttttggaggagtcagaagatgaaaattcagaagaattagctagtttggtacttttatactgtaacaaagatgaacggccgctcttcttcttcccctttttcaagcatctattaaccttattggaaagtgtctcctcgtttaaaagggttattccaggttcaaattgatttccacctttcctccatgtcatagtatctatgagcttgagctcatcaagaagacttctcgatggatgattgtttgaattattggaagaagcatactcattcaagttagtcttgccaatatcaccaagaaattctgggcttctttcacttccatgtgcatcatctgatgagcagcatttctcaatgccggacccttcatcattaagattactaatgcatccagtatttccagcatcagcactagaacaatccatgttgctaacgtcaactgacagctgagtgattgcaggggcataagacccagaagaaatattggaagtttcatgctctgtaaaggattcaattgcctgtgtggtaccaatattgtgtttagcagaagtatctccacacatggcattagtaatccctttgaccttgcttgggacatctctccactgagaagcatggataacagtgttcctgagtagtttcccattacatgatcctccttgatcattttgaaaaatatgattcttacagaaccttggagaaattacagatgcttcaccataaggcatctctggttgctccttcaaggcactaggaaaacctccaacagtctccaaattctgcaaacaatttttatggactgggttgcaattgcgctggaaacaagtagaaggaactccagaacatttttcctgctctgatagtctagcaatgttcttttcgcttctactatacaaacattaaaaggcaaacaaaaaaaaagatgaatttaatgatctagcccaacaatgttctttttgcttctattatatctcaaacacttctttaaaataaaatataatagtaaaaaaaaaaggatggtggtggtggtgaatttaataaagttcctctagttccttgaggaaactcgtggcctaattttcaattaaaaagaaaatataaaacagttgcgagtcttgcgacaccgaaaaaaaatatataactatttaaaaaaagtgccacagaaagctctgcaggggctctctctcactaccaactgatggccaatcttagcaatcaactagctaacgtataaaactactttataccaaatgtgaaaatggactagttggcaattaaacaaataagacctaaaataacaggatcatttttgaaaaaataaaataaaataaatcatgatagccccatttctaacctcatagagagctgctcattttgaatagggtcactggaaagctgatatggcacagcgatttctttagaatgtattgaacttcctcgtatcagtgatgataaatcacaacagccactcacacctgtttaaatacaatattattgtttaaaatttccacactacaacaaaactaagattcctgattaagcaaacttctcattaagagatttttaagtgcaatattgtgtcataaaaataacagtgaatcatcacagaacttactagtagcacaagttgaaggtgggtgtggtttgggggcttcaaaaacctctctactactggtatgaccaggtccattacactggtccccacgtgctgaagactcagcaagagaatgatgtaaacaagaaactccttcacgtcgtccattccctttgttgattccaaaagaaggaaaggcatgtttttgtcccagcatttgcctcagggcaagcattctcaaattatcatcaaccagatgagagctaacactaatgttttcttctctatgaaaagttgaaggctgatccaccaaacaagaatatgaagctaaaggaactccctttgtcacttgagatggtgtagttatcccatgcccaatgggtgaagctgaagaactataattcacatgatcaacatgcagactactcccaaaagtacagatgttctcaacatcattagatacgcctctagtatcaggtgcttcaggcggtacactagccaactgatatatactacagctgcttccttgtgcagctgaaagtggaggatgataggttgaaatctcaatttgctttggaattctactccctgaatctttcacaaagtgtgatccaccctcaacaaaacctccccatttccccttgtcaatcattagtccatgggaacctattccagagatgtttaactgcctttctagaccattcctgctgttacacagaacatcagattgatcaaacttggcaaagcgaggttcatcatattgtgtgtcaggaacagtgtgctctatgacactggtcatattatcattgggttttacttgactgccattcccaactaacaggttgaaattggtgagtagagaaaccacggcattctgagataaattgcctctggatgtctctactgcagcagtgttgttgaccttaccaagattcaactggtttcgttctcttttttcaagggaagaacatggtccagcagaaaagtacaaagattgtccaactcccgcattgccccagtctgctactgcaaataaataaataaatgatcagacttatgtagtttgttagtcaaattaagagaaacaaaacatcgggtggtatgatataataatgtatgcaagcacaaatgaactctgtttaaggtagggaagtcatcttgacgcactattgtgtgtcatctgctcacgggggtgcagctttgatggattcacaactgcatccagcagttgtggtccagaagatgaatgttcggaatttttagaaatttgatatggttgtccaagcttcaattcaacatttgaaaaggcagtatccttgcctgcaaagacactagctgatgcatttttaaacatacagaaatcagatctttcacccatagttctcacatcctgcataccaggagcagtaaatgatgaatttccattcttcaaattagaatcaatagaagccacaatagactgatggggatcttgaaaaccactaccaacagatcctgaaactgttgaacatgtagagtgacggcactcaaaattgttctgagaagttcccatgaaactgctgacgtggttactgtcttcaacattgctcttgagtttattttgtaaggcatccataagataacattgctctgcatgaagacttcttggtaacacagcattgttaaaaagttgcccagaccatactaaaccttctgatggatgaaccacaagagagcagttacttgaaacgctgggaacgttgggcaaagtcatcttcggtttcataaaatcagaagttgcagataatccatcaggccagtcccaatcacttcgatcttctggaaccctaatctaaagcatcataaaaacgtcacgatccagtgttctcgatgcttcaaatacatgcaaataagaaattcaattctcaattacaaaaaaaaaaaagaaaataacctcaattgtaatttgaatatgtacacactgactacaaggaaatagatacccatgttgagcatggaatcccaaatagattaaatttataaaaaatacaccctaagttcagtacatcaactcctaaaccaaagggttgggaaattctacttcatggaggaaaacaaaataaaaaaatagaaaaagaagaaaactattttactgatttcaaaataaaagcagtcgcactaaaggaaaaaagtttctaaagcatgaatactaataggttaacaaagaaaacatatcttttatctagggcatattattatctgcaatgattattctcaaatgggcaaatgcataccaatcacacatgtaaaatcccatgaatagatgcaatagtatgaaaaagtaacacgaagcaaaatgaaaacaatctagaatacatacccgaaatttctggaagtagaacttccgccactgagctatggtttcaccattgtccatacgaacagcatcgccagggtttgtatcatataatcctgaatgctacacaattaaaatcattaatagttataatgtgtgcctagtgctaagtgcttaagtctagattaagcagaaagcttttagggagataaacacaccaacctcacaaaatttcaagacagacatgtggatgcaatggcatgagcaaacaatgccaagaagccctgtgttgctgatgagtagatatccacctgtttgaagaaaaaaaaaccggcaaatcaaaaattagaaagcaccacgtaaacagtgcaacttctaattgttagtatgaaattgttatataccaaagaaattaagaactaaccagttcccaaacaaagaactcgtggacaatcactcaaaaaactatacgagtggttggaaagagaagtgtttgcatctaatgacttcagttgcgaagtatgagctttcatgacagaaaccttcccggcatttgaagtgtttataccatgcaattccccaattgaagaaaaaacatttgcattttcattaccaggaaccatgcaatgaatggctcttgtttccgggcattgactccgaaaaccagtgaaagaggaacagctactagaattggaaccttctaccaccctacttaagatagaggggcgaaaatatgttccatgttgcaggttttgttcactaggatattctgattgtagcctgctaaatgtcaatgggaacccacttccaatattgttgacagcgacactattactatcactcataggttttgagttctgtaattctttaaaatcattctgcaagagagatggggacccagacaggagggccagaaaagaatttccaagattaccctgaccaaatttgtggtggattagatttggatagctagtaaatgggggatcttgcaccattccaagtagtttctgtcttgaatcgtgtgaatcgtggagatagggataacagtggctgttcctctcagcctaatttaattaaagagaaaaacaaaaatcaagtaagaatatgaaaataaacatggtaaaagaaccagaaatttgaaaatgaaaaccaccaccaccaccagccacctcaaaattaaatatgtgcaagaggctggaaaagctcttacacacttggaaactctgaaaattttagagggaggcaaaagtaaaaacagaagaaagccaaaaaccaaagctgccaacacaagcaaaatgaaaaagtatttctgtaaatgaaactactgaagtggaaaacgtccatatttacataaaaatgaggatgcatgaagattgatgagtacattattgctcaacgatgcctcttgatttaaaaacgacaaatgcctatattaagccaaaaccagggttgctagtcaagggttttaaaagagaaattaactactccattactaaaaccaaaaccagaactgttactgggattgtccaaaacaatacggccatcgtcatttcattcaaaatgtttttcggcattgctcaaaccaactaggcaacgagttattgtactctataaacctcgttacatgtcttcatatacacacacccgtaaaaagctagtacatgtatttgtgtattgtctgttccttcaccatagtaggaaatctgaaagcctacaaatgctaacgaactcatagccacgcattatcctctgtattgtcttcaaaatatataaatatgtatgataatgtatacatcaatatgaaccggtgaagaccttactagtagaagaagagtcggaaccaaaacacatgcatgcacaacttcgaagaagatgaaaaaaaaaagaaaaaaaaacaatcaaaatacctgattccggagctcctgagacgaagaggaagccacagacggagctgaagactgcatggtcgaactaaatttagcttgccacgaattctccatctctcaaagctctgaaaaagcctaggcttcctccattaaaatcatcaaacgcagaacaaggttttcagacaaaaaaaaacaagtataacaaaaaataaagtcgcaatatatttaacatcgatgtatacatttcagagatgtataatcacatttttctaccagtaagaatcattaaagcgagccttcaatttaatgatattagcttctttgagagagagagagttggtgagagttgcagagcaacaggagctttaccctttactcttttatgagaagagaagaagtatagagagagagagagaagcaacctgatgatgtagtttcgtcgaggacgaaaaaaggggcgtgaatcgacaagttgacgcgtgtcataaattgcaaatgaaccgttcgagtggctcagttggttatgatagaacgttctatgccgttagattgtattttgattaatttctttgg

SEQ ID NO: 185113 - DNA, 1882 bp, Cannabis indica
tttcccgtccgatccttccagctaccgtgtctctcttctccggtgttgctgcgtgtttctcgatctccttctcgaaatcttcatctcttctgtccattgattccgcacaatggctacagatgaaaaccaaaccagtatacctgctgctgttactgatcttgggaatccttccactcaagctaatcaagctcttcaagtttcttctatcaagaatccaatggaggatccagccagccctttctttctgcaccatggggacaatccaggaagtgctttggtatctcaaccccttactggacaggacaattatgtctcatggagcagagcaatgcaactcgcaatttcagtcaagaacaagatcggatttctcgacggttcaattcctaaaccctctatttctgatcaaaatctttataatgcttggtatcgtaacaacaacattgtaatttcttagatcttgaattccgtttctaaagaaatctcatctagtatcctttatgatgaaagtgcctcgggtatttggaatgatctaaagacccgatttcatcagaaaaatggccctcatatatacaatttgaggaaggatctaatgaatctaaagcaagataatcagaccataagcatatattttactagacttaaaaccatatgggaagaactaactaattacatgccttcttgcacttgtaatggttgcacttgtggaggagtcaaaagacttcaagaccactaccatatggaatatatcatgtcattcttgatgggattgtcggactcttattctcaagttagaggtagtattctgctcatggatcctttgcccgaagtaaatcgtgtgtttcatcttgttactcaagaagagcaccaaagaggcactgcttcaaatggcaacagcaacaactcagccatggcgtttgcctttcaaggagatagaagggggaatcaaaaggaagaaaatcaaccaggaaaatctcatcctcccaaaaggaatcgccccttttgtactcactgcaacatccatggacataccatcgaaaaatgctataaaatccatggatatccaccaggttttaatagacaaaacaaatccaaggatgctgcagcgaaccaggtgcaaactggcgaagaaaatagctccaattcgaatgaaagccatgccgttctccctcagctttcctcgactcaatatcagcaactgctgaacttattggcatctcaagcaagtggtataaacggtaattatcctggtacttcttcgggtaacacaggtatcatcctatctcacaatacttttcccccattacatggttcttggataattgacacaggagccactagacacatttgctctaatatcaagatgtttcaatgcatatgtaagatatcaccaactaaactaatcctccccaataatgattatcttactgtgaatcaaagtggaacaatcaaattaggaaacaacattactttaacaaatgttctatatgctcctttcttaaaatacaatatagtatcagtaagttatcttactaagaattctaatgtttcctttcacttcactgctgatgagtttacaatgcaggacaatgtcagcaagaagatgattggaagaggtagtactgttaaagatctttacatacttgatactacaccaaatcaaaatcatgtcttctctgtctcagctgagatttggcactcacgtctcggacatttatcgaacaaacgtttaaacttgcttaagaatactttgaactgtaaagtttcagatttacacaaaagcacaccttgttatgtttgtcccattgccaaacaaagaaagctcccttttcccaatagcaatactatttctaataaaattcttgatattgttcattgtgatgtt

SEQ ID NO: 185114 - DNA, 997 bp, Cannabis indica
gagttaattaaaagaaaaattgaagattcaaaattcttgagatcagagcccattgttatcgggaaaagttcacaatatttttagataaatatttatctactttttaaaattctattattataattgtttcaccattttttctggaaacataatgtgtgtatttgcttgtaaaggttaaagtattggatgccgtattaagaagtttgtcaaactcaaaagagcaacaagtggtcagctcctgtaattaagggcactctgtcctacaaaccaagcacattcttcagcatagaagtagctgtgtatttttaatttttatgggctacgaactgcctaaagtgagagacaatcaaccactactttctaccatggaccattttcttaattaaacatttattttgtattaatttcttcttctttgtaatagtttgaaaactgagagcaaaactaacgaaaaagtgggtgcatgaccattgaccattttattatactggttctattcacaaatgacaaatttcacgactattcatccatgctcaagcctctagttttctctaaagtaaatagtaagatttcgtgcgtgatgatgatgatgatgttgatgcatcataacctcttgacaatggaacttaaattatgagagccacataggacaagcaaccacagtggtagattgacatgtgctagtgttaaatgccgaaatgtgttgttaaaatttcaatagaaacagactacagttcacattaactctgtttatcgtagtacgtacgtagatatgtagtttgtttgtttgttttcgaaatgtgcttaaaaaggtcaaaatacaaagcttttgtttgatagccccaccttgtctctgtatagagattaacattcaaaaaatacttttatatttgactggagtcaccaaattgaaatcacatgaaaagcagcaaaaatagagtatgaatacagtggtagcttcccatgcaaactcattctgtgaatttattaagtaaca

SEQ ID NO: 185115 - DNA, 9122 bp, Cannabis indica
aaaataacctccctctttcctattccctttttctaatacgatgggtgaaaacatagaatattcttattgagctttgactggacctagtcaatatgaaaataatatgactcaagtccagttgacctcgactgttcttttccttgcaaattttcacctttgagaaagtacagttctgagcttcaaatcaatattaaggtgcttctgttttcatttaaccttcaaaatttgaaagcccactgctgaacaacattttaacttgctaaagttaaaatatttgttttttattttttttttttttggttcaagaagttaaaatatttgtttgattaaagatttgagatttttagtaaattatagggaagataaaagtttcaataaagagcatgtcacaatgcaaaataacagctgtaaaatgctgtggaaataaagaattatcttttaaggttaaatattaaaggaccccctatctgttgggcttaacgtatcataaagagatgttgatcacttgtgtttattatatggagagttatatgaatctgtcagcatctctattcttgtaactgttctgctgctgtataagaaaaaaaaattattcagcaagaagtttgatcaaaatgacatttgtttttttaataatatatttattatagaacgggacttttggggggttttaataacaaaggattaagcatagtatttagttattatggagccctaggtttcaatgttttgtctgtacaaattcagtttctgtacctttttaattagagggaaaagtttaataggaaaggacagagactgaggctagctcagactgctcagtggtgtggacagtgagggggagaggtaaggtggaggcctcaagtttgaacctaggacctctttattatgcggcctactggaaatgatactaagtagtgttgtaagctgtaacatacttttccaattcaacaagtggtaatttaattgggctttgatacataaacaaattcgtttgaaataacaattttctttggttttaaataaaacatttgcaaggatgatgacagccagtttaggtttaatcataggagtttactaaaacatgccttctggagctattctattttttttttttgttattattatggttgctatagcttatgaggacttttattttatttatttcttgtatagtctttgactaaagtaatttatatatatatgtattattatttgaagttgttgaattgctgtttaattttaaattttgtgtctttctagtgaaatttacccttttctgaagagtttatgtcttgaggggactcgtttgcagtcaaaatttgctgtttcagcaattgcaacattaattgatacatcaaaggagacagaattatgcaaggtacaattgttgagacgtaattatgtagttgcaatttgcaaactaatgtctgcaacgtcgttcttaatatatcttggaatattatgtgcttatatgtctgccaaaggataacttcttagtaaatcccaaattccttattttaaaaactgcggtaaaaatcatttgggctgtgtgatattgttagttcatgtttccttcaaccattcttgttgatcacaatggaatactaaatttttaatgtgaactaaagctaacttaagcaggacaagcagtgtaaacaagatgaaaagaaagtacattaatgataacccatactatacctccgcggctctgcccattctctcttaggcaactactggtctgctggggccaataagtctgacagcataataatttaatctttctcatcttgcaaaccacaagccagtcaaactgcatactattgcacagaaccttgatattctttttttattttgcaaactaaacgtcttaacttgaattatagattgggaaaatatacaactgtcattccctaattaaatcggaatgtaaaattcttttatattatgtaaccattgctgtctaatgttttattttgtcccataaaaactcaaactctttaaatattgtgtttcctaaagccagagagaaactacaatgtaggaaaatgtgattagttgtgtcctcatgttgtttgcacaaaaaacaccatcctggagatagcactcgaatgggatctttttacttttttctgcagaattgcatgtttatacaatttatatataacaaccaaacaaaaatctgtacttccttgggattgggcattcccataaaggttttttttccctctctttttgtaggataattctgaatgttattgacttacacaaaaaagctttgttaacatatcgggggtggggctagtctaagacaaaggcctcgttctctttttcagaaaaaaaaaagctttgttaaatccctccaacgtctgcattacttcagtcaactcttctatccgtgttaactccctccactgtctgcattaattcagtcaactcgggtacttcaacatcgttgaggtttcttacaaaatggaaaattccattccctactacttccacttgctccaaaaaatctgctattcagccattctccttaaaataaatacttcccaaacctaggaaaacatttttaaagcagcagggttgttttccatttagaaaagatggattgttaagatatgtcaagaagctatgccttggacaaaaaatagattttagtgaaccctcaacatggattgatttatatatctttccatggatggcttggtttctcaatcaacatcttctgactacacattgtttttgtttcttgatcaataacatcttctgaaaatacgttttttgatcattggataagatcagctaacagatcaggaatgtgcatgcaatttttttttttcatgtaatttcttagttgtataaaataatttttaacagtcattatcaactatggcctctatctgtacaggaacttgtggaatctttacattgtggaaggaatacttccactgtgctgcagtctttgggctgtcttgcacaacattctgtttcaacatttgaagctcatgatggagagatcactccatttatttatgagaagattttacaggtaaaagtattcttgtttgtttgattttgttgtgtctgcaatagtatctctcttaggtcatcaaccggtggaattatttttgttaagtttttgttcttcaggtgcttgttgaattttgttcatgtaatatttataaaatttgtgtaggtggactcaacagaaacttctagctcatctgatgatagtcttggctgtagtgattcttgcaaattaaaggtaaatattgttttcagaaaactgtttccttgaatgtatttgttaattgcactttaaccattgtcatggggctatgttcttgtgttgtacccaccatatgtatgtgtggttttagagaattatgttttagtttaaaatggacaaacacagggtatatcttcaacctcctctcatgataagttgcaatactcttttttagctcatgtattagtgaaagctttctagccatgccaacatattattaacttaccatgtgcaaattggatttggcgactattgtacttttcagttttcagctgagatatattttcctgtgaccttcttgagtcatttttctcctctttctgtagatatgtgggctgaaaacacttgtcaagagttttttgccacaccgcggagctaaagtcagacggaatattaaagaattgttggacagattgttgattataatgagaaataatgacacatgcaggtatatgtgttattcaacatagtaaaattattttattgtacttttgtgtgtcaatttcacatctaggttgctttcagttttgttatcatcggttgctgtacatttcctgcttttacgcagaatttgggaagatgaggagtgagtggtttagtgttttagtttgctatcctcatagtcacctatatgatggataaccctaagtcatatgatctttcccaaaatttttagagttatgtgggggtcaattttcttaccgatgtccgtaattgggtttagggattttcgggatttcaactcgtgtaggaagatttagttgatatagttgcttgatatcaatgatttgctcaatttgcttagtttattatattattagcattttatgtggcatgggttatatggtggggatctaattcctatgtagtgttttgatatcagtttaatattcgtgatactgtcttcctgttcaccgaaaagtaatttctagttttaattgcttacccttttcctaattacttcttaccctaagatatttttgagttgtggtggggttacacttcctcatggaggattatttttatgattcagaaaatttaaattgttttttttttgcattgtaaactcaagctgtgtatcaattttacaaatgctgttgtctgtttgttatcttcatcaattgtatgagtcatttatgtagttgccagttagggtgagcaaagtagtagcattgtttcccttcctcaagggatagcttaagcggtggagtccacatttggaaccatgaggcctagggtacacttttcaggctttatattaagagactaagtttactatttgcttgttgacgttgtgtaatgcagtgaaagaaatgagtcttttttgagactagccgctgcaaagtctgttctccgactctctcaaagatgggatttctatatttctccagaaatatttagctcaacaatttcaatggcaaaggtatactatgcatgactatatagaaatagccaagttgttgaagcaagactaattatgaaagattgaaatatcgcttcaaatagttgttgaacctacattagtatacatacactgtctttgaagaataaccttgaaggaaagattgttctaatttttttttttttgcgttataatattcttgaattcttaacatctgggaagattttgcatatttaatgttcctcttggtacgttggccttttttgcattgcattaaaagttcgtagatacaaatttgactattttctccatgaaattccaggatggctcatattctgttagaaggtcttttcttgataaaacacacacaatgttgaagaagcgtgctatacctagtagatatgcatgtatttatgcattagcctcctgccttgaggatctacgagaggatgtatgcttgtgtctactttaaagcggctcttttatcattttggtttgtttgatttgaacttctacttattttgttttattgatttttctgtttagtcatataaatatatggctgagtttgtcaaagagtatggcagagaagctcgtcaaacaactggtgacactgacaaaaagggattaataactgacttccctgcatacatagtagtcttcttaattcattttcttgcacacgataaagattttcctgttgaagattgtcgaaatgaagacttatatgctcatttttgcaggtatgtatatttttggatttattgccttccatgaattaattcaccaattataatttctcgttgcagtccactgttttcagtattgcaggcattactcaatgctattaattttgatgatgacgtgaatgaagttaaagccactgtctcgtacttggtttatattttccgagctatcaagagagttgaggatgctgtcaatattaaaaatactagtgtaagaattttctctttaaagattaataattatctttaattatgtgctctattacgagtgacaaagattgctttgtaaattgcagaagcttcatattctagcagatatcgggctcgctttcgtcattgcagtaaatcaaagtggaatctcagtctcctcatctcatattttgctaccatcatctttatacagagtaagtcatggcaaatagaactataaggaaaaaaaaggctttaaatttgttgaaagacgtcgaacatgattttgatttcctattttgtttattgtgtgcaggctaatacaggatatgttgctcaatcctgccttgatgaagactttgtcaaaagagtgattgataagtttaagtcccatagctctttggtatgcatgtaaaatttttcttttatttatttaattaggtgatattatataagataatctctttaagcacatttgttgaaaattaatatgttttcttgctatataggtgcatgagactaatccttctaaacgtggccgaaagcataaaggggattgctcacaatcagctgttatcagggacagaaatttgaactttcctctttctaaaataggagatttacccatttctaaatcagcagagactgaacaaactgtgaagcaaggcactgccacgggaggtaggcgaaaacaggctgcctccatgaatggttctgggtcagctcaactgcatgagtgttctaaaattgatcatcacattgatgcttctggaaaatcagaatcaaatcatgaaacagaacatataatatcctctagtggttctgtgccagtaaaaccacctgtggctggatcaagtgtttcaacccgaaacatgaaaagaaatgttgcttctttaaaagtaagtggtggggcgagcagcaacagtggttctgaagattccaaattgaaccaagctaagctcaaagacagttgcagcttgaaagtaattatgaatttaattgagcctatttggattactttcaaatttttattctttaatcattcatcagaatatcctaatatatatgaattatatagaaaactactgatacgggagaggcattaattggaaagcggatcaaattgttatcgccaattgaacgatggtgagaatttaactggagacagtagctagtgaatcttgtttgatttgtccatctaatgataatttattatttttctttaccagcttttatgcaggcactgtggatagttataattctgaaaacaatactcataaggtgagtgggtacaatctaaaatgtactcgactagttatttttctcttcaaagaaacaaagcttttattgaatgtaactcacaaccaaaggggctttatggaaaaataactccagcttaataacagagaagtcctgaaaataaaattcagaaattttcttttctaaatgggttgttgtcttgtgagctagttgttaagttattggattgatggacagattgcatgcgataatgggaccatagacctcctatgcttggacagcgagagctgggagactataggtgatgatgcccaacaggaaacggtaagagtataagaggtttctgatagaccccaacatcatacgtttgaactgataattagaggtccttacaaaatgttgcttatacctttgaaggttatgccggcagagaatccaaatgccctacaattgcagtgtcggtaagtcactaataattaatttctttgctatttcttcccattggactatctagtatgttctattactgtgttactagacctacctataagacatgtcaacttcatgttctactttctctgtgtctgcatttgaagtaggtttcaccttcagttctgatacaaggattactttgctaattttgaattaccgttttgactactgtttaatagttgtgtctgagcaatgcgacttaactatggaagatgagatactacatacgccattgtttaattgagtggttattaacagagttctatcatatttaaaactttagagttagtttttatcagaacttcttgctctagtagagctaggattacttaggtcatattcaaaataaatcctattcccaatgctttaatttactcaaatatagtataaatttaaatttgagatcaattttagattttgttctaattcacaattttaaatgctcattttagattatataataatgaattgtaaccaaagattcaaccaatttttgttgcacttttcattcgtacgtgacttagtttatattgagaatgtaatggttgtatcttaaagcatctctaatagagtggtgtattactatatttcagcacacttcaaaaaaataccaccccaattatccaatagtattctaaaagttgcgtgctaagtttggtacatactaaaacttgtgttaaatttggtccataataaattcaacgataatgctaataaagattatgattcattgactttaactattataaaactttacattttttatggtaattttgataataaaaataaaatataataatttttgtatattttcatttttaaatgaccatctacgaaatagtaggctaaatataacatggtaattaatcctttgtgaagctcctagactcatattttggtatatcttggaataatcaatttagtgcgtaatcttatatttttcgtgtttttgggttgccttggtgaatcactttgtccgaaatgttgatttatttttcgatttgtgattgtgctttgttatgattagtaagtgttctttttgtacagttgcaaattttaccctccattttgtagatctatcgctttaatgtttttaaaggaacactaatttccataatatagtggtgatacgggaagttattgtttcagtgacagaaagaaacctaccgatacacacagtaaagctcctgctcgaccttcaagaaatgttggaaaggaaagtggtaagttttttatcagattgtttctatgtcctggtaatacttggaatctgatatgtcaagctgccacttaagtttaattataccgtttgcatttgtagcgtgtgtgtgagcgtgtacatatatctatctttgtattttatactcactgacatgccatcgcggcctaggtgaagctaaccatactgctgtagctatgttgtgtctttggatgaatgtggttatagcgagttgggattgctttctgtacaaggcatcatcaacattttatgatgtttttcattggaattgggatcacttgggtagtagatgtgtcaagaacattatgttttatttttcacactttatatgctagttttagggttccgctgtgataatctgatataatcctctctttctgcatgattgtggattaaagtagctcactcacagtgctttaagattctttgttccagtggatgttttttggcctaacttttagtttatcgatacagagaagacgacgaagagtcagaaagctt

SEQ ID NO: 185116 - DNA, 2645 bp, Cannabis indica
ctctctctctctctctctctctctctctctctctctctctctctctctctctctttgtttggatcaccaaccaccgcggatacctggatggtcttcgtcaattacaaaaacctcctctttccttttgcgcagatctctggatggtgaagaagctttagtcacactagtcttatttcttttcttggacttctttgaaggaatcgaaggagtgggaacaactttcacgaattcccaaataagtggttcatcagctttggtcgcgagtttcttccttttgagcacatggccataacagcgagaaaatccattatactacacaacaaaagaaaattaagtggttaataggtaagaaaaataaggaaaatataacaagtaaacagaaagctattgcttgcttcatcaagtggaacatcaacaacattattattcaccaacttttttaggcacacgaagctcagtgtgatctgaaggctctatcttagcctcattcatagaattgatcccatcactactagattgagagacacaaatatttttcctaaatattctatgtcatcagaagagaagtcactatctttcgaatttcttcagagccaataacagtgccactccgcccgctttcatcatcatcaagggtcatggttcaagattcatctttaaagccagcatcaacgtaaactcattgacaagacgctcttagcccaacacgacggatgttgtcattcataagcaacgtttgcctgactatctcccataaatcaatttgttcaacatggcatctggcctcagcttcatgtcaattaacggagctggcctcttgaatggtctagctttttggaaggtggtgtccctcgaggttatgacaggagtatagaaatattcttcacgataaaggtcacaatttctcttagtaactttatccatatacacgatataatggtaaaggtgataaaattcatcactactccaggtgttatttctcttaaggtcacacgggaagttgatctaatgtggagtaggaataggccagccctgcagacgataaaaaatgaagaacgttgatagaatctgatagctacctgataagggaaaactctaaagtaatcgacaattgaaacaaatcatgggttaagaggttggaatgcacccacgttcatgtgaaatctaaaccaggcactacaaaaaggattttgagaagcactacaccttcaattttaggttttctcacaatgacatcaagcaaagagtattcctcccttaacttagcttaatttttagaaagagtgctgaaaacatgtggttttccaacaaagtctcaatcttttgggttctcactcttgatgactgtagtaagtaattcagtcgtcaacacttttctgccacgtatcctatctaaattcttgtacttaggcattaatgtgagtttttgaaacatgtattgtgctatatgagggtcatactcatcaggttttcttttagtttcttcttacaagtaattttctaccacaacttgagtctgcatagcctggatcagctaaataccagctcaattcaattcaattcagctcaaaacaacttctttaagcttacttaaagatgtgttaggacatccagactagctggattgcaccttacaggaaaggtagatcttagctcaataactcacatgaaaattccatttttaattttcgaaggtcttaatattggagtttgagattttccaactagccctaaaatccttgaatcaagctctacaagaagggacaagaaaaaaaattggaagtttttttttgaaattttctatctgaagaagttgataacttttgaagatagctgaaagcataacactcagtgctcttagtctctcttatgagtttgaaacaaagtgaggagagagtgaagggagttatcgatttataagggaaatatcttctctactcttaagccaataaggactctatttaaatttaaatttaaaaggaaagataagaggaaaaaaaaaagctttatcatcttttcctttttcttttaagtttgcaaattcatgtttaatgtaggaattactgaaggcaaatagaaaaaaaatttctaaaagtgaaaattgatgtccatctggtagatttacatgaaacgagtttagttcatgttagaaagtcagcttcacacaagtgtaaaattgacttggcgagaaatatttacccaaaaaactgacccatatgatgtagacatcaaagtttgatacatggaaaggaggaaaacattcatggatctaagtgccacaagtcatagcactcaactcagaaaggctcaatagccctgggtccaggttgattttaagagctctgaaatgcgtatttggaatgcgtcaagttttgtccaagtcaccatatatcctttagtattctgagccaacaggtcaagaagactccaagtctaaagcctgggagctgaaagatgttgatttgacatcccaaaagtaaactcggacgcctagggtttaacttagtgcccaagttgacattgctagctagggtttcaatttttaagtccatcttattgcagaacactcaaacattatatttagacatgaataagacctgatacaaaaacgctagaggaatcataatctgaactggaacacttct

SEQ ID NO: 185117 - DNA, 2256 bp, Cannabis indica
catccacctcttttaatttcttttcggatgtcttttgagaagaaacaagcgtgccttcaagttccttaactttcaacatggtctccgtatggcacttttccatatctttgaatttctccacagatgttgtgagaaatattaattctatggaaaaggctaaattcgtcaaataggaattgtaaaaactacacaatacattcagctacattatggagatttacatggagaaacaaaagctaaattgattaaatccaaataccatggcaagagagctaagacgccattgggtaagcttactcaagaaatagtgtcattctcaaaggctctcctagtcgatgcattgaagaaagatattcttgagccaatgttcatcaaaacctgcccactccaggcattaaaggcatcggaagcttctcctagaagtgcaaaacttcgcgctagttgctgaaggatattctgattcggcgcaacactaggcgatggtcccatgactagatgctgaggctgcccaaaaggaggggctaccaattgaataggtgagcctgtaggtaaagccactactgtcaccggggatagaaccccacctctcaaagtgggagtagtgacggtcgcagaaggaggcagcatacaagtagggcccaggcccaatggtgacatggctgcaggagagggacccttagatgtcgggggcctcttttgcgggcacgacttggggtgctcagttaagccacctgagttagagtgactatcgaagaagctccctttgccgaaggaggagacatattctttttttatccatttcctgtctctttattgtctgtttagtggaggttgccaagttgtccatatttcctaaaagatcaaagggaaaccccacgtgtcagctattacaaagaatgtaaaaataaatgaagtgcaagttataattataaaaagcaacatagagacatagcacaaccacaaatatatatccaagtcagtaagtcaagcaaggcaacaaaggaacgaattttccctaaagctattttctctctccaaaggaagtaataaagtgttatctttttttaaacataaggttggagtcatattgatccaatttcgacgcgtacaatactttaatgatggggttgctcgcataaagcatctccccaatcatcattcaatggtcccacctatggactttcccatctactccactatatattgaaagttcatatttatagtccttatgggagtaagtggaaagctctttagagaagtgtggggaacccccccaactctacttgaaagtctaaggtacaagtcacacatgttacctcctgagttgctagtctcgcattcggtatgtttggggcataagttttgaataggagtgttaagagttaacaccaatttggcctgccattttcgagatgagcgggtcagatcaactaagctctcccaattatacacctttttgagggagctatctacggtattctttacaccttctaagagatcgcactcccaaagacagtcgtcatgaagaagaaagcgaaggtttcgttgacaaatatgaacattttgaagaaaggtcaccctttcgtttaactagtccaatggcggaatatggatagcccttaaaaccaaggtacaagttagtacttacatcaacaatgaatgtgaagaaaaacaaatggagctgaattgctaaggggtaataacaatatgcttgaaggcataatctctgtacaggctccatacccaaaagaactcatgcttcttgcctggttccttgctaggaagaccatgtagtatcattgggttcgtcacataataaaggtagtggaagctatctccatgcctttcattttcggcaggactagcccttggttgatacataaataaaaaatcattgggtgttgggtctcatagccccatgtgtgataaagagactagaaaccaaccaagattctatagctattagaagataattgaaacggagctagtcccaaagctccaaatatactctaaagtaatggtgctagtggaagcatgacctccgcctgaaaagagaaagtgcccatgcgtacatgtcattatgtggtggtgtacacttacgctcatcagggacaggagttctacatagcattcacactccaaagctaagttcttgaactttaagggaatgtcgaacttggtcaatgtttttaaatggagtggtgatgcagcttgcctcaaacgtacaccccgccagctttagtcttaatcctaatc

SEQ ID NO: 185118 - DNA, 1278 bp, Cannabis indica
gtggatgtcaacaatgattctgtatcgatgactagacatgttgtttctaagacaggctcagagccaaataatagtggtgaaactgaagcaggagaaactgatgctttttcgaaccataacttccctactcgtcagatatcccgtatgaacagtatatcaccatcttctgagtctcctattcgaaggcctccattcgttcaacataatgtggtatgttatttgattcaccagtattctcaatcatattatgaagtcttttgacacccgctatagtgttttgtcatttgaagacaaccatagatcaagaactttaaactacatgaacgctcccggcattgtgcctatgctcaaaaaagtctgttcattttaccgctgaaagtgaaattgtttgtcttttcatttcattgtccccctcccctctaagctggagaactacaatgcatgtaatctcatattctgctatctgcatggtctgattattgggtatgttattatgtccaggcaccttattcaactcctcgaacaagtttaggaccaactagtagtccatccccatcgcgcttttctcccattgtacaccagggtcctcctacaaatcttcctacactttcagttacaggtactaattatatagcatcatccccgtctcctgcagcatctggtggtacttctgcctttaaagattctcggttgccaagtccatggaattagaataactatgcttgtttcattcttgaagaatgcctgataactaggccaagtgtgcttagatccttcttcctcttttgagtaaggtaactctgagccattcattgtatatctgtaggagattcatatctccctctcccagggtatgattctgtaaagtgaagaattataaaaacgttaaactgctttgaaaaattcctcttcatttatggtttgaaaattcatttttataattggtaactaaagcagtagctgtgattgtgacatattaaagaaaacgttatctgctttgttcaaaataaaactgtgtcggtcgaaatttaatacatattctcttctatcaatcaattgtgtataattttctaggtacttattttgcaaagccgacaacccaatttattgaaccgacatgcaatgggttgatttggtcggctacttatctgaacgtaaactaatttaaactataacaattttagttaatagtcatccatttcttcaatttcatgtaagagattgtgaattgtttttttgtcctatgctacaatagtcctcttctattgagaaattaaa

SEQ ID NO: 185119 - DNA, 6422 bp, Cannabis indica
tattatagatttggatctaactgctagcactcttggaattaacactataagggaactaatattcgatctgttagaaaattttggattccattattgtatagcatgttctcagccactcatgttattaagctctcaaaacaaaaattgtaagaatcattttctctgaaaaactttaacgatgaatcaaagaactcaatgaacataaacatgagttcatgtatacttagaattcagactaatctaatgataatcgttgtgatatgaataattttttcatgataaacgacacgttaatgaaagatattattatatatcggttcagtcatgcataatcaaattatatacaacacatttactaaatgtttatccacatatgtgatcaaaatcaaaatcacatacttagcagttctatattaaagattcattttactttgatacactacagactagttttatccatctcgtattttacttctcttgttcatccttacaagattataccttctccatatgaataaggaattttcagatatttattaattatactactataattaatgtattcatttatctataattgtatttcatatattctgtaatatattatccattaattacttgcttttaggacctaaatcccaacaaaccctagacccggactcagaccccgaacccggaccccagaccccaacttagacatggaccccggaccgggctcaggttagggtccaaaaccctgacctgagtttgggttcgagttcaggtctggggtccgggtccaggattcgagtctgaatccatgaattcagggctcgagtctagatctaaatttggggtttgggtctagggttcgagtcagggtttcaagttcggatttgggtccggattctgagttcggaaaagtgtacgagtccaggtcgtggttgaggttagggttgagtttattgtaaagaattcataattttacatagcttattagtacaagtcaataccaaacattgtactgtactaaataatattaatattatacaatctaacacaatactatacaatacaatacattacggtatcccaaaaaagcaaagttcaaaacaataaaacaaaatgaatagcatatagcaataatgtaatagttccatggccaaccactaatgttgtctttggtggtatcaaaatacaaattcatgaaagttataaacttttgtccttattttctatggtatcaacaaagatgctaagaataatttcttaaacaattcagtggtatccgaatattatcatcatattaagaattgttagtcctttaacttttttttttcttttacatgaagaaaaatgttgtgattaaatatacaagactaataagagccctagctacaatgttactaattttcgaaattttcttcaacacaaatgatcatagttacaataaaaaaaatgaaaacaactttcaactttttaaaataagaattaagtaataattttaatttttgcagctaaattaaaattagtaaactgatcttgtaacttatgtatattgtagtataacttataatttttttttttgctgaatatattgtattataatttataataatttgtacataaaagaaaatacaaagtcagaaatctggtctagtttagattagcaatgcccaacaattgccatagttattagttatccctaaagtactattctaatttctacagacctacggttgaatattctttattaaaatgaaaataataataataaaaaaatcaataacaataatgtaatttaataaaatatatacggctgaatagtctttttcttttttttttaaataataataaattttttaatttatttataatattcgaaaacgtattaaaaaaaaaccaacagagattgaaaaattcaaccatcacgctttcaataaaaagggttgaaattcttacaagtcctcagcctcttgttatgcataaattaggaccagttaatactttttaattaatttttatttttgaggaaaagttaatttttatttttaaaaaatcagatttcagttgaaaaaaataaaaaggatcaaatttacctattaattttaatacaatgtttttttccattaggaaatcgaatcttatcttaatccaaaagcatttttaagaaaattaattaacattttttaattttaattttaatttacaaaatacaaatgaagcgtttaatattttaagaaaataaataataataaaatatggccaacctcaacaatgcaatataagttgggaccaggccaatccacaaatccaaattaaatttcataatgaaaggggcattttaggaactttaacctttatattttaacagcctacgtggtcgcgtccaattgaaaccacacgagcggagcagtatccaatcacagtacgccacgtgaagccaatgacaagtagagactacgtgtcactttttgattggaccacgtcaatattttgagccacgtgtgcacctaagaaccgcgaatggaaaaccacgcgagtcctcttcctcttataatagtccctcgtctcgttcgatagctcagttctcactcgttagctttgcttcatttctctctctctagctttctctctcatcgtttcagctatggcggtcggggttaggaaccctaattttctctgtttgatctctgttctatgccttctatctatcgcatctgctaaggttttcttcgaagagcgattcgagggtatatatctcttcatttctccttcattgtatttatttgcattttgtattttcgatttgtgtgattttcggtttcggtttgcatttctggtgaattaggttgtttttgaggctgtgcgtctgtcatttttgttaattgtatgtgttttgcgaaggatcggcagttttgtatgtctctttgttttgatctgatggttgttcgtgtttattttagcttcggtgttgatatgtgagcttacattgttgatttaaagtagatctgtgaatttgtgatctgtttgttggttttggctatggaaatggttttagctttcgtcgagataatgccatttagtgaagaagtattataattaaagcgatttagctttctcagtaacatttgcggtctggattcgatccccatgtgtaaaatctgtgagttcttttctgttataaggtgtaatataaaattaaaacttaaggttcgtatgatatggttctgatctgatcaatgtatagctcggcatagatcatttaaggcattggcgtttatcaggtcgggatggtttagtctttggattccacattgttatcatgtgagttctgaggtcttgattgttgattgctgaaccgcataatttatctcattcggaaggattaggattgtgtttgttttcagtctaacttactgtttggtatggaataggattgaagtggacatccattacactgttagaatcattgtgtgtattaaaaagctcttttaagtacatagctttgcctatacattttgtgtgaaaagtttgacatgactacttatatgtttaaagtcaaaaacttatgagaattccttcttgaatttacaatgcttcgtgattagtctactctcgaaggatggaagggtagttcgggtcaaatttgcctttgtggagtgtactatttatttctttgatgtatccactgttaaatacgaatttttactaatctatgtgatttgtttgctaatgtacttttcttctatactgaagatggatgggagaaccgttgggttaagtctgattggaagaaagatgagaacatggctggggagtggaactacacttctggtaaatggaacggagatgccaatgacaaaggtaccacaccttatcaaatgttgaataggatgctgttttgtgttttgtttttaatgtgcttgatgtactaaaaataaattaagcatttgctaatgagctgggacatgttttaattgatacaggtatccaaacaagtgaagattacagattctatgccatttcggctgagttccctgaattcagcaacaaggacaaaactttagtattccagtttttggttaagcatgaacaaaagcttgactgtggtggtggatacatgaagttacttagtggtgatgtagatcagaagaaatttggcggtgataccccatacaggttgatactacctctccatatgatctgttactctcttttattgtaattggatatttatgtttaaaattctgatttgtacttggtgtttggtaatttgccagcattatgtttgggccagatatctgtggctacagcaccaagaaagttcatgccattcttacctacaacggaactaaccatttgatcaagaaggacgttccatgtgaaactgaccaactcagtcatgtttacacatttgtcctccgaccagatgcaacctacactatccttattgataatgttgagaagcaaactggcagtctttacagtgattgggatcttcttcctcctaagaaaatcaaggatcccgaagctaagaaagtaagcacttatcaatgaatggtaggcgtcttatagatttcttccctgttttccagcttatattaattcgatcctctaatgtcgacagcctgaagattgggatgacaaggaatacattcccgaccctgaggacaagaagccagacgtatgtccccatagttttgattgtcttttatttaacgttttattgaacttattgaggaatgtattgatttcatttttcgtcatttaaagggttatgatgatattccaaaggagatccccgatcctgaagcaaagaaggtaagcataggcttctgttttttttccttttcctttattttctattatactttaatacaagtattgtagttactaattcagtttgtctttccagcctgaagattgggatgagactgaagatggtgaatggactgcaccaacaattcccaaccctgagtacaacggtccatggagcccaaaggtatgtggagccctggaaaagttgaccttatttggcactaaattgcagcattgtcctcatggtttttctccctctttctgcagaaaattaagaaccccaactacagtggaaagtggaaggcaccactcattgacaaccctggtacattttctgtctgcagtgttatgatactcaaatcttttctgttgtagtatgggttaatgatcctctcgattaatttcttcacagatttcaaggatgatcccgatatttacgttttcccaaagctgaagtacgcaggaattgaattgtggcaggtaaatctttttctcttctttttcgtgtgcttttgcgttacgtagttgctcccatggaaactcagatgctgatacgctatttttgcaggtgaaatctggtactctgtttgacaatgtcttgatcactgacgatcccgagtacgcaaagcaggtggcagaagaaacatgggccaaaaacaaagatgtatgttttttcttcactctattgttagtgtaactcccaataacattatctctttatattatttcttacggtttccaatggtcttttcaggctgagaaggcagcatttgatgaattagagaagaagagagaagaggaggtagaatcactttttcatatttgttattattttgtcaagaatgttctccttttctttttcttccttttctaatcatgtggtatggtattgacacctaaatttaattctatttcaggaaactaaggatgatgtagttgattcagatgtaagtaaaactttgcttatttctaagtaactccataaaaattcttctgctgtggtcctaatagtgttgttgtgtttgtttccaggctgaggatgaagaagaggccgaagaacacgaagaggctgcagaggaatctgacgccgaatcaaaacaggaggcagccgaagacagtgacgatgacaagcatgatgaactttaggaaggttaagcacaacagcagagttgaggagagagataagctgggagtgtttgaaaactactccgaatttttttcttccttattttaattttttacatgtaggaattttctcagcaaagtaaactttagctgtttgagcctctaattagataaaagaaagatatgatgaattgtgtttttttcatcttcacaattatgaatagctcaaacttgtttaaattgcctcctctttttaatttaagtctctgtctaggcccttactcaacttaattgtttccgtaaaaagaaaaaaaagaagagtgctactgttaaatttttttttacgggtcttcgttaagcttataacatcatttttataaatttttgaaaaatttcgactagtttacagtgtcgaaaatatgtttgaagttttgtgtaatacacgtgatattaagtaattttgttttcggtattgtaaactatttagaatttttcaa

SEQ ID NO: 185120 - DNA, 1699 bp, Cannabis indica
gcagctgagctttgtgggtatcttgattctaaaagaataaggtctgttgtgttaatatgataattattctctttccttgattcaaaacctttttttgataatttggtaagtgtgaatctgaatggatcttgtttccatgctttgatctttactcattaaagtaaatattaacttttgaattcaagttcttatcatttgtgtttgtaatgagattgaatgtgtagctttggtgattcttatatgtatatcaggagaggtttaatcactcgtaatgttatgacagcagtggatttgtttcatcaacgttttggggtaacatttttcttgttgtgagtttatcattatatgatatgattgattcaattgtgatttttccttttgttacctatatttatcttcacacacacatactctctctctgttgctgcagataacattttctcctgcgttgagcagagaatttcgtccttacaaaccagacccagctccattacttcacatatgctcagtttgggatgttcaacctgatgaagtgataatggttggtgatagtcttaaagatgatgtatgtaatctaatcttatctggtctcaacaaattattcttcttttgtcattatcattcttgatattttaactatgcaacatgatggtaatggagtgaagtgtcattttaactgtgaaatgtgaaagaatgaataattagattaacagaaaccactaaaagggacatgtttcttacagttctgggaataaaaaccatcacataatatagtgggaatgagtaggatatggaatttggggagaagaaagccttacctgctatatttatagatattaatatgctttctcatcatgcagaaggatgttaattagtactggatgttttcccattctgtcattaattcatttgattacatatacagaaatcactgactgagttgagtaaatagttaaaccatggtatgaaaaagattctcagtttagaaaaagaagaaaaaagaaaattgcgcccaccgtggggctcgaacccacgaccacaaggttaagagccttgcgctctaccaactgagctagacgggctagttgttctcttatggcagagttccttttgtcaatgcaataagatttttaatcctttaattacatataaagaaatcactgactgaattgagtgaatatttagaccaaggtatgaaagagattcccactttcccagttgagaaaagaaaaaaaaaaaaaactagcgcccaccgtggggctcgaacccacgaccacaaggttaagagccttgcgctctaccaactgagctagacgggcttggtgttctcttatggcagttcctcttatcaatgcaataagattttcatttctttaagctaaatgatcctataacattttcgcaggtaaggtgcggcaaagaagctggagcttttacatgcttgctcgatgaaaccggaaggtatgactctccagaatatgcaaatgtggatcacaaaccagatttcaaagtgtcttcccttgttgaaatccacacactattggaatcaaagtttcatcttgaaccttgatcatcctcaaaagctggatagttgatattaggaaagcaagctttaatattggaggtaggtaggttagttcttagatagaaaattgatatttttgattctgtaagacaatatgagtgagttaagtaaact

SEQ ID NO: 185121 - DNA, 1441 bp, Cannabis indica
atagtgacagaagtactgccactgcagaagcaatccaaatttggatgagatctcagctccttgtccatggccttatatgacttcaggaaggcttctttccacaatgaatttagtttatcctctgctgagccaactttctccaactcttcatccaacttgtttgtattccctttgaagcaggtcttgcctgtcccattttcctttgactgcagagaatgcaagaatgatagaagctttaatggcagggcatccctaactttgcgagcaactaggtggccgtgtggaccatggccgtcgaatacaccacaaaagattgcctcttccgacatgaaatcctacccgaacaaaggcagggaaaacataaagtagcaaatcaaataattactaattaatcacctaaccaggatgaatgaataatataacatagtgaacaaaacttcgatatgcgacttacttcccaaacaatcatggcatcctggtttatccctttccgaccttgctgggtgaatatgcaggaagtttgactctttccattcatgaaaatcctgttgggaatagagggcaaatgctggagaccgataacatgatcagaaaatgttcttttccttctcttttgcccgaggaatccaacttcacagcatgatggagaaaacttatctccattgcttttgttactacaagtactcttactactagtggaaacacaacctcccattgctcagctccacaatgaagacatccggtgtaaataaaaggtcaagattctttctttggttaatggatctcacgtgaaactttggagttgctagaatggtcaaccgagcaggaaattatatatataaaaaattgaagaaaatgaataagaaaagctttctaaacatcaaagattcccacagattaacaccaaccagaagccactttacaattcaataatatacaaaactggggtcgttttagtattagtcaaataaaaaactgtcatgggaagatacgtgatttaataaacaaatcgggtaaaacgaagcaagaagataagaagcatatttaataaactgtgtattgaattgtttcaatggtcttcacggaacaaaaaaacggatacatcaatagaaattcaaccaattaaacaaaaaacatatttaacaatgtttgcatgtgaaacaacgaatagaatatgcttaaaaaggctgtcttgattttcatcagagaataagtaaataaaataaaaatctgtcttgaccattagtacttggtgaggactcacatatgataaaaatcaagtgggaagattttgcttagtttaatggtaaataacaatggaataaatattgaaactaatgaagacataaaaccccaaaagttctaaagtgtgatggtgtgtacagaccataaagggactaaatgtatataaacaaggattaatacaggaaacccataaggg

SEQ ID NO: 185122 - DNA, 2871 bp, Cannabis indica
atgtcataactcctttagatcttgtctttcaaattacttgcaagaaaaataaattctgctacatcacagaaaatcaagtttttcaagccatacagagctttcatttggacatagctttctgaaaattgatttgcttgacaaggagcatatatttctatccataaaatttaccttaaaaatacttaaattttgtgtaagaacatggccctaatgtttttctttatggtattgcagctatggatagccctttgtataggcaccaatagttctgcctggttgactacagctgtgcttgtaaccaacatgagaaacttccctgttaatagaggcactgtcgctggtattctgaaaggctacggagggctcagcggagctgtgttcacagaaatttatagtgtgctgcttcggaattcttcttctgagcttctgttgtttctggcaataggggttcctgtcctttgtttcattatgatgtatttcatcaggccttgcactccagcttctggtgatgactctgctgaacatggtcattttctttttgcccaaattgcaagttttgtgcttggcttatatcttctgtcaactacaatattggatgatatgcttaatttaagccctctcatttcgaatacaattgttgccataatggtcatacttattatggctccgcttgcaatccctattaaaatgacgctgtatccttcccgacccagcagatcagagacacttgataataaagctggttcttcagaaagcctgattcagggagaaggcaatgcagagaaaacagaacccttgctgacaccagtttcatcagcaatcaaccaagaaagcttttatgatgacgatggaaatgagtctgaggtggctatgcttctcgctgagggtgaaggagcaataaagaggaagagaaggcctagaagaggggatgattttacatttactgaagctatagtcaaggctgatttctggcttttattctttgtatactttgtaggggttggttctggggttaccgttcttaataatcttgctcaaattgggagtgcacaaggtctgcctgataccacgattctgttgtctctcttcagttttggcaattttcttggtcgtcttggtgggggcgttgtgtctgaatactttgtcaggtgagtaatctattgttccaaattcgctaattcatgagatatcaggaatgaactttgtatctttgtcctgactcttgaatggcgggcataatagtctaacttgcgttgtattattttgtaggttgaaaacacttccaaggacagtttggatgacagttactcaaacgatcatgatcatcacctaccttttattctcttctgctattaagggcaccctgtatccagctactgctttacttggaatctgctatggtgttcaattttcggtcatgatcccaacagtctctgagcttttcggactgagaaatttcggtttgtttttcaatttcatgtccttaggcaaccctttaggtgctctcctcttttctggtctcctagcagggtatatatatgacaatgaagcagctaagcagcacagtcttcatctgtctgattcaactgtcgcttgcttgggtccaaattgcttcagactcaccttctatgctttggccactgtctgtggcattggtgttatggtcagcattgttctaaccaggaggataaagcctgtctaccaaatgctgtatgctggaggttctttcagattgccccaaagcacaaatcagtaattttacttggcggagtgtagaaattcgaacatgcccgacatggatactttcactcttgtgagttttgccccccttagactcttaccggcaccattcattaagagtcatcttaataataaactaatccgtagttttactgttgttactgtatttaatagaatatgtttgtgcatcatggtgccagaccttgctcctagcccatcagggtaattgagctgtaaaagttatatactgaaccaagaatttatatggtgttggaaattaagtatacaaatatttattcattcattcaacttgttgtttggtacagttgatagatatgttcatactagctagggaatgataatgtgaaatattgtctgtttgtttttagggtttatttttttctttttcaacttcaaaatattattcatttaataatataataacctttgagaggataatatgtacttcttacaaaagggtggatttgattattacctttaattatattataattagtatttttattctctaaactttcgacactacttgatcataccccttaaaatatacggcttgttataaattatccttaaaatataatagttacataattatgttcattctgttaggttatgattatcttatcattaaaaattagtatttttactcttgactttgaccaatacaaaatttagtttgtttttataaaaaaagataattttgaaaattataaagttctatttatttttttaaaaaaatgtaacgccatatttcataaggacacaacgtgtgtgattttataaactaggttagtattaaaaacgaacatcataacagcagtaaaaaagtgttccagggatatttgtttaaaatatttacccaaaagactatatacaataacaattcaaaacacaattgaaaatacaacagatgcaaccagtccaaaataattcttgacaactcgacacacaggccggtagggtcaatacgtacattgctggagaagactgtcatctcatggctgttctaacttttcttgccctcacacagagtacccgtgaatcacatagactcagcaagaaagtaatcaagaaggatacattaaatagctaattatatatttcattatc

SEQ ID NO: 185123 - DNA, 6753 bp, Cannabis indica
tttccctatcataaataataataatagttttcaaaataataataataataataacaataataataatatttcataaatataagaaattggtttatttgaaaatgataataaaaatctgaagcggcctaaggaatgggaggagaaagtggagaccagaagccaagatctcggagtagatccaacccctcatcgtcctcatgtttctcaaatttttggtcatcggctctcagattcaagaccattaaccccaactcggatgattccgtccgtacaaattccggcgatggtctcattcgccgccttggcagttttgacctcgttcttcttggtgtcggcgcttctattggcgccggaatatttgtagttaccggcaccgttgctcgagatgctggccctggtccgttcttcaattttgctcaagctttctaatatgaacgacttagatgaaacaaattttgtaatgacttggattttatggtcaaaattaagaggttttgggcaaaattttctgtagcatcaaatttatggaaaattgaattcttaaaacataagcatagttggatttaatccactttttagggtctcgtcatataactattgtcttaaaatagctaatttggatgattttgagctagatagagacaaattatgaattctgttgaatttaaaatcttctttatgtgcttgcttatttctgaagttgatactatgatcatataggtagatggggtttgaatttgatcttattggtagatggggtctgaagttgatgttacattaagatcacgctgctatatggggtgggaagttgaccatgagattaaggtccaacgtgatgaataagatacgatgattaagttagataggtgaaaatgctgaaatttgtagaatttgggctcttctttttatctgcttctttgctgaaatcgattcgaagatcctataggtaaatggggtttgtatttgatcatatgcttcagaacatattggtaattggtggtgtcttacctatgttgaatatcgggtcctacatattgtcatttattaatattataaaaaattgctaaatgtgccactgttgggcaccattggtgggtaagagcaatgctcattggaatttgatcatgaaactagatcatatagttaatttggttgggaagttgatgataagattaaaacaaatgtgaatgggatctgaagttgatcatagaagattatgatcatataggtaagtggggtttgtttccacaccttacgcataattttttttacaatgcaggggttaccgttagtttcgctctagctggaatatcttgtgtgcttaatgctctctgttatgctgagctttcttctcgttttcctgctgttgtcggaggagcatacctgtatgcatattcagcttttaatgagctcactgcctttcttgtttttgcacaactaatgcttgactaccatattggggcagctagcatagctcgtagcttggcaagttatcttgtttccattctagaactctttccatttttcaatggtaacattccagattggattggccatgggggtaaagagttctttggagtgttgtccatcaatatattggctccaattctccttgtatttcttactttgattctttgttggggtgtcggtgaatcctctgctgtaaactcagtcatgactgcgttaaaggtgatgctcccattttgtgttcaaattacagttgaggaatctgtacctgacatagatttaaatagtagttcgtttgtacttagaacgtactatatatgttgcagatcgtcatagttcttatcgtcgtctgtgttggttcttttgaggttgatacttcaaattggtctccttttgccccaaatggtgtgaaagagatactaaccggagctactgtagtgttctttgcatatgttgggttcgatgcagttgctaattcagcggaggaatcaaagagaccacaggtaacaattattttagtaagcaatcttttaccctgttttcttatatataatttatatatatttgttttcagcgtgacctgccaataggcataatgggtagccttctgatatgtattgctctatacatagctgtctgtttagtaattactggaatggtaccatacaagttactaggggaagatgctccactggctgatgcttttacgtccaagggtttaaaatatgtgtctattttgataagcgttggtgctgtagctggacttacaacaacacttctagttggtctttatgttcaggtgactccttaccgatacaacataattttgtgcttgaatatgttacgtgtgaaagaataaatgaccatatctttcttatgatcagtctcgattgtaccttggtcttggaagggacggtttattaccttcaatattttctagagtaaactcaaaaagccacactccagttcactctcaagtctgggttggagctgttgctggagtcttggcagggctctttaatgtgcatgtgctatcccatattctttcagttgggtctttggtaagtcgttatttcctgttttgaattggacatttttgaagatatatgtggacagtgccaaatacatcgatgtctaaaacatgttagtcagctcatgtgaaaagcttaattacccactgaactatttgtcaactaagtgttcaaacttcaggaagcatttgccccgtttaatgtgctcactttatgttctgcattttttcagacaggctactctgttgtagcagcatgtgttgtatctcttcgctggaaaggtaaaacagaaagtcagttatctacctcaacctggagggaaggtgtcatctgcctattcttgattgccctgggtggttttggtgctgggctctcctatcgcctgaatgcttcatttatatatgcactcttaactttagttgttgccatactagcttgtatagctcttttgctccgccaagtaagtactaatctgtattctcagcgagttctttttgttctcatcactgatcggaacatgcaaaatgcacgcggtccctttctaagaatatgtaatctattattaatccaattaataatgcactggcaaatttcttatcgactagtttcaccttttatgttatttcattacacagttctgatgtgtgataatggatgtaacataggctgcatgtttgtattgtcttttcttgttttgaatgttttatcattctcttcctcaggcttatgcagatacgccagggttctcttgtcctggggttcctgttgttccagccgtatgcatcttcttcaacatgttcttatttgctcaggttgcttaatctcatcatctttgatattagaatttatacaaaaataaggaattcaaatttcaacacagaaaaacatatttacaaaagaaaatttagcaaaaaaaggaaaaaatactcattgatattcaacttcttttgcagttacactacgaagcttggatcagatttgtcgttctcagtattattacaattggtgtttatgccttttatgggcaatatcatgctaatccaaattcagaagggactgtaatctatcacagagctcctactgaagagcctctatgataaacattgttggcctgttgtacacttgtagcattaagtagtctagtttacatcagtattggagtcaacctagcatctgtctccttagaatcaatgtctattagctgaaattcatttctctattttacgtctgtatattacttcatccattttgtgatgttcaacaataataataattatgtgtatcctgaaaaatccaccattagacatgtacctgattctagtttcacatataataatcccatatcagaacctgtgtttttgtgattaaatcttttttagattaacatgatgtgaaacattcattgactattcttgatgtcaccgatgaacgtggtgctagacgagaattgatgtttcaaattaagaaaaatgtgccttcagttattcaagtgcatacaaaatcagaataaaacccaatagtcctcctttgacagtcctgaatgctgactagttccacatcaaagacttcaaattgttttgagctgaagaaagtggaaggccctacctgtttgaatcatgagcttcttattaaaaccaattaaatcaaggaaaatggctcaaattcattttgtactgttacacccataaaggccgccaatttttaaagcaagaacaataaagaagggagtgaagatatagaagaggtctcaaaacacagtccagagatgaaaagcgtagccatcagaaaaatttccagtagacaatgaagaagaaaaaaataagagaagtgaaactcacaggaggtccaagttctggtggaatgattattcttctcttacccccagctttcatatcttttattccttcctcaaaacctgcacaggacttcattgttaagttatttcttacaaatatggttaatcatcctcacttgttattttttattcttttggaaggattggcaaaagagagtattggctaactacatatattagagagaaaagaacctaaaattattgatctcttcacctggaacaagtgctttggtgcccatgcgaattcttgcaggagcaccctgcaagtaggtactgtcgatacgacggccagattcattatagccaacataatggaagatcacctacagaggatctcaagccattagtagttgatgatccaaaagaaactctgaaagataagattccaactttactaaaaaaattcctactttgagagcttggtccaaaaggtttctttatcccatgagcattatttaatttttatttttactatcagatcaaatgtgtatgatggacttaagaaaataaacaacaaaatgaaataaaaacctgttgaccagcctttgggcaatcacctttaccaacttcaaaatcccggtatattagtcctgagtcacacttgatgtaatcgtctgatgttaccaccttaacctcaaaacctggtataaacgtttcaagcatcaggtttcaattctgagaaccaattgaaatcacaatagaacattagtacatgtttaagagatcaacaaagcaagaaaataacaaaccttctctaatgaaattagggaagtcttccggggcattattttctttctgtcgccgcttgttttgttctaataagcgtctttcatcgtatggacttttactctttgtctttccagatgcaggtgaagttggaaataggcctaatgtaaaaggagtaagaaggataagcctcctccttaatttcttatcacaatgtaattgatgtccattctgtgctctaataaccaaagcaaagtcctcattaagcaactcgggattccaagcatggtagtactaaacttctagtaaaaaactaaattaaactttcgaaacaattcataaattgtacctgtcatctttcaagttgtgaattgagcagctatggctagtttgagctatgcaatctcttagaatgggagatgttgaaagagttgtaccatacactgaatgtagcaaaaatgatgatgaagaaaactaaaacataaccatagtaaacatgattgtgaagaaacaaaagtaatggcaaaaatgtaccacataaagaatttaaatcatgagttataacacttgaatagtgaattattagttcatgttcattcaaactgggaacaaaaaaaacccacaaatctcaagaaatgtagtccaatagatgccaattaaatttgaaggcagcaatcttatagagtttttaaaagttgcctagattttttttatgaaatcgtgtgtttaatgcagatgaaaacattttccggcttttcttgtaaccattcttattttcttaattaaatcatggggtgaccttgcattaatggaaatatgaaatatactctctttttttttttttttttttgaatctcgagaagttagttacacgccgaataagccttgagtaaaccagataaaatgacattaagaacaaagatatgaactttttccataagctacctccagtttattcatttgaaaggtgtattctcatacactgaaaagcttattattattattatcattatatatttattcttacatataatgggaacgaaaaattattgatttggtgtaaagagattaaagatatgaatgcggagatataccaaagaagagaaataaggtaatgcaaaatttaaagtaatttaacaacaaaagttcaattacctataaacaatggtccggtgtgtgtagtcaagtattaaggagacttaccaggaaccgaaactttaggtgtagaagacagggctgagggaagcatcataatcatggcttcgagtaaaactaaattaggcttccaccatttaagtctgtcttgtctgttaaccccaactccaaacttatgccgttcagcttatcttcatcgcattacaaagttagccgaaatatcaattggctcctcgctttttcttctaataccggttatgtgccctttattggtggaaaatggctctattagttaagttaatttttttttttttttttttttagtttttttaagttaagtcaaaattggccaaattagaaataaattaataattacaatttaatgtaaaactacttttactgctactaatttaagtttttttaaaaaaattatataataataaattaatttataataatttactatgtcatattaatatattgtaaagtataaacgtaaataaaaatatttatacattt

SEQ ID NO: 185124 - DNA, 4735 bp, Cannabis indica
atatatatatatattttatttcaaagttgagaccacatgaagagttggaagcatgatgactacatgaacatattttatgaagagaagcaactgttctactactcatctcatctgtattccatataatattagtaccactttggcacccaccatacttgcttgttgttacattaatagttaccttcctcaactgaacatcccatacttgtagattaagcaaaatacaaatgaattatgagttcaatactcatgtacgtacttaggtaggggcaaggtagatgaattcgttaattacttaagtttgcattgtctcctaacaggtttttgttgtttctctattaatattttatacaaatagtgtgctaggagccattagttaatcattttgagatgtctttaattcacatcttcattgcaatattatttttctttttttagctatcattttgtaatgtaactgttgagaatcatggggttccaactcaaaaccgattggcaatgagtgaagtagcccatgttcttatatatgactcaattctttactatttattctatgtgggacaatctccacaacattccccctcaagatgatggctatttttttgctcatcaatctagaaccgtatcagagtggacatagtcactatttgtataggtggagatcagataagatcacttacctgtaagggatatggctctgataccatattgggaatcatggggttccatctcagaacaaattagtaatgagtggagtagcccatgttcttatatatgactcaattctctaccatttattctatgtgagacaatctccagaacagtaacaatagttgttgaatcgggtgagcacgtgattggtacgtatacataaaaactaatcagaaattatatatgtaatatatgtatatatatatattgtgtggttgttggtttcaattttagaaaattctaatagtggtcactagtgctaacactactaccaggtttcataaactaagtgcctaataacaaattttttcagttcttatcacatagtacaattaacaaacaagggtataaatatgtcttattatggtccctcccacatggccaaaataaactaggacactaagctatacggcgcgtggtatatgagtgagtgggcataattccaagcttcctaattgctctagccaaccattactgcagaggtggggacaaagtaagacaaaagcaatatctctaaaagatagaaccaaatttttgttgtgagagattccttgagagatctaaaatctctgctgtcattggctcaaattcagttaagcagaactgtactatatatatatatatatgtataaatagtgtaagctagctatatggttactcatacacattttcttcacaaccacaattcatttaaaacatgggtgttccaagtcctatatgggtacatatgttgcttatctccatagtaattacagggctgaaatgtgagcatgaaaggggaaatggcattgctgatcaaagtcaagacaagcctccctctttagctcttgctgaggttcctaaaggaaataaacaagtgaaaaacaatgacacagactcttatcaacaagttgatcaggtcaataagagaaacagaaattatagagcagggggcggtggaggcggtggtggcggcggtggtggtggcagttatagatggggatggggtggcggtggtggagggggaggaggtggaggagggggaggaggaggaggcggcggcggtggatggggatggggaggaggaggaggaggaagtgggtggtggaaatgggggtgtggaagacataataataataagcatgggaaaaggaacagaggaatgaagaaggatgaatacataatgggagagtttgcacaatgcatgagacgaggcgttgcagaggaatgagactagattgcccacttcactgtggtggaccttgcttctacgactgtcagtacatgtgcaaagctcattgtcgacgtccatgatattgattcaaaccatgtcctatatagctagtctatgattaaactaattaagacttttatcacatacacatatatgaggaatgttttcttcttagtattatggttgtattggcttgttttgcttttcctcttctattattcctttgtttcattttatttaacccttttattatgacttcatgatgtaatcatttttcattttaagtttgtgatgagctaagcttagtgggttcttcttttcattttttttaggagaggaaaattttatttgtgctacgtaccccattatttctctgttcattgatttgtataagactgaaatttagtaagaaataagaaacacttgtcctttttttggttggaaattttttcatcccctccatagcttgatttttttctttctactagatagttttaattctgattgtttatataattatataagagtgtatattatactcgtcctacattacttgtagacataaagaataagccttataactaaaagggttttgggcaaccattcagtgagtaagcaatgaggcattcactacaaaagaaaacagctaccttaattataatttttttagtcgcaacataattttttttagactaaatgtgacttttagtcacaataaaaaattacttatgagtaaaacatgatatttagacacacgttgtcactaattttaacagtgtgaaagccatgaatgaaaaatagagagaaaaagaggaagatgaatcaaaggctattttcattgatcaaatgtaagagtacatgaatgcagctacttatagtagctctagttagttacaatgacaactaactttaactaacactaatgctaactcacacatcgagccaactaactcctaactgtattttcctaaccaaatactaacttgatacttccccctcaagatgggctatatatatcattcaagcctatcttgtttttgaaagaattgaattggttagaaaataatgatttagttagagtgtctgctagttgattctttgttgaaacatgtagtgttttgaagattccctgttgcaccttctcctttaccaagtgacaatctatttcgatatgcttggttctctcataaaaaataagatttgcagctacatattagccgacttgttgtcatagcagagtagcgcagggtcttgtgttcaattttaagttcttttaaaatagagaagagtcacacctcttcacatgttgtattggctatgactctatattgagcctctgctgaagatctagaaacagtatgttgtttcttgcttctccatgaaatgattgaagaaccaatgaagatacaaaatcctgtagttgatcttcttatatcagggcaagctgtccaaccagagtttgtgtaggcatgtatcatgacctttgtatcagctacaaaagtccttgtcctggattgtttttaacatactgaagtactctttgagcagcatttagatgagatacccgaggtgtagataagaattggtttagtttgttaacagagtaggaaatatcaggtctagtaattgttagatgctgcaattttccagcaatctttctctatgaagtggggtcagccaattctctttttcatcttgtccaagttttagattaccacttattagtgtactctgctgcctagaaatccaaggtctgtaatgcataaggtctttgagagacaaagatcccttgtttgatctagcaacttctaagcctagaaaatacttgaattttctgaagtctttcaacttgaatctgacattcaatctaattttcaaggctttaagtttttgcaagttgttgccagctagtatgacatcattcacatacaccaagaaagatgaaacctccatcaaaatgcttgatgaacaaaaaatgatctatagcaaaatgatggaagccttcatcaattagaacactagagaacttggcaaaccactgtcttgaagcttgcttcagtccatatagtgatttttgtaactagaaaattgggtttggtggcaactcccccttaggtctatacccttgaggtagagacatatatacttcttcatttagatcaccatgtaggaaagcattgtttacatcgagttgatgtaaatgccaacctttcattgcagcaagagccaaaaccaatttgacagtgaccaacttagtaataagtgcaaaggtgtttagatatttacttcgactataatcaaatcaaaatgtatccatccaactaggagcataccagcttctgaacataagttggattatactgttatgcatggtcaacagagattaaatcgaccataatatggatgtgcatgtagatgacatgtccgtcaagtccaaaagggtctagggcatatagaggacctgagcaaatgttttgaaattttgagaaaattccaaatgaagctaaatcttctcaaatattattttggagctaaaattctataagaggttgaacaaactacaatggtatactctagtcaaatagcaagtgaccaagagtcttctttaagaaattttaacaagtaaatcaaagaaactaataacataaataagagttccttatcatatgaattaggtctttatagtaaatgacatgtttgataaagacagtttaattacatatcgatgcttttcatatataatctctattatatacgataccttctcttagatatcatactacatcatcaatctgaatcgagattacttgc

SEQ ID NO: 185125 - DNA, 3584 bp, Cannabis indica
gttcccttgctacaataacatccactgctccttttaacacacccacttcctatccgacttcttctaaaggcaaagaaattgttggaactctaagtgacaaagagaatagcaatcccaacaaaatgtttaagaggcaaataacttcggattctcttcgacaagtgttgaaacgttgtcgttcaaactcccttaatggtcagcttgtaatttcagagcctgttgatcttcatgctatgcctgtttctagttctcaacttgattcggcattgcaattctctgatgactcagcggacgttgctttgcaacgtcgcggacagccatgaattgtatcagttggaatgcccggggattggggaaccccagcgcatttagacatttacgcttgcttgtttctgagcaagccccctgtgtgcttttccttattgaaactaaattaaaagctggtagtatagaagtttttcgtcgacgattgcgtttccctcatggtttggaagtcccgagacaaggtcaaggtggtggtctcgtgttactttggaagtcacacatcagtttctcattgaataatttttcctcaaaccatattgatggatatcttgaaagtaatgatgggccatctctgcatttcactggcttttatggccatcctagtacatctcagcgacaccttacatggactattcttaaaaggtgttttgacatagctccactttcaccctggctggttatgggtgactttaatgaagttatttctaatgaagataagattggtggatcccccagaaatgtttctctaatggaagcattcagatcaacagtggtaagttgccacctttctcagttaacttttgaaggtcaaaggtgcacatggagtaataaatgccaaggattggggaatgttaaagagcggctagattatggttttgtcaatgaccattgggactcaacttttcaaacacccacaattcagcatcttgatttctataaatctgaccatcgagctctaaaagtcattgtctgctgtcgtgactctatgcctgtagagagattttttaaatcgagattccgctttgaaaaaatttggttgaaggaggaggagtgcgctgatataatcatccacaactggaatgttacagatcaacactgcattacacaactgaattcgaatctgtctaattgtgcagctgcattacagacttggcaccaatctaaatttggtaatttgaagaaagacattagagaggctcacaaacatgttacagcactccataactcgcctaggactgaccaaactcacttcgatgctgtacaaaattctgaatccattcttgatgacttattggctcaagaagaagactactggcatcaaagatccagaatatcctggctgcagtcgggcgattcgaacacgaagttctttcatcaacgtgcaacttcaaggcagagtaataatcgaattaagaaaatgaaagattcacatgggaactcacaatcagatccagttgcaatttcccatattatcacagaatattttcaagctattttctgcagtcaaggtgtaaaccaagaagccatggacaccattcttgccactatcccaaccaccattgattgtctctctcaggaacagatctccgaaccgtatacagctgaggaagtttaccaagctctaaagactatgagtagtgacaaaagtcctggttcaaatggcatgtcggtaatgttttacacaacatactggggaattgttggccccctggtcactgcaacagttttagacattctaaacaatggagctgaccctacctcaatcaatacgactttgatcactctcatcccaaaagttaaaaagccaagccatgtcacacaataccgtccaattagcttgtgtaatgttctatacaagctggtgtctaaaaccattgttctgcgtttgaagcctcacctcccacatgtcatttcagaatatcaaagtgccttcctatctcaacgactcatcacggataatgtcttagtggcgtttgaattgcttcactctcttaaaagcaggaaaagaggttccaaaggatatgccgctatcaaattggatatgagcaaagcattcgatcgtgttgaatggcactttatcgaacaagttatgttgaaaatgggatttggtccgactgttgtagagttaatccttcactgtctacaatcggtctcttattcctttttgctaaatggtgttgttgatggtcatgtgactccgactcgagggttaaggcagggtgatccattatcgccttatcttttcctcatttgtgctgaaggtctttcacggttgctccaacatgaagagagttctggttctctacaaggtttgaaagtgtcaaggtctgccccttcagtttcgcacttattttttgcggacgatagtgtacttttctgtagagctaatccacaatcagctagatctatcaagagatctcttgatctgtacagtcttgcttcggggcaacaaataaacccagataaatgtgttttgtctttctctgataatactaggcagcacgaccaacattttttcaaaaatcttttgggtatgcctatccaaccatgtcatgagcagtacttggggcttccctcctttgctggtaaggataagaagaaactctttggaggtattacagacaaaatttggaatctccttagtgcttggaaagaacaatttttttcagttgggggaaagagatcctattgaaagccgttgtgcaatccattcctacctacgctatgagctgcttcagattgccagttactttatgcaaacaaattgaaagcatgatggcaaggttttggtggggttcaactaagtcgggtaactccatccattggaaaaattggaatttcctttgcaaatctaaagtaaaaggtggtttgggattccgtgacttcatccacttcaaccaagctttattggaaaaacaagcttggcgtctttttgaagctcctcactctctaattggcagaattttcaagcacagatactttcccaatggtactcttcttacttctactttgggcactactccttctctaacatggagaagtatagtttggggaaaagaattgttggttcagggcctcagatggaaagtaggaacaggagaatacataaactgcaaagttgatccatggattccaggacgtacttgcttctctccttatgctttcattggtcccaatccgaacctaatggtggctgatctaataactccgaataggcaatgggatatggttgctttgcaccagaatttcagcaatcctgacattgaccgtattctcaatattccattaagcttgtttccttcgaatgatatgctaatttggaatgagtcgttccatggtgtgtacacagttaaatcgggatatcaatatgctgtccatctagctgaacaagaggagatgggaagtagctcatccttagaacattggtggcttactttctggaagctgaaactaccatcaaaaattcgactatttgtatggaaatctttccatggaattttaccagttgaagcggagttacataggcgacacattgctac

SEQ ID NO: 185126 - DNA, 3197 bp, Cannabis indica
tactaaccaaagttggtcagggcctattaatgggattttgggtgtttagaatctggcacttctggattttctttagtgagttatttgcttaatttatattacttaatagaattggtttgttttgtttgcagatgatacgcaactgtatgatgttcatacagtaacaaacattaggcaagatctctctgagtggcaagcaagacatgccagtatcgttcttcaaactgtgaaggtagtttattctttttcctcagttttacgtcaataaattgaaatttgggtgtaatgaggatgcgaatagataatatgaaagagagctcaataaataaattagtttttctaatgctattaaactgttttagactgtttttccattattggtttacataaagggaaaagtttttcctattttcagagcaaacctagtttgttatcaggtgaaaaccgagctcgttttttcttttttcattcaattttcttgctgggttgttaagattgcgagctacaataatatgattgactggtacggttgaaaattatattgttgtgtattttatttagtttcttaacagtgattatacattgttcattcattcctagtttgcttatgagaaatcatatttcatgtatgtctactctacagtctactgatgaaacgccaattaattaaatggagaaaaagtcacaaaatttcattttttttagaactaaaccgattgttcacagcaaaatacatctgttgcaggaaatttcccaattcagatatgagttgtgtccacgcaatatgaaagaaagaaagttctggaggatatactttatcctagtcaacaatcatgttgcaccgtaagttgctcttttactttttaaatcttcactctagcagtagaacattaactcttttttctttacgaaaaatatttatgatccagaaatcataaaccactatatgattaatttcctcctgatcatgttgaagactagtattttatatcttcatttctgctgttagactatgcagtgtccatttaatagcatgcaaactcatactgaactgtgtatacaacgaaattttgatgtgtttatgtgtgggggtattgattgcttatgaagtttgtagaaacctaaaactttataattgtataattttgacagtagtatgtccaacttggcattatttgaatagttagagatgatatctgtggtttgctttttgaataattgaatcatctcttttgatctgaatgatatatgtttcattctcttctctcccttagctttgagaagcgttaccaagaggatgttaaattaaaagctaaaaaagaaaaatatgacactcaaggggaaccttcaaaggttgaaaatgttacactgaaatcaaccaaacaagaaaaaaatgacactcttaaagagcctgtgaaggttgaagatgtaatactgaatccagctgaacaagaaaatacattgatgaaaacttcagaagcagaagttaatgatgcaaaccagctaagtaaagcgtcaaccttattacatactgatcaagacttggatatgtttctcctgggagagaatggagacagtgatgatggtcaaggtgcgtattggctttgattgacttgttgacagtttagctcttattattcattagaaatggttgctgcatgcccgcatctttagtccaagactcctcacattgacattttccctatgaaatgaagtgcacaattgttttctatggcccaattttgcatgcagtaacttgaattgatgaggaacctctttcattcatattaatttactaaaatagagcattaataatgtaaaggcagctgattatttggccactaccacactgcttcatttgtctaaattgtagctggattttttgcattttgttttgatattcctagttactaatgctagtaatttagtttagaaagaactccttccacttgtatggcatttctccataaaaacgaactattaagatgtttaaaatgtccaagtcctctaaattaggtggaaaagatctgtttttttagttcaatttttctttttcccttcagtcctttgagtcgtgtctcaaattgaatatatcctcaacatttgacaagtggattattttggcaactaccattatccttcttttgactaaaagttagctgatctttttgtttttgttttatgagacatagttgctaatgtttgagacacaagttagtgtactttataaattttgtaatttaagtatgtatctatatatattacagctgcctatttttgtaattgttattgtagatgctgatggcgctgatggagactttgatgatgattttgacaaaattatggatggcttggtaagaacaactctatgattttgtgttgtttgattatcttatttttaggtgtcatatatatatttgtatgtgtgattggatggaaagggggcttatcattttttactattttcaatgtcacattggccttcaatgaattcaccgtggattgctgaattaggagtagtgtttagtactttggtatttggaactaactagggctggaagagcatatcacatcttatgtttgctgtttgctcctctagcaatattgttgaagtaaaacatgaatgtttccatttgaagaagtatattgctaaagtaaaacattgattcaatatgagtttgccttgtgatattacccagttcaaggtcttgaatttcatcactccatgcaaggtcttgaatttcaataaagtttcatgcttgcaaagttatttaactgcatcttgaacctcaacgcaacttcatatcccatgttgagcatttcaagttgcattggtacatacatggttatgttttatgtaaaaaaataaaagaaaaaggttgttagcaaagtgatgaacacatgaattttgtatagggtttctctgtacatctttattgctttaaagtaattacgttttatagttgaactaatactaatattacattcttaacgatttgaacctcaggatgataacttataggaagactgcatagaagttgttgaagcaatatttgaatttgaagaaagttttaaactacaaaatcaaagttacacatggtttacttgcctgtgatgttcatagtccttttccttttgttacgtgtatatcttaagtaatgtttatttaacatttttttgttgtatcttaacctttt

SEQ ID NO: 185127 - DNA, 2938 bp, Cannabis indica
gacaagaagaagaagtacactactccaatttttttgagctgaaaattttgaatttcataagaaagtaagatgaggggtcccaagttttgaaaactcatcccattaccttaaattttctttttttttttttttgttgaagtaaaaaaaaagtaataactatacttattatacaatgatttcttgcggcttccagcaagtttacgtaaacgacacctcataatccaagaatttaataagaaaattaaacacttaacgtcaaatgtatttataatccctatcatattcatatgttcgtatatatatttttaaacacaaaaatgttgacctacttctctggaacatattttgtattgatatttgtgtattatatagtttgaatttgttgtgttgtacagcaaataggccatattgatgtaacgtagaggcagaaaaaatattataatagagaaagtaattggattttgctaaattcttagcaaaaaaaaaaaaaaattggattttgctaaatattcaggttgggatttgggaacaattctcattatctactttaaatactggaattatatttatattatttatgagatgattattagccgagcgaaattccctctataggtaccaatatatatttatatctatatctatttatatacatataaataaatatacgccactattttccaactactctccaagattgacttgaaaagtgaaaattaaaccatatattgatatgtacacatatgagtcatttgcactactaaagaaactaattataagttgtaacacaatataatcaataagactcaaaaattaatcctcttctttctcttctcttcctttctggagttgtcttaaaaaaattaaaaaaagaaaaataataaagtacacgtgtcgtacatgaaaggcgaagaagccggctacggttgacagttgactcctccattaacaaaataatattactattactaattattaataataatgattaatgaacaaagccaagaagaacattgctttgttttgtgttgtattgggttgggttgtgttagctaatgataatgatggatatatatattatataatattatgtttataattattatacttttttataatccaattccattaatttcttccattagtaaaataaaggaagagcaaaacctgcaaggtaggttgtctccctatgtagacatggataatgatatcatatgcttaaataggtgaaagtgtgggaccaattattttgagacctatacggcactgccatgtgtacattggctggacaaagggcggcacatacaatttatatttatatataagtaaatgtgtaaacccttaactcttcttttctttctttctttgattatatatttatatatatacacacacataacacataatttgtcatgccataataggaatgttaaagccaaaaaaaccatttatatatgccgaccactatgaggtttcttgtgacactggtttaaaattgaattagattgcctcttgggcgctgtaggagttcttcacgtcacttgttcttatataaatatatacataatatttcattttcatgacaaattgacaatgaaaaaggagagaagggattggattggtttgtggaatgactgacttgggttctaaaaaatattgtcaatcacgtgggcagcccgtcatggtagaccacacattcacagctacaatagcaataagatcacctgattaggtcaatcacataaagaaagaaccccttacccctctctctctctttctctctctcactatatatatacatatacatatactacctgtccttgaattcaaacacatatataagggcaatatgggtctctgtcatacataaacataattggggtattctttgtttttgttatttttttaatttcataataataaaaactacattgacattttcaaaagcttaccttgtagacagggaacgaaatgaatgaatttatagaaggaaaatggttattattattggtgtattttattactgagttttatattttttaatttaataaataatataagaaattgttaaatacaatgttatctttatgaaatggtttgtgtgtttatgtaagttaagtggactacttctaaaaccaactactactactatactagtagtactactttccatgctgcttgtttgtttggacaaataataatattattaagttaaaagggttgcttggtatctctgcaagtgagatgagtacaaattatttttaaccatatttcaataatttggtctgatattaatgaatcaaaatattgaactattattacttattatccttaaccacttgcagtgctaagttatatatattataatatataaacgtttaaaataaaagataaatccttatttcgctttgagtaaataaaattatcaatcaatagagactagggtggagcccgactcttgtaaattaatgtaccagccaatctacatcatccaatattgtcatgcagtaaaaacttgcaaaaaagggtatccaaagcctcaaataatctttgcactaaaagagatttataagctgtttttttttttaatattttattattattattatggtttttatggatgaactaattaagaaactaataacactaagtgggtaggtgcaacccaacaatttaaatatatctattactgacacataaaaatagtaacagctagtatgtgaagatattaatttagttgcagttgaaattaaatgtggtcaatgagatttcagtgttaccattgctttacccaaattgcattcaagtatggcagtgatgagctcaatgacagataagagtttttctttaatttgtgccctgtttataaggactaggtatttttttatgctaagtctaaaatatgcattatcagagaaggataataggtaagagaaaa

SEQ ID NO: 185128 - DNA, 3759 bp, Cannabis indica
ttatttgatttttaaattacttcagttggtcaattaagataaagttgtatttggatggaagatgatcttcctaaacgctaataaaattatcaatgtgtattgaataagtattaatttttagctgttttattatgagatcatgagaattaagtttgactaaactaatatttactatgtatgttagattattaggttttaaattatgttcttttttatatatatttttccttttaattaaatcaacttaaatggtaactaaaatagattggatggatccaatccaatccaataaaaaaaccaattggatcggatcggatgacttaattcgattggattggatcggatgacaaaattcaacatccaataaataattggattggatcggttaaatcaaaatccatcggatgttatccaatgaacacgctttgtcaagtattattttttttttatattactatgaggagggatttcttccatccaaataacttcattaattgtttactatctctatgaaatgctataaatatagtgcatatgcattttttagccaatgattataaaattgaacttgcatgagtcaaatattaaaccacaataaatatcacatttttatttatttttttgtcactcattaatgcaattaataaccttttatatttttatttatatatttaatatgatttttatatattttcaataaaattcaatatttttgctaaccttttaacatttttctattaaaataaagtttattttaccattagtgtattaaagtacaattgtaaaatttgggtcaaatataacatcgactattttttgatccaaaatctataccattcattgcagatgttctagaaacttaattttaattaaatctaacagacaaaatttacatatgttttgtctaagggactaagttaaatattaaaaaatttagttaaaaatatttttatatatatgtaaaatattatttgctaaaaatatatataaatattaattaaaaaaaaaaaaagccttagtccaaattagacaacacaatcaaataaggttaggtaccatataaaatatatatttgagtttcaatgatagaaaagagaataaccttatcatcttttaatttcttttttctttttttcaaatttatttgttggtcaaaaatagcaaaagctcaacaacatgctaaaatcatttatttattcccaaaaaaaaaaaacaacaatataatttttttttctttctttttcttcttcaataccaagttgtcactattatctttacaaatattctaaccttcccaccattcttgattataatacaactgtgcttttatatatatatatatatatatgttttccatatttggaaagactacaaattttctaccagaaaaaaaaaccggaacattttcattgtctagtcttctttcttcttctttttcttcttgagaaatggaaagttgattatctctaatcccaaaaccaaacattcacactacaaaatcatgtaacaaatgggaagaagcataccgaggctgcggattccctgaatttaagcattcaaaatccgcagcctcagctccaaccgaagaggttgcgggattatacaagtcatgatctcctctcatagccacaaagccatggtggtgagaggctccattcattgacgacatgttaccaccaccgccatcacaatgctgcaatcctagtgtaagtgacacccctgttccactcccgaacctccccaactccgacatatggtatgctgcagcggctgcagccataaacctttcattgcttccatctgattgaacaatgccatgatcaggaaagacagcttcagcagcctcaacttcgcgtctagttaggctttggtggaaagtggcagcagcagaaccaactgatcctgcccccatttcaacatcagtgatatggtctgttttcgaggagtccatgaaatggccagtgctacatctctcggcggttcctgtcgagcttgcgctttgctgcaagtcttcaccacctctgttgttgtcatcagaggtcataatgtcgccttttgttgttgctttggttgcagcgttttcggatgatgaatttgagtccatctcagcatcaccaatctcttctttgtacatttcctcaaccattggcttccagagacgcactcttgcatttataaaccagtttgagacctgtgcagagaaattttgacaaatataagaagatgcatatacgattaggattttttccactgaactttgatatgtaccacaatctcaatagttcagaaagaatctaagagtctgaaaaaatttgaggagcacgatttgatatatgtcaaagttcacgattttgtattctattaatcttaaattcaaaatgggatcatttttatcacatgattggctttgttatgaaaatggagagtatattaaaaacttaatccaacttttaatccacctagcatttcttattctaatcatatttatcccatgttaataataaatgtataattgggttctttagcctttcaaagattacccaaagctttctaaacatcatgcttgtaagagttaatctctagaaaaggctaagctcacaattatcattacctgacttctagtgaggcctgtctgccttgctagcatgatcttatcagaatcctttggatacctggaatatattcaatataagattaatctagttgggcaccaaaagagtgaataattgaaaataaaaatggggttaaaaagctagatgatttacgggtgaagaaaatgctcgaacagccaagcacgaagaatcgaaacagaactctctggcaatcccctttgaggtctccatgcatgttgttgcatcataccaagctgctgaagagctctctgttgcctcagctgctggtctacataccgaagacgagatattccaactcctttaatatttcctgaagcatcttgctcgccaaggcttttgcgagtcacctttatttggccaacaatcgcatcatgtagacaccgaaagtggcgtgaaattgtctgaagggcaagtgcagtgtatggtttagctgatccacatcctgcaattgcatcaaatgatgatacaacaatctgcatctgatgataatattgcttgtaccttctatcaacctgtgagtaaataatcatcacaatgccattttgaaaggatatgaaaatggaaaagaaacaaagaaagaaactccaatatgtgattgcacacatactaaagcttccaaaactggaagtgactatactacacctaatcactcttataggaaggtgagattgctaatgatgtgatcaataactttgttgttgtatgagttcattagataaatattttccatcaaagaattagattgatgagtatggtcaggggcggagccaggatttttcttcaggtaagcatgattgaactttttctctagtaaaactaagaagatttgcgacataactacctaatgtttgaggtttgtaattggaagagacattattttttttagcggtaaaactacctaatattactaaaagcgttattccgtcccaacaaattatgtttgtgagtttgtctagactcgtgtaaggacatgattaatacaaatttattactaaataattaaacgggtattaattgtgtccatgcaaaactcatatacgaaacatgttgggacggaattgaacaaaattacattttcaggaacatttggtagttttgctgctacaaaagtcaatgggtccccgtc

SEQ ID NO: 185129 - DNA, 1602 bp, Cannabis indica
tggcaggagagcatgtcccgctttgtccaggagtgcacatgcggatccgccaccagccatacatcatccttagagccaaatgggttggagcgacaagactgaatgtaggagaatcgtggtcctccctgggggatccggatcccagaaaaccattctgggtcaacaatctgacgccctggacttggtggcatagaagatggctgaaaggaacagagctgcccaccccaggctgggcgggtcaaatttgcttcccagtctgtcttaattctgggtgttcgggcagttggggaactcaatggaggagtgacaggtgcactgatggaaccgccatgggaatatagatgagagagcttggaggaagaggcagatgaggatgccgatgagaggtttttcagccatgggatgagggaattaccatcaccatttgggttggcagcagcataggaagatgaagctgggctaggaaaggaagaggagccagggcttgggttgtaggaagcataggggcttggatggtaagatgaacatgggcttgttgccgcagatccacccactacatccatacgttcagcaggcttgcatccctgcatgtatgtatctcaagatgatcaatgacttgtttaacagtacataacctttcatttatctggcataacacatgtttaattgcttttctaccataattaacgtgaaaagtcatcatcaaataaacttgcaaatggtggaaaagcaaataaattttaaactgtttacagtcttggttatgtagtcaaggtgcaattttgggagagaatttcaacattttcaagccaaagaatatggaaacatgatattgggagagaattattaacaaaatcataatcattacattttgagactggaatcaaataagaaagtaggtagacacacacagcctctatatatgtaatatgtatgctaaatctttattcagaattttatagctgagatataatcaaaaagataacgtgtgacgtgctagtcaagactcctattaccatacgtgtgtaggtgtaagtgaaaaataaatcaactaaatacactcaaccacattgcactattcaccactgtgtagtttgccttaattagcacataaagatcataataaacatgacccaccaggtagttctttaatgcaacaaacgacaactgaactataaagtaagaatggcagcaggaacataataatggacagaaattccacaagcggagaagaaatcacgggagccatgccatgagataaaacggaaaacttggcaataaccgagaaagtaaaaggtttactcacaaaacataactctgtctcagtgaactgccaaaagtacccttcaaaatcctcgaaaatcccaaacacaaactaatcctattcaaaaattgaacaagggtatcttggtctcttcacctccaggttgggtctgtctgagactagaaagaaagtcacagcacagccaaagatgcagagaggaaagagatagaagaatcttgttgcttcacgcgtaaaagcgattgcaaacgtctaaaggtaaaagagagacccatgaaaaaaataaaaggaacagtcttcccctctcactagatctaatt

SEQ ID NO: 185130 - DNA, 2630 bp, Cannabis indica
gaaaataacgtaaaataacatttttttctagaaaaaaaaaaccctaaaataaaaaattggtaaaaatatcaataaaaaaaatccgtaaaaatatattaaaagaatatactttaagtgtatttgtaaatttctttattatatactttgacccccaaacttcttatcccggctccgcccctggtcgttcttgcgcagggacgatatagaagattatcttgctccctaacggtaagggcccgttactaatttatttacaaaatttatcacttttttacttaattatattgatattaattattttattgaagtatttttttgaacttgataaataatagtacatatagctttggaaattaaggataaaaaaaatgatggataatagttgaatatacgtgggacgaactgaagtaccatttttaatattattctgaagttgtaattaaaaatgtttacatttatttacattacgataacatcgttgtaataaacaacaaaaagagaaagtacctcaaaataatatttgtctataaagactcactcatcaatacacgatctatatatgtatatataccatataattatatatcacctcaaacgatataaaatgaaaaacataatgcgtgagctaaagctagagaaattatgcaaaagtgaacttatatataatattaatatatgtatataattaaccagtactatcaataatggttattatatatgtatataagatatgtaattgcttaattagttattaattagatgagttttgaagaataaagcgtttaataagttgcaaaacatggttagaaatgtgggagtaagggtcgttggtgaaaaagccatgttgttgaccctcgaattcaacgtattcaacattcttacccatatctttcaacctcatggcatagttctctaccctatctcttaacaattcattgccacccacaatcactagcattggttccaaacccacttcttcaagccttggactctttggtcccaaagggttcgctaatgggtggtcccttgtttctccttctcccattgatagtctccaaaacctgcaaaacacacaaaaggaaaggctatatatatacattaatgtcatcatgattaattttgtctagtgttgtattgtgttgattcattgtcaaaatttatacaaaaattaacctatatatatagcaagacccaccactacatatcttatatatatatatataaatatgtcaagcatgcatgtgatttttctttgtggtgtcactgctcaatgggaggccaacctcactcatttatgtctaatggttaattaatttgagtctacaatttatctaattaagagtacataattaaggtaatacatatgtggttcttcaattttattatggaagagtatgaaaaatcgctttcttataatggctaagtgataatgacatttatttatatatataattatttatataggatacaagaaatatatacttgtgtattgtagcttctgtttaatctagctacttatacttttttattttttgaatcatatttaaacatagatttttatgtttaaacaattgtagtaacatatacttgtatataaatcttaaaagtagaattaggtgagtgtataataaggtttcattttattagaatgaaagtggttaaggtgagtgaattctatcttaaaatcaattaacaggaaagggtagtctaattatcttataatattgtattatttttttacatattagtactatgagaatctctaacataacaaaatacaaaagtgtggttattcatgtatgtaataatatagtccattgcaatgaaaatccaatgaatttattcattactataaatcaattaataataaaacttttttcctatgtgtaatgaatgggtttatacatatggggattgaataattatggaggggaagttttagggcatgataattagtgaaagtatatattataattaatagtactcaaatgataataataatactttccttaaatagtgtgaaataattagtggatttgccaaatatataatatgtatgactcattagagattagccaattaatgtttatttaacttccatgagcttgacatttatgatgagtttttggcctttgggattatatattattaagattttgaaattggggctcacacagtacttacatgatcagacaatgtcactgtaaactgatagatcttcttagctactgaggtcaacaattaattaagaattttcaaaaggattttatttttatttttaattatgatcttattttgacaatgagaaaggaaatatcaacttgaactctccagaagagagatatctataatactacatatcaagttaccaaaaaaaaaaaaccccttattaattaagaaagaaataaaaaaaatagatcaagcaatatataaatttataaagaataaattaacataaaaaataaatataattatctacttaatttgtttatcttttgtaagagtaatattagagacacaaaaattagtacatatttttaatttactacatgtcatatgcatttaatctttatcatatataattatatagctaatgatcgaatgaaataatatatatatatatatatata

SEQ ID NO: 185131 - DNA, 3355 bp, Cannabis indica
gttgtaagcacataataggtccttaaggaagtcccaacttatagtatcataagctttgcttatgtctattttgatggaacatcttggggagactaattttctcttataattctttaaaatatcttgtaagatcatcacattatgggttattgatctacctttgacgaaggctccttagttttaactaaccaatgagggtacgtaggacagttgaaagtcttagacacatgagcttggatatatagttgtgtactgtggtgcaacaagaaatcggcctgtagtcctcaactctagaaggactgtcatgcttaggaattagggtgatcatggtggcatggaactccctaggtattgtacatgtattaaataaattagtgatagatccacatatttgaacacccatatctttcctaattgccttgaaaaaatcagagccatagccatttggtcctggggatttattttcaaggatgctgaaaaaagctttcttgatttcttttttagtgaaaggatttagaagctcaagctgctgctccagatctaggcgcttacccctttctatacaatccttattcaacttcaaattggcttggcttttgctgcctgtgtagccacgaaaatgttccacgaaatgatcaacaaattggagaaagtcatctatcacaacaccatttgcagaaacaaaagtagctatacaagtttcaaccttccttttattcaagatagcatgaaaagaatgaggtattctaatcacatttttgaagccaatctattttgctacgctgctttaggaagctaaggtaaattttatcctggttataaaaagcttcagcaaccaatttctcatcggcttgaatctcaagattcattgggttttcttgggcttgaagtttagtgttcaacaagtgattcctagcctcctggtacaatcttcccacatctcctatggactccctgttgaatttcttaagcttatgtttcatatgcataagcttaaggtaactccctttaaaccaaagcttgtaatggctgatcccaactcgttctaactatgtttttgaactcatcatgttgagtccaaaaattgtagaaacgaaatggtttaaatccaatttgctcaatgattgtcatggtaacacacaagaacagtggtccgagatggttttccagttgaatcgagcaatggtattcgggaacaaatcattccaattttcgttggctagagcatgatcaattcttgaataaattctaattaagccatcttggttgtttgtccaggtgtagttcgagccagttctcttgagggcatccacttgagcttgaacttgccaagttgaagaatcagctatgtcagtcaaggtgatttggttaccctctattcggtcatcaaggtaagaacccggaatgaaatctcctaaaatgagccatggcttgacatggaatctaagcttcagcaggtatgtccacaaatctttcctctcctctatggtgttaaaaccatagatgaatgtgatgcaaaaagcttccttttggtaagataacttcacagggcaatgaacaaattgaggcccttccgctattacaattagtctggcaaaattcttcctccaaataaccaacagtttgccctcaatattactactagtaaagtaactccagttcttgaacttattttctatcatctcaacaatcttattacccttaagtttagtttcaagcaaagctccaactcacattttattcatacaacaaaaatctaacacaacatcttgttttctcaccttattattacctctaacattccaactagcaatattgcaattatccatagtcaagtatttgtgaaacctgtttccccttcttcaactgcctttatctcctttctcatatccccttctatctcctgcagcacactaaatgacttctcagagttgttcgaatcattgcccttttttgacctccttttcccaactgaactttggccttgctagttttttgcggataatccattatgtatctcgactctttgtaggcttctttccaacatttggattatcattctcatttcttgtatctgtcttcgtaataccagcttgaacttgagctttttaagagttatcccctactttttgactcgaaggtttatttttctcattccctccttttcaacagtcaaccatgatatgcccataacctgagcaacttttgtatttcactggcagccattcatagtcgacactctgctccactaattgaccatgttcattcaagtattggattgatctcaaagggtcatctgtgatgtccatctccaccaatatttaggcaaattggactcgagtgcaatccttattagtgtcttggtccaccataatcggtttcccaatcatactaactaaagcacttaagtaattgtttctccaatactaaagaccaaggtcatggagatgaatccataacaaggttgttcgcaccagcttaatcgtgtttaaatatgtggaccagggtctgattaaaactggtttctggtcaaattatataactcatgattttagaactatgtctctagttacctcatcgttgaatttgaccataaccaagcccatggtcattcgagctacttgaacaatacctaggtatccctagatacgcttgatgaatcccttgaagactgccatagggggatttgcttttaggaccatacatatcacaaccgagttccaattcgttgcttgtttagcaacctcatctagatcaattcgagctatcttgactccatttttcatcaatggttctgtgaatgtaagcttcgagtccctggaaaaagtgttctccttcgagaaagaattccagtgcaattttgttgattcttgaaataattcttgctcctttcctgtatcattctagttttcaacttccatggcccaatcgaaacttttttgaggtgtttgaattttcatccctgaattcagacccccttcgtccctattttgatcaattttagacgcattgaccacttctgcaattaggttcagttcatcacctgatcttgtatcccccaaattatccacatctcgtcgcttttcttcattggtgacctaacctgtcgattggaatactgactttcgaacaattcttctattttacgccatgggagaagggaatagagttacacacgcctttagagttgctgctacgtttgtatcaatttttaatatattaaattatgtccctcttatcttacgaaaaaaaagtccacccccactcaacttcaaccttgggtccaccagtgcacacatgtataatatataaataaccattaaaaccaacaattttattcttactttttttactt

SEQ ID NO: 185132 - DNA, 4459 bp, Cannabis indica
aaggattgtgataaaacgaacctgtagcaagtgtggtgacaaggggcacaacaaaaaatcttgcacttacagagattaaaaatgattgttgaattttagtaatcgtattgttatgtattgtagtgttacgtattcttgttgaactcttgttggacttcgttgaacattattatttgtggcatgagcaggtttttatcaaaaaacagctacattttcaacattttttcttgtaagaaaatgactggcccgatgctagtcagatgtgagtctgatgctggtccgatgcttttctgggttatgatgaaaatcaataaaagcaacaaaccagcatcatccccaacatcgggacaatcattaggtttttaaaaaagcaaaatgtaacataattgtcatcatcggacgacatattgaaccacatatcgaacccattaaaaacctttgaattatgtatttgcaatctagcaaaaacagttctagtctgacttatggaccgatgcatgggccgataggttttgatgtatatgacaatcagaccctattggtccatacatcaaactagaatcggcccatttggaaaaaaattagaaagcaaggatctataaattaccatcggaccctatcggtccagtatcgtgctagtaaaaacttattaatgatttattcttttggttgtgttttttgtctgatacttctaaaaaaataatcaagataaaacataatcaaattaataaaaaagccaagttacattgtcatcccattaaaaacgtttacatatattaaaaaaatgcatgctaagttttggtagaataaatctacacaccaccgctctctaaattgcttcatattgtcatcgtgttcattatcaaacggaagttgtagcatgttatgctcgatgtgctttattgtatacatcccgcaatcacactctatgagacaaaaataattaaggaaaatattgaaaattaaattaagttacttaataaaaattcacttgtaattaagttaccttgatttcgtctgtcatacaatgttgcggtcaatgacttttaaggtgaaatgtctaacctgactcgcagtctcagatgatgtcaactaagacatgacgatcatttcatgattctcgaacaaactaaagtggatcaactacgttaggaataacttttcccacgcttccatgtagggctacacacgggtcggatgttcgggtttttggatggtcgggttcaagttattttgggtgtttaaaatgtgtaaccgaacccgatttttgagtggtcggatccatcgaatttcgggtcaggtatggcaggtttgctatggtcagttcgaattaacactcgaatcaatatttgcataaaaaaattctatggtttggtgtcatttcactgtcaacgaaaagtaccaatatgaaccactgtcaacgaaaaaaaagtacaaataatattataataataataatatttttattttaatgaaagtacaaataatattataataacaaactaaggaagtttgtttcccaagaaaaatgacttgaggtctgaataaaaaatatatacccacgtggcatgatgattatggtctacttttgtaggtaacacagttacagaggtgaaaatagactctcttatacattcttattcataataaatgaaaaaattgtaccttcacctttcctaatacgaaaatctatgcgactgtgcttaattttttgggtttcaaattaacacccgaattaatatttgccttttttttaaaaccaaacccgacacccatgtggagcattttcgggttggacccaacccgaccacacgagtttttaatttttcggctttttcgacagtgggcggaggtaggtagccgagttttcgggtttgcgggtctaaatgttcagccctacttccatgtatatctttaattcatcatagggaatcgatccaagacttgagtcaaatacgctcaatagccaacgatctaagtctgcctctaaagtcacccaatacttttggccatcaaagaaaaagtcatatatattctctccttattctttcaactctccaaatattggatatcatcccctcaaatcaaattcaatatactgtcaccccactcaatatactctataataatgatgtcttgcaatttttttttgttctttgtgacatttggctttaggccattatgtgggatttatccctatagttttttgttgtttgtcttgagcttttttactctccttgatgtcaatgttgtttacgcctggcctgtagagcttttgtcccagttaattttgaatgaaatttctccattcaaaagaaataagaaaagcatttagtaacttgtatatattttctgatgccaatttattttaacaagtttgcccaaatgttatattttagtgtcattttcaacgaatgaccttatttaatattctacttttgctagaaacatatttaatattcacaaatacttaaatgtaaacacttaacatagcatataaattatcatgatatgccaaatgtagatacagaaaatgttgaaaaatcacttgctacccagaaaataatgaatagcacctgttacttagctgaactacccacacattgttgaccaatattttatcattaggtaaggaaggtgaggactttaaatcccagaaacaatcttatatacaggacaactcagcatattccactaaacccattttatgagaaactcagcaaaagaaatccaggttccacctatataagattatttcaaatgaaacttgaacaaaggcaaaccataatcagaacctagtgatggcagaaaatcagagagttcatccagcaatagatattgaagcacccccaacagcacctttggtccccaatggtacttcggcctcgaaaaaagggagtccagttcggaaccaccctccattaccgcagaccattcctaccatccaagcaatacctgcgaaaaagagaaattgttgttgcaagtgtgtgtattggacaataggcctcctagtactcttgttgataatcattgcaaccactgcaggcattctttacaaggttttccagccaaaactccccaattattcagtcaacagtttaaagataagtgatctaagactcaatttcgacatgacactctacgccaaattcgatgtgaagattacagccaacaatccaaacaagaaaattggaatttactacaagaaaggaggtaagctgagtgtttggtcaacaaaaactaagctttgtgaagggtcactaccaaatttctaccaaggtcaccagaacaaaacagtgctcaatatagccttgacaggccaaacccagtatgggaatactttaatgactgcattgcaagagcaacagagaaccggacgaattccattggatcttaaggttcatgcaccagtagcaattaaacttgggaagctgaagctgaggaaggtgaaagtcacagggggatgcctattggtggtggacagtttaaccacaaataacttaatcagcattaaagctagtaattgcaagtttagattaaagctttgagttcttaccttccaaaagtaggattatttttttcatgtgatatacaataagttgcagaaatggtccatttctccactctctgttagtgtgtctatatacatatatattgtcttgctggtatcttcgtgttttcatttgggtataataagctttaaaatagaatgcaacaccaaggaacatgttactctcaagttcacctgagcaccaaaaaaatcgcttccttgctcgagttactacagtaaaaagattggtacctgtatcatttatgtaatttcagagtagatggatcaaacatcatgacacaatattgcatataatttagaattttataagtaattgaataatctagtaaacatatctaatcgttacacagaaataattgaaaaataataaagattagtagtgcaatactaccctactaaatcttcttcttccttagatttctaaaaccaaacccgatcaaacaaagattgatcttatttattttgaaacaaatacaaacacatatttaaattatattgttgtagtgttttattatggggttacacaaacttaataacaaacaaatactcacaaaaataatgattttcagactctttctccaaacttaacaactgaataatatagtaaacatatatgattacatagaaattacagaaaaataataagtcttaatccctagatctctaaaacagaagaataccaaacaaagattgatctaatttattttaaaacaaataaaaacaattattcaaaagtcatgattattcaaaaaacaaatactcaagactatttcttttggcatgattattcaaaactcaaaatttaaaacaaataaatatgctacctttaccccatttttgtaaataagttgctctctgtatgtaaggaaggttttagcagaaacaagc

SEQ ID NO: 185133 - DNA, 3650 bp, Cannabis indica
gaaggtggtggctccttttgaatgggatgatgagagagatgtagagagagaaaaataagtttttttaggttttttaagtttttgaaataaaataaatgagtaagggttttttttttgggtataatgtataattattagaataaaatggtataaatttattaggaaagtaatctttgtaaatgagtttacgttttttttttttttttttttttatgaatagtaaataaaatttcccttttagaaatgttaatagcgggagctcacttctctgttcggcgagtcaagggggtcatcaaacttagaaaatgatagaagaagaagaagtccctttgcttaagtaccagcaagaaccacgaagtgagtatctggttacacgaacatggctggaatcaaaaaagatatggcaaatagctggaccctccatcttcagccgccttgccatgttctccgtcactatagttacccaatcattcgccggacacttcagtgacgtggatctcgctgccatctccatcgttaccaccgtcatcgtcggcatcacattcggattcctggtaatcttcactcatcagtatgttactacgcgtttacccgtctgttggtgtgcatatatttgttcttaattctggaactgatcgattatcgccacgggaatgggagttttgttttatttagttaggcatggcgagcgcgctcgagactctttgtggacaggcttatggagggaaaaagtaccatatgatgggaatttacatgcaacgttcttggattgtgctctttataagttcggttttattagtgcccatgtttatatttccagctccgatcatgaagctcatcggtcagaccgaggcggttgcggagaagactggtctggtggctaaatggcttattccgtttcatctgagctttccgtttcagttttcgttgcagagattcttgcagagccagctgaagatggctccgattgcttggatttccggtggcgttctagggcttcatgttattttaagttgggtttttgtgtataagatgagggtaggtcttgttggcgctgctttgactattgactttgcctggtggctctcggtcttgggaatgcttggatacactgtttatggaggttgccctgaaacatggactggtttatcaagtcaagcttttgttgggctctgggactttattaagctctctttggcttctgggatcatgctctcgtatgtgtttgctctatctctcaatctcttttactcatattctcttatggtggatgaaatgtaagcaaagtgtttgtaatatgtcaggttggagaatttctattacaggatgttggtcattgtatctggttatttccaaaacactcacattgcagtcgatgccctttcaatctggttcgttcaaattcacaaccttgtccttaactatatttttttaaattagtactctaatgcacctcctctgtttttatgtagtgtaacaatttatggttgggagtctatgattcctcttggatttttggctgcaacagggtaagtttcacttacttgtacgtttctatctttcattttgtgcatgaagtactatcattggttaaccgggctgttgaagctcttcaagattttcaaatgaagggtggaccactccaatttttactaacaatcatgaagcggtaccacatggatgcacgaacatcagtcattcgctcaattgatgtttctcccctttttaatcttcttagacttttataggagaaaccatacacacaaatacgcagcatcgcttcccttggtctttctcccatgggagaaatataattcaaattcagttcgacattgtccttttttggcccaacctgtattttgttcaaatgtcatcttaagaactagcaaattttgctttcttgtttattgtcctttttcggtagatcatttaggaaacctatatatcaagagtataataaaaaaggaacaatagtccttataccttgtgaatttggttgagtttactggatcatattttttcaccgagttagggtgcgggtggcaaatgagcttggtgcaggaaatgcaaaaggtgcaaagtttgccacaatgatttcagtatttacttccatatgcgtgggacttgggttttgtttaatagtcgtgctactccatgaaaagctggccatgatctttacgtcaactcttcctgttattaaaatggtcaatgagttagcaatcatgttggtcttctccattcttttcaattgtattcagccagttctctcaggtcagaaagtacatatcattattacactagtttaatttgcaaaatctgaaatatagtctcatgtagggatttagggccttgtatttgtgaattccaggggttgctgtgggatctggttggcaatcaaaagctgctttcgtaaacatgggtagctactaccttgtgggggtaccacttggtgtatttttcgggtggtatctgtcgttgggtattatggtatgcatggttgcctctttctgtggagtctttccaataaaaatgaacatgaaactaatgctaaaagccaacagttctgaatgggttatccaattattacgagttctctacataaattcccttgagtttccatgagcagggaatatgggccggaatgcttggtggaaccattgttcaaaccgtacttctcataatcatcactatgagatgcgaatgggaaaaagaggtaacagaacttctgatattaggaaagtttataggaaagttttgaaaataatatcaaattgtgggggtcatgtcatgtcactaaaatgtggatgtagcagtatactgacattctcatgaattagaacactgtttagacatttaatatatttggaatttgactcgcaggtgcagaaagcttggatgaatatcatcaaggaagctgcgtccaattgtaacaattaattggagttcagaataatgtttgagcatcatcatttcatgtacattccaaccaaatttgtcacattgtcttgaaaattcatttagatgattcacatcttccctgataatacctctgtcaagctaagagtaaaatgaacctacatttggcttcaggtcgttgcctagccagtacataccaggcccctgggaaggaaatatgaagattcattttggtggactatatattgttaatatggttccttctatattttcatctctaataaactcattttgttttgtttttgttaatatttatttttgaaggataatatgtcatttattgaaataaattcttcagcatgaagcagatgattattactcgagccttaacatggtaattaataataatatcatagacgtctaatttcgtatttataacttttgttcaattataaaatcttaatacaagcttaactgcaccagaatgtaagtttgatgcatttacttgcgggataggttgtgaaatttaatattgaaacaattgtctcgttccaataacgtagctaaacaatttatatgataagtcaatgtcatacatatgaaatagtgcatttaaattgggcgtgctgaacttgatttatatttttttcatttttagacttttaaaatttagagtttttttttttttttttattttttttttttagttttggatttttacttagaattactta

SEQ ID NO: 185134 - DNA, 2762 bp, Cannabis indica
tatgcttttattttattttcagttatgttttgagccatgatattatgtgtgtatgaatacatatattagtgtactatatgtttgggttgtgttctatttgttgacccttttttgttcttttttacctttaaaaaaattatatttttagttatgtttttgttatgggcttgtgctaaatcagttgtagagttatcaccattgcattagattatgtgcttatgtatcactgtttctcaggtgcaagtcatgcaaccttgaaacaagtacagatgatgtggaagactgggtgtacagccagttagagaatactactcatcttttgcatggtgtaattcattccaatggttacggacaccttcttagggtcaatgggagggaaggaggatcaaggattctctcaggatgccacatcatgaacttctgggatcggctttgtaagacccttggagccaggttagctctattggttagtaatagcttcttattgtgaaacatgcttagtttttaaatcaaggttttgacaattgtgtgtatatgagaatttcttaattgatcgtttcatgtctccatgatcactcattcatctatatatttctactctgtaggcatttcattggtggatatatttcacattgtgttatttattcattaacgtgtcatgtatctatttctactccttgacccaatataattatatatgttatatgtatatagtatgcaataactgatgctttcggctttatttatataatgttttggttactcttgacttgattttcttttttacctgccaataggaaagttagtgtgatggatgtgtccaagaagtacgggttggagtatcggctgctgcattccataaccaaaggccgtccttggtatggtgactggggttatgaatttggtgctggtagctttgccctctccctggatgcatataaaacgtctgttgaaagcctatcttccctacccctgtccatttttctctctcagggacagaaacttgactctcatctcccagaccttatctcatactaccagtcttgttcggaacatgagcttgtgaatgttagagacctcttttgttttgtactgaaactgatacatgatgctcacaagagtacctcaagggctgatgatactgccctcaagaagccccaagctggcacctcaagaaccttgtattcatggaccagaagtgatattgagcgagttgaagctgccatgcttagagtgctgcgtgcagtttctggggccaattgggtcagtatacgatcccttaagggtgctgtatgtaaggtggctcctccagaactgcttgattactgcctcaaggaacttggcgggaaaatgacatctaatggaatggttgttaatgcacgaccgaatcctgatactggaaattttgagttccggtaagctctgataagcttttaatacatcaagctttatcatagtatggttatgttttgggttgtttcatgtcctacaagaaatatgttctgatgtcatttatattataacgtctctatttcctctatattctattttaatttggctgggcaatggatttctaaaagctcaggaatgtaataagctgtgatttctatcttatcagattggaggctcaaggtgtttcttcccaaggaaacaatactttcacagagtcttccattttaaacagatcatctgaagaaagtctcctgcgtgacttgaggtacttgtatgaatgcatgctccaccctcgaactatgataagctatgtacctcaggtaacaagggatcttgcagttagttcagctgaaaagctccttgactgcaagcagtttgtgaagaactatgagcctgaaatgatatctacaaatatcaataatgggttgacacgtattgtatgcttagttgaacttgtggatgagattgatgaaatgattacaaaaccgcctcctgaacttgtaatcctctcccaaaatgctactgtgtcggatgtcaagtttgaagcgtcaaaagctttccaagatgtatatattatgtttaaaggatttcatgccaatgagttacctgactatggtggtgttgatgattccacccagattaagtacttattgggttcaaccggatttgttcgcttgagaggaagatgtcatgtgaaacatggcttaagtaggtataggatggagaggggggtggagaggtggactgtagagtgcagctgcggggcaaaggatgatgatggggagagaatgctggcatgtgatgtttgtagtgtgtggcaacacacccgatgttctggcattcttgactcggagttggtccctctaagatttgtatgttacagatgcaaaagctccatttcaaccgggaaaactggggccccttgtaaggatgaggcagtaactactaatgttggcagtaatggctgtctgggtaagaataggactgctgatgttacactttgactaataagatcgtcatttgatttacatttaggctagttttttcagttttggcatagaagagtggaatagggtattccatttggcctgaaaaatgaccagacttgtacataacaaacaggctccaacaaggatggaacaatttgactcttccttttggaaaatggtatttgtccttgcaattttttattctccttttgtatagtttcctacggagttagatgtaacaaacaaaagaaaagtacagaaactaacttgaatggctatgtctttattttagaagcctcttgtctaattaaatcaactttt

SEQ ID NO: 185135 - DNA, 2298 bp, Cannabis indica
ctattgatattgaacgtatcctttcaattcctctaagttcttttccaagagaggatatacttatctgacattattctgatacgggtttatacactgtcaaatctggctaccacttagctgaaagtttgaaatctatgaatgaacattcttcatcatcttccaactgtcaatggtggaacaggctttggtctctgaagctgcctaagaaatgtaaaatctttgcttggcgcttcataaatgacgctcttcctaccactgtaaatcttgctcactaaaagatctcctcttctattgcttgtgcactttataagtgtgcatgggaatcagttggacacgtaatttttcggtatgaacgtgctaaagctgtgtggagaaaatttaatttctaggtttcaataccaaatattggcaacattaaaggttatgatatcttctctcatactggtgctcctcacaatgatgttgaattagagaagatcatatgtctaatgttgtgtatttggtcaaaaagaaacaaagaaattcatggtacgaagcccaactccgcatatattatttgatttttctcggcttcttatttggattaataccacaaagccacaactcagaaactagcagtaaccggttctggttgtcacaatgctcaagcacctctgttcatggctgcaagatctcctcctagatggcagccaccagctgctggttttttcaaacttaatatagatgcagcaagggatcaagcagggactatcacgagaattagagctctaatccgggactacaatggcaatgtcattgctggtttttcaaaggctattcgtggttgctttctccccaaggagacggaggttgttgtcatgttccatagtgtgaaatgggcaattaagaaccagctgcaaataaactctattgagaccgattgccttttagttgctaatgttgttagtcatatgtcttctactagatttaaaacacattttcacgatttagtagatgatattgtttatcttttatcctcttctcctggaggaaaagtatctcacgttaaaagggatgccaataaagcggctcacgttttagctaaacttgcttttcgattggatgaagatatcacttggttgggggaaataccttccccaatctactctgtggttattgatgactctcattattaataatagccgttttttcttttttaaaaaaataaaataaaacattttaatggaaacccactagtttcttgggctatgccacaaaatgaagcaccactagtttcttgggcttaaccacaaatgaaatacaatagcccaaaatgtagcatgatcagtcactacactcgtgaatcgtaaactctagcgaagagttcgaagggtaatttcgtcatttggataagtaactgcctaatgcaacttccaaatccaacgccgattaccgttagccttcgaaccgccaaaatcttgcaacccaattaggcctaaacacgtgtccatttcccattggtcagccagctgaaaatgcagcctatataaggacacatttcgtctccaccaaacttcacattcccataatctgaaagaaaagaaaagctcttttactgtaagcaagaagaatagaagattgagagaacaatcagagatcggaaaaacgttcgaagcttgagaaagatactgtgttgattaatggagaagacgagtaaagtggctgagattgtagcagcagaggaaagggagtcgtcgaccatgggacctatactgagcaagtataacaaagcggaagaggcggtggaggaggtgcttggtggtaatggcaccgacggtgaggtcgtgattcagatgagtaagactgatactagtgagtacgaagactgcgactctactaagaacaagattcggattcaagtctccaaaaccaagaagcctctcttcttctacctcaatcttgctaaggtatatacataatatatatgagtacgtatatataaatgtgtgtgtgtacgtctctgtttgattttgattttcttttttggtgtaatattcatgcctgattctggctctggtcatcttcaaatggcattagtagctagagtgatctttttctctgttttgctacgatttcttgaaatttgcatgatatacataggattaattttcagtccattcaagcgcgatcgtttttgtataagtaatctttaaagtcatgcacattaatcgttttgagatcattgttctttgaaaatttcagtctctacacttgtgatatgatcgctcttgaattttgcaagacatgcatatataaata

SEQ ID NO: 185136 - DNA, 6375 bp, Cannabis indica
gcttttttatatactataatttcattatgaagaactattgttaagttgctaataagatttaaaagtaaataaataaatattttaaaaaattacctattttatgtgtttttatataatgtgtacaaaaatgttgtctttttaaaaaaaatgttatttacttggaaaaaaattcaaaaataaaaaatgagaaaaatattaaaggtaaccatggttttcttaattgacccccttacctttgcttttcctatattttaaaacattttttaagaaaatttcccataaaataatactttttgaaaaaaaaatcacatttttgtaaatttgagccttgaaaagcataaaaataaaaattctccaaaaacaaataaatgaggaaaataacattacctaaagcccaccaatcaactgcactagtatggccagccccagttataatttcctgcaagaaatttaacaaaaaataaaaattaaaaacataggatcatcataatgaaattatagtatataaaaaagcaataaattacaaacttcagaagaaattaaattaagaagtatcaaaccggagctatgtattcttcagtgccaacaaaagaatttgatgctcgcattggctcggccatgaaaattggcttctgttgatttttatgtgactttttcttatcagatgtttcttgaattaacagctgaaattataataataattaattattagtatgtaaaaaatgatataatattatttttacttgctaatcttgaacaactcgatcacaaataattacctgtggtttgcaagatgtcaaacaagacaaatcgaaatcggttaaggcaacatgtccagtaccctggattagaacattttcaggctttaaatctctataaattatccctgaaaggaaacaaaaacacataattaaaattccaaaagtttaaacatagtagtaattatatacatgtcttttgtttataagcttaccttggcagtgtaggtactctaaggcagttattacttcagcagcatagaatctacaaaatatttatttaagaaattaattatgttagttttatatcactaatattattatttaactagtcataatcaagaatatttgttcttacctaacagcttcttcttttatgacttttgtgggttgcttatccaaaagcatgaagagttctccaccagggcaataatcagttattagacaaatatgagttttggtctgcaaagttataaatgttaaaggttgagaagaaaatatttgaaattgaataatgaatatataagtacattaatattaattaaaaggtaatgatatgagataataaaaatcatgagttacatctaaaaatgtgaaactcttttatctttcaatttttatatgcttaatcctcttatttttatttttagtagcaaaacttccttaaatttatttttctttgtaaatttaaagtatcagttagttattactattaaataccaactgaattactactatatcgacttcgagattttattgttacatatatagtggtcatccagttgatatatatttaacggtaatatttaattggcatgtctaatttgcaaagaaaaataaacttaagagagttttgccaaataaaaaaaaataagtaggttaagtgtataaaaattaaaatataaagaggtttcgccacaaattactctattttaatttagtaataattataagaaaatcattaaattatgaataatgtgtcacttcataataatattaaacactactagtatattataaaattgctactattttaataggtaagtactaagaagtgatatcaaaatttagagatcagattgttaaaaaataccagttattacctgaaatgaagcatataatgctggaagaaaagggtgatccaacatgtcaagaatttctctctctgcacaagctctatgcacctgtaaaagtgaaaccattcttctcaacatcttttgaagacagtcaaatagtaagcatgaatgaaaatagagtcaaattcattatataataccttatttcgattaagcatcacactcttatccatagctttcatggcaaaaagttgaccagttccacacaattctaccaaatgaacactgccaagccatgtttaaaaatcagatcattgtttccattagattataaaaatggtacaagaaagaaaagaaaccaacctgccagtatcaccagatcccaaaggctttataggcttaaaatgcttcaatcctatctgctctcctttacttaaaatctgcaaataaaatatcagaattacataaccaaatatggtagaaaagagatgtttggagttaatgaaaagccactctatcaaattataaatggtattttagaacatttccttattttgtactttgtgttatacaaatagtatatgtattttggccttttataacacaaaatcttataagaacattaccttttggaaagcttgccatgaaggactatcttttctgtgaggctttggaagaaccaactttgaatgatttagccataaatcttcaggtttctgcaatttggtcaaaaaaaaaaaagctacttaaaatttcacccttttgaacattttagtacaaaatgatgaaccaataataagcagagtttaccatattggcatctggaagttctctcactgcatcatcaacattttctgcagtttctttgatctgaaaagtacacaaatatatatatatgttaaataaatcactaaacaagttacaaaatacagtaatttaatcagaacagaagttgtaaatagaatgtaaaagagttcatgaactgaccagttttttaccctcttctgcagtttgttccgggatacagtttcgaagcggctcaacatgttgactcccatctagttgtactccaataaaatactgtacttctccctgttgaacatgtaaactagctttgttaattcactttcttttgactaaaacatgaagcttaggtagttagttagttagtaccttctgatctctcataggctgcagatggaataagttccagaacttcttgcctgttttgtacaaaggactttatatcatagaaaacaatatagtttgatcttttactttgatgatgacattcctatgtagttgattttgatagtattgagaaattgagtgagaaaaaaatcataccagttttggtgtagttaatgagttgtacagtaacatctttttgattgtcaattgcatctcttatttttttgactgttgctggatctgtttcaggtccttgtaaaaatctacaaattcacatataaaaaagtactcaattcccaattcccataaaaattatgagttacaaaatattttgacacaattggggatgtcaatatagtggttaggaaaaaaaaatacttttaggtctttatttaataaaaaaaaatgtaattttaaattgggaaaaaaaatttaagtcctgggctaaatgaaccttaagtacagatttagtcggtctaggcctaactgacctatgcccaagtccgagcttgatgtcatgccattttggctcttgtatcaaaaaactatcttgatggattgaattaataaattaagaatattttttctagaaggtagaaaagttaaaatttaaatgttgtattattttatgaaatacaaaataataataaatatgtacaaatggagagttaaaaaagtgaaaaacattttcctccactcttttcttaaaaaatttcaacaatttttttcataatcctatcaaaacttctaagaaaataatttatcagcttgaaataatcaattgttttttctactaaatacatgaagattttgagactcattagtgatattattacctgcaatttcttcccaagatttcttctctgctgtactcagtaagctccaagaagctatcagaagcaaaaatctaaaagaaaaagaatgaattaatatagtcatattaaattagccaataataacaatgatttataataatcaaacaagctaagtttgagtagaaaaaaaaagtcttacaatgggattatcaggcagccttggatcagtaatgacaaagtttttctcaatacgttcaagtgttgtagcaagatcaataccctttctcatttccttttgccttttctttacttcaacatccaaaggtccatctccatcttcatcatcatcatcatcttcatcctcatcactctcaacattatccaccacaacaatattatcatcctcaacattctcattatcagattgacttttcctaataagcctcctgttatacaaaatatcataacacatgaaaactctttggtcccatgttttatgcatgtcaatacttataaatctatttttttttaatatgactaagtttttgtaaaatttcgagtgatttaagtagcgtttggtaacacttttttcatcagttttctgtttttaaaatttgaaaagtgaaaactgtttttgcttttcaactttttaattgagaatcgaaattttaaaaacaacaaaaaaaaatcacttttaatattttttttaaacagtttttttttcttaatcaatactttggaatgcgaccaaaccagtacccaaatccccccacgaccctggagctgaacctgacctcccacccgaattcgaatccgactaagacctagaccagacttaaataaaaataaaaataaactttacagaatacatttttattttctatttttaaaaattaaaaattaaagtggttaccgaaagtatttttattttttaaaataaaaattttacttttattttgtgattaaaaaattagaaaataaaagtgttataagatattaaaaatgtagtacaaattaacaatctattgtatgcatgttttattcagaaataaaactaaaagaatggtgttatgatagatagatagataccccatgaaagagcggcggttagattttttgtgcttcttttcggggagttcactgattcgctgcatcgttattctagagccaccatgtgaattcctccttggtggagctgcactagtactactctctgattttcttcttgacagaccttgttgatcatgatgatctgctttctcctcatttttactaataatacctactcctcctcctgattttcttctgaaggggcggctcatcgattcgctcagtgctcgcggcctcttcactgcttgtactagctcgtttactgagctgtttgccatatctttctgacgagctacattcatcaaaatagtaagtactatgcttattacttaattccctcaactacgaacacttttacttactactataatactattcctctatttcagttttagtcatgataatattagtaatttagtgctttaaatttattactgtttttagaaatgagctagccacattttttagtggggcaatttttatttttatgtttttttttgataaaagagtattagtgaaaaatataaaaaaaattagtgataaaataaatttttttgaaaataagataaaaaaaaaatatagagaaataagtaaaattatgtagaataaatataaaattatgtgggataatatgaaaaatattaaatttatatgtaaggatataaatgaaaaagtataaattttatttaaaaataaaatattctaaaatttatgtataaaagttcaatttatagaaaattgagaggtgggcatgcaaatgattccacaagtcgtgtcacctcatgatattagagtggtgtctagtactatttagagataaaaatttattttataaaaattatatgcaatttgatacttaatttcattaagaacaatattacacttatttaattactgtctcaacatattttattccttattccttaaagcttaaataatttataaatgagtctttggccactaagtgacaatgatcattttagttaatttatttaagtgatttgagaaataataataataatttaccatcgtaacgaatcagagattctggtaatccatttggacgaacagttttctctttggacccttctgtatgcttactcacttcgacttgcatcctgcccaatcacatttaataaataaaaatcaaattatcaaattaatagacagacagaaacagatctcttgattgaatcaatctccttatccaattacataggcccactttgtatcaataactggcccagataatggaattttttcaaaaatataaataaatttgaaaaaatgcttcattgctacattattgaagatgagatatatgagtgagtgagatgttctttggtcccacgtgtaacacatcacacacgtggtatgtgcttttaggacatattctatattaaactagtctttcatctatgaata

SEQ ID NO: 185137 - DNA, 6201 bp, Cannabis indica
agagagagagagagtttttagatttttaggatttttcaaattttatacttatgcctttaaaattttatttattttattatttcatttaataattaaaaatatgataataaaaaaaaaataaaccgagtcaaatcgaacctaatccgaataagccgagtcgactctaatccaatttagatatctgattcaatagacagagcgaatcattacatgatccaaatcgaattgggacaaatcccaatcaatttaatttacactcttagtgtagttgttatgttttgtctaagcatgttttattaaatttcccgattctgattggtcaccattttcatagaatcttacatgcattcatgtaaactaaactccacctaataaataatacttgttaatatcttcattttgaggttgaattgtgttttaaagtctttgacccgctaattgttgttggtcaccaaccattatcatgtcatcacagattcttctttattatagtgctttagaaaaaacaaaactgaaaacataggatccatcaatcatgaagaaaagtatataaagaaatgttaaccttattcaatacctttttttttttgagagagagagagagagagagatagagagagaaaccttattaatactttattaaaggaaaaatattcaaatatcatgactcaaaacaggtctcaaaccccaaaagaagtgcatgaacatgtctcagagagtgcaccgtattttttaaaggttaacatgcatatctatctatggatttggcagagatgttctgcacataagagaagcaaggaaatggtagtttctctatatgctgaaactagtggcaaatgccatctctgtaatcgagtagtttctctccaaaaccagatgaatacaactcaagcagctaagctttttgaggcaatctcaaacacgttctccgacaagccattggtggacatgatcttctccagttgtgcctgcaagtgcaaacagcatatagtttttcaatccaagttttaatcacttaacgcttcagcaaagatccagaagaaatgtttaaactttgacacagacatcaaagatgtaagaacaatgattaagtaccaataaaaattgtggctattaccttggcatggttttgtcgggtttcatcgtagcgtctccacctcgagaaggctgacaccatccgggaggcaacctgcaaacccgtgatagtaaaattttaatgtaacaaagcaaacaatgacgatagtaaattacataaaaatactatctgcaaacaagattgagggctgtgttctggaaaagacctgtgggttaattttgtctagttgcaaaacaatttctcctaggaacctatagcctgagccgtcttttgcatggaaattcacgggtgacccacagaaacctccaatgagggagtatactttatttggattgcggaggtcaaacgccgggtggttcaggaggtttcggacattttcaacattaccgggaatgtcagacatggcttgaagtgcaaaccatttatttacaacctgaaaaataataatttatatgcatcagtacttgcaaaactttctttaaaaaattaaaagaaaaggatcaatacagaaattagaaattaccaaaaagtcattctgccacttgttgtagaaatcagccaaaatatcatcacgacttttaccagggctttgagataacgctgccaaggctgcaaattgatcagtcatatttgttgctgacctatactcattcagcgcaagctcagtaagagcaggttcttcaagggatgccagatatgctacaagtaaaacaaacatacaaacagttaaagaaaagctctgaaaaatattacactgcaagcttaattttcaaaacagaacagaccaagagcaatattcttcaaagcacgccttgccaggtttgaatggtcaaattggtactcctttgagctcctattgtttgtgacctgttaatgtataaaaagaacaagttaagaaattaacatgtcttggtgatgatgccccaacaactatatataggtagcatgtattgctgtattaatggaaatcataagaagatgcgtactgtggtgagcaattcttctttaagttcagaggccaattgcttctttataaaagtacgaacagcatgaacagcatcaggatctgcaacttccatcatgtccattatttctccttcaccaggtagtgttattgcctttgcaataaattcctgatcccaaacaaacaaacaaaaggtaggcaaaggttaactagtgagctgatatctgcaacttctccatatagatatgttattaagaaaaaaaagaatgaaatgggcaagtcctataatactttatccaaacttgagtcacttagtatgcttctaagtccatgcacaaactgcgggtttagcaccaactgtttgttctgttgaaaatcagcaaccaagctgagcatcatcttccgtgctaacacttgtccagcctcccatcttgaacacaaagagaaacaaataagtaaatcaacactcagttgcttagctatttggataataaagtgtattttatggtacacataccgattaaactcgtctgaatcatgagcaagcaggaaagatagatcactatctgtgagatccgattcaagacgaataggggcactatagccacgcaatagagatggaattggccgctccgttacatcagagaatacaaactcttcttctttctgtataagccaaacaacaagaacaacaatgcatgtgaaggaaataagaccaacaataaatcctcaggaacatagaagagagccagcaagattaatttctaagttcaaagcattttgcacacaagcacagtccagtgctcacccaacaagagcaatgaaacactatgcaattatctttaatgggtacattattacttccaagattgtatgatcgacacggtaagaagatttcctccaaaatgacaacaaaagatgacatggtataaaactacccccaaagcatcctcctgagcacaaacagagggcattgcaaacacaggcaagctaaattcagaaaataactttaaccttagttactcgaagaactgtactgtaaactggcttatcgtcacttgcaatagactccagtttcccatcatgatacactgaagatagaggcatgtctctgcctgtagagtccagcaaacccattgccacaggaatgaacatgggttcttttactgattggcccggagttgggggtacatcttgactgaaaatatccaaccaagagaaaaactgtcagcagtgtcacctgaagaaaaagagagttttcagcaagtctacctaaacttcaaagagtaagtgcgggcttcagggttgtaagctgatgtaactttgacggtaggagttccagcttgtgagtacctgaaaaattatttcatgaaaaatcagaccaattggaaactatggtcaaggagagaaaagaaacaagataaagacaaaccagtgtaagaaattggcgaaatctgcatcgttggcatcacgcatggcagcaaaaaagtcctcacaagtaacagcttgcccatcatgtctcttgaaataaagatccatcccctaaataaaaaggatataaataaaaccttccataatgcatcttcctaattcccatatgaagtaaatatattgtcattaatacaagtatttattaaggcaaacacactttaaatcttacttttcggaacccttgactccccaataaagttttgtacattctaacaacctcagctccctgatgagataaagcaagaagaaaaccgttcatgcaattaattattgttcttgtacgcatgttcacatacaaacataacaaagagaagtgagagttgaataagaggtcaaaccttttcatacacctgttagcaagaagaagaagaaaagaaccgagaagagtcagaaatttacttactacagaaaatagaaactgaaaagacacaaattaatactggaacataccgtcactgaaagtggaagttgtcccaaatcagaatcatttcaaatgtgagttaacaagaaaggaaaatctcaatgttaaaagatggccagttcctgcaaagaaaaaactcacaaaaatcttcaccatagtgaaagttactgaaacatacctgtgtagaagttatccatctgccaaagcaggaaaaacaacattagcatgctgccaggccaatagctaatagaacattcaaaaggaaatgatatctaaccttaatgtatgagtgtggtcgtacaggatgggccatgggaccagcatcctgaaaaccaaaaccaaaatgacactttaatgtggcggtttatagaaaataaattatatatgcggataacaatatccaaaggcaaaagtcttcacctaaaaaggagaactagaataacataagtattttaaaaagaacctgtggaaattgatagtttctaagtctcataacatcagcaatccgcttcactgtccggctccccatgtcagatgaaaattcctattatggtaataacaaaaaaaaaacaattaagaaactgcaacaaaaaactctatctaaaacaataggtgcaaaaagttacaaatgttactgtacattgaaaaagcttataagaggttatacctgatcacggaagacagtcaaaccttccttcagactaagctggaaccaatcgcggcatgttactctacaatgaatttaggcaaaagctcaattagactaagaacatataatgccaatcagcaattaagaataaaatacgaaaccaacttcaatgatgaaactagtttcaagtggggttgccaacatatcggcgttagataaataagtgaatgaataaggaacaaaatcccacaaaacgtgtagtgcacaaaaagggtacatgttttaaatgaactaacctatttccagtccagttgtgaaaatactgcacaaaatgacatccaaaagttagaactatttccatctggattaagactactgacacatggctctacaactactgaaaaaatgtcaatatcaaacctcatggccaataactcccaagattgcggcataatctgcatctgaggcagtttcaggagatgctaacacaagtttggaattgaagatctgtaaataaataattcatgaagttattcaattaaaatagatgagggacctctattgtatgaactccaaaatgtgccacagatatacatacatttaaactcttgttctccatagctcccctgaaaattaattagaaagaaaaatattattaataagtattaaaaagacaaaacatgagtcaaaggtacctgaaaaaataccaagcacgatgatgaaaacatgcataatcacaaagaaaaaaaaaatccataaaataaatgaaacttacatgttaaaatcaggaacagccacaatgttgaagagatccaggtcatattccaggccaaacacctgttattagtgccatgtaacaataaaggccttaacatcaagattaatagtactgagcttaaacaaaatttccagttaaacatagcaagagaaaactgacatcctcatcccatttcatagccgccttgagtgaatacatagcatgtgcagtcttcggaacatcctgtgctggggtccagatccttagggacacttttcgacctgaacgtgtgacaaatatgtcatctctgctctccaacggtccagcaactaaggcaaacagtagcaaggtttctatacggatcttccacagggaaaatgtttccaccctgaaatgaaagtataaagtgttacaagccatgacactttgtaaccaaagtattactttacatgatgtcaaataagttacctccaattctccctgatctacaagatttccattagacaataggacagggtacagtgttttgtctgcttctatgtagcaagtatattttgccattatatcagggcgatcctgctcataatcccaatgcatcaattcaatgtaaattaattaatgaataaatttggaaaataataaaaatttacaagtgcctagtaaacctgatagaatgtgattttgcggaagccctcagcttcacattgggtgcaaaaattccctgatgacttgtacagcccctaaattacaccaagtagatcgtaagcacaatgaaggatcacaagactttgtaaaacatgaattttttttaaaaaaaaaaagt

SEQ ID NO: 185138 - DNA, 1236 bp, Cannabis indica
tttttttttattattattcttttatacaaagtagagtattaatactctggcgaaatctcatttaaaacacatgaggtcctcacggtcaatagtcgcaaagtgcacaagtttcctaatcaatttaaccaaatgtgatatgtgtcgtttggacacggattaaaattctttagagagccagaggtccaagtagatatccaggtttttactgcttaggaacacaagaagctgctctagcaagaattttatgtacaccaaaaaaagtaaaaataaagagagaacctggagactgaagaaagatattgtaatcttagtttcaatgtcagcagaatggtttaaaaagaacgagcaactactgtacccataactcgaatattacattgtgcttctatatgttggcttgtcaacaagtttgtcaattagtgtgagataggaaaacccaaagcctaattatcagggcatgaattgtatagtataatcccactctttatgcaataaatttttttcgcaaaattatattcagtgtttctaattgtttacaaataagaggaaagaagaagtaaaacctgaggaggaaaacggcggatgctctcaactaagtactgataggattctcggtcacctgcaattagctgacctaaggtgggaataactgagaacgaataataatcgtacctgcagaagatgattatagtcaatgatgtttgtgtcactcaagattaaattaagattatggaatgtctcatagtcttctaccagctaaagtgtcatggatacttacacttctttaaacacaggaacatccacatgactcagctcaaggcaaagaaacctcccacctggttttagcaccctgttaaaagagccataaaataaaggttaacatagtaagtacatgaatcaggcaaccatgttattagtagcaattccaaaaatacaaaagatttccctagaaccttaccagaatataaataaaatatcataaatggaaaactaaagaggtttccctaatatgagctgcaaaatgctcgagcaggccggccctgaattttagtaggcataggaaaaaaaaaaatggaccctctatttaaaaaaaaatgtgacattttcaaaatcagtaaaagaaaaatgtgtattttaataggagatttttttggggcctggggtgggccctaccgcctatgttcgcgggccccgggggggggcgggggggggtgggggggggcgggggcggtcgtc

SEQ ID NO: 185139 - DNA, 1880 bp, Cannabis indica
aaaaaaaaaaaaaaaaactcccaggtgaatcaagggccgagcccaataagactagataacaatccagtccaacacgtctatttctttgcatttaataaacttcactctgagcctcaacctccgatgatggaagtgtcgtgtcgtctgcattctcttagctccggaatcgtcgtctttacaaaaggcggtaggtagaaagggatatttctcgacaacactagaggaaacttattcttgatgacatttaattataagggtcagcagattctacctttctctacctctctctgtaattattgtttaattttggtttaccaaaaagttttcatagtataagataatctttagggccatacctaatttcagttttgaaaggaagatgcgaataagttgttggtttcagtttcaataatttcatatgcgaataagttttttaactgaccaaataataaatttgactgctttttatatttatttcagaaatggagatgagcttcttctgccatttaccaaaagaggttgcggaggaaattatgttgtgggtgcctgccgattctctggtacggctcaagctcctcaacaagtcttggcactccttcatctctggtctcatcaacgaccttgaatttgttgacagacacctctacataaccaagaacatgccaacctccacttcattagttttcaacaacccatgttcacatgttgaccacgacggaagagactgctatgcaaagatgttctcacttctcaccatatccagtggcgatggctatggtaataacaacaaagatcatattgtctctgtctctgaagacctcaatgttccctgtcttcggaatgaaagttgtaggtgggatcaatgggcttgggcatatcattgtgatgggatcatttgcttagtcaaactttatgggactataatgttgtgcaaccctgcgttgcaagaatccaggattctccctcaatcaaataaggctatagttggtgttgctccttttggaatgggatttgggtatgatgctatagctgatgattataaatttgtagccatttggtcttttcctagtcgcactgctaaagctgaggtatacactctgagaaccgattgttggagagaaataaacatgcctcaagagttatgtaaatactatacacaagggtatccgtatctagatggattatcttggcgtggaaattgttattggttgctgaggaatttagtgaatggggatgcaatcctttgttttaatatgtgtgatgaagagtttcatatcacaccgttgccaaatcttgaaaatagtgcagctgcagcttcttcatattggttggagctttttgtgtggaatgactcagttgctttattggtatcctctgaaggaaatgtgtcgtttgagtatcaattctttgtgatgaataatggtgtaaaaggtgcttgttcttggaccaaacaattggttattggaccagtaatacctggcgttatagtgaagttatcttcatggaaaaaggatgagtttttcatacaccttgtggaagatattgatgaatcaaaagatgggcagttaatctcttacaactttcatactaaaaagatcagagatattgctgttcgtgatgtagatcgattatggcattgggcttgtttctatgtaaagagtcttatttctgtcaaaaggcggtaaaaaggttgatcaacttggagatttcaagcataagcttagaaactccaaagcttggaactggtacatgaaaatggtatgtatgagtaccatgcattatttatgtatatatgataagcatgttcatcatttattgctgatttttaattaatgtaataatgtattttctgaacagctttttttttttattatatatat

SEQ ID NO: 185140 - DNA, 4969 bp, Cannabis indica
ctctctctctctctctctcgtttagcgcgatagtaaatctcgagtgttagtggggcctcctactcattggtgatcgtagttttacaaataattaatctctattatttttattttggaatttatgtatttttgagatttttgtatttcactaatcgtattcatcaggtatctcggggttgtggtttcaaaggagccgttacccgaatctcggatctccagggctcttaaggccaaacgaaactctcattttgagttcttgtcggagaagatgatggatcattcttttattattatgtttcttttatctattgtatatatatatacaaagttgttgtgtatatgagtttagaattttatatttgtatagtatattatttttattgttcatattgtaaaaatttaagatttttttcctatgtaatgctatagccaaatgtgctatagctgacgggtttgcacagtcgcttaaactataggtgacaattttacactgtcacctataatataggtgactgttataaatagtctcctataatgcttagtatcctcgacagttttgtatagttggtaattttttttttgacattttttgcatcgttgcctattctacccaattttcttgatagtcgaataggcgacggtcttagagactgactagaatactttatccaactgtttaatatagtcgaaaaacccaattttttagtagtaaattgacctaagatcaactaagtgatatcaacttagaaaatacataacaataagtttacgatatcttttccactgtcaatcgatctagtctgatgtatagccaatacacctgatacaaatactagtttactttgccaataccttaaaaaggacattctacttatacaagtgtaagtaaactacatcactgattatcacgtcagtgtaaatcagtgcactattaaatcgtaggactaaatagtttgaaacatataatcatgattattttttactgtgtagacaacactataatcatgaataactatatattcgtgatttaataaaatttatatattaaacatataattatgaaagtaataatgtctaattatttatttattaataaataaaattatattaaaataagttttatataaagcataaaatctcaataattttggggtattggtaatggctcctccactaacgtgttgggtgaatcgtggcttcctaacgttgaagaccctttagtaagatcaaaccatcctgctttgaaccaagtgaaggtgagtaagagtaacttggtaaaaggggaaggtggcgagtgggataatcagtagatttatttgatgaatgagataggaagctgattgttcaaattctacttcaaatagctcaagtcaatgataatttaatgtgggaggtttctgtatattttaccatattgatatttaatgttaacaaaatacagtaataatcttttttttttattgttctttagttatagagacacaagaagggaggaaatgctagatcaaaatcttttaaaatttaaactgtacttaaaagttaataatttatttgacaatgtaattactaaatagtgtatgtaataattatattttatttaaaaatacaagctaagtctaaattccaagtagtaattatataatgaactttgactaattgaacctgaaacttaattcccaaacttaagttttttttctcttcctggctaggaaagttgtcgccgtatttgtttgttggtcaaggagaagtgttgatgttggtggattctcttttgacgagaggttggagatctataatttgtgagctattggaggcgtctttggaggagggcgatggttgcgcctcattggtggggttgttgggggtatcaaggagggtattgtcaggtcttaggtggtggccatcggtagggagtgggtttaatttgctactctacgaaatttgatggaagagttttttttgccttttccattagagtattgatatttggcccaccacggtgttctataattaattagtaatttcttatatcatttattaaaggaaaattttcaaaaacactattcttttatgttttatttacaattttacgacctaaaatttttaattataaaaatactcttataaagttttaaaattataaaaatacactttattcagcaaaaaaaaaataaataaataacatgaaatcaacctcacgacaactataaaattaactataaaacaactaaaaaaaatctcatgacaactataaataaattataaaacaactaaaaaaatagttcattattttcattgaagaggtatttttgcaaataaaaaaattcaaagagtaaaaataattttttttggtgttgatgtatttttgtaaattttttaaatttttagtttattatgtatttttttttattaaattaaaatgtaccaataacagtatgttacgttttatggtgcttgacaatcttaagatgccccttaccatttttctttccgttaaggcatgggacctagttttggcagactcatctccatcacttgctccttgagttggatcggtgccgaaagtgtggagcttgtggctggttggctcttatgatcccgtagctttgcagtttaagcttatgttgttttgttcaattatatataacattttgattgttattgttttggttattgtgttattttattttgttttaattttggtaatttgattcaactttggactttctagtaagagatttggggagtttgtattcttattttattttattattacctactatttataatggtatgctttttgttaacaactacaattataattaacttttttggttcgattatttagtgtattggctatcttgttgttaagctaacttttaactatttatgagcatttgtaatagatttttatatactttcgcatttaatgaaaattagatatttccctagaaaaataataattatacaaattatatttttatttttgccaaaataatattgtgtgagtttccaaaagcatcagcaatattttatcgaaaatgaatctacagataaaaaaatattctataattatcacaaacgaaaaaaaaaggaatatagagcaattaatttcctgctatatgattcaaaacaatgaccaacccaaaataaacataaaagcaacagctaccttacatattgttctttcatttcttttcatttcaatacaaaaaaagtgaaattataaagaaaaaaaatggcataaaaccccttatataatttagagttttttttttcttcttcttcttcttctatgttttagtacatcaaattaaacccacaacatctgtttcttcctctaaatacacaccaattcatggttcatatcctcggctctcttggtacttttcatactcttccatggaatcaaacacatacctagtgttcttctcagccgtctgttcatacccattatagttgttgttgttgttgttgttgttgttgttgttatcattgttgtaattatatttataattatcgttcatgttattcccattattactcacatgatgataatactttccattctccaaaaacctcgtgtcactcatcccttgctgctgactgggcttgatctgatcgtagccgttggttccatagtggtagtttttggtcacgggaccagtactgaaatatttcccactctcctctcttcgatcatcctcgccctcattctcatcaacttcttcactctctggccactcatcttcggcgaattcctcgctcagaagctcattcccgacaataacgccggcgccggtggtgctcggaatctccttcttggagctatactgttcgttataccccactccgtgaccatacaagccatacccattttccttctcgtccggaactgaactaggggccggagaacgaacctcaactactgtttccggcgccggcgacgacgacggagagagtactacagtttttgacggtgataactctgcagggagtttggtttgtggatcgacattggactggactacatttttgtgagtgattttgctgaagaacttgctctctctggctttgactagagaagaagtggagaagaggaagaggaggaagaagaagacagagaagtaatgtttggctgaggtagccattggtgagtgagggagcttggataaggaaaatgaaggcttggggttttgtgttttgttctccaaatatttatactgttatttatttttttttaaatatattttataaaatgggcgagtaattatgcgtgaatggaggaaaggttaaattgaatgatgaaaagcattgcatgtggagggtgaaggactctctatagctattaattgattatagtgtctaacaatatgtgatcacacacacttatacatacatacacacacactcacccaacacaaccgattagttttattgcatatttatcttgatttgtacctaacctcatagacaggacaacattcatggcactatccatattaataagaccagggtcctacttctttttccttcttggaccatcttgatttattatgcagttttagttagttgggttgaaagtaaaagtaaggtaaataaagcaagtaaaggaatgcatatagtaataaagtaagattgaataaataaagtagtttaaagttaattaggatttgtcagttttttttttaggattcgattccagttataaactgatatattattatagtgtcaattatgaaagtgaactattcttgattttttctgtgtaacttcgatggttcttcctctgtatatttttttgtttaagatatcgtatttaactaatccaaatgaagatgtgaagtttggatttatgtgagcctgacaagtgagaatcttacttggcttttctgtgtacagtttgggtatgttctacataagctttcaaaatcattaaattcccgctaccatataatcacacaataca

SEQ ID NO: 185141 - DNA, 5339 bp, Cannabis indica
tttaaagtagcaagttgtactaccaaacaccaagttgtactattgttataaaaaaaaaaaaaataattgctctttaaagatcatgttgaattttagaagcagcagcatgcttatcaactttgtaggattaagaatgaattggaacaagaattgagtggtataataataataataatacttataggaccagcttcactatagaacaaagatgagttggacttggacaagttgtctatactttttagacatttttgttctcattaaatactgatgcgactattccatgctcagtgtcaggctactctagttaagttcaacttcactgtatagaagtgtatatacttaaacttaatacgtgtttattatgaatactttgctcataacaattctaatttattcgtatcttttctaatgatggaggaatccaatgaagaggaagggaagccatttatgttttgttttgttttttgtttcattttcttgttgtacttatggtccccatatggacaccattgaaatgtatgcaaatggctcctttgtcggtttgctagattccagggatgcagatcagtttttgtgttcttgtactgaaaaacaggggttatctgacgaggccctaataaatatattgtctttttttggtaataagaagaaataaaatcaaacagtgaaagtaacctagtgttgttcttcctacattttcttactgcttaagtttcctagtactgaaattgttggttggatatgaataataatattatacacctagcatatatacgttatgttatatgacagaaaatacatagaaaatccaacacaggaaaccaaataggaatcgacttaaaatgttaaatttatgaatttatttgtctttttctttgaatacaatgggtgtgacaaaattgatgtctcatgtttagtaataaaatagtaaaaacaagttagaaatgttaattttattttcatttttttttttgtctttttactttgaatacaattgctgatgctgatgacaaatgacaaaactaaagcctgaagcttataataaaataacaaaagaaaaatggcaatggaaaaaaatacaaagcatctataaaaaaaaaaataaaagcatttcacaaattagttagaaaaatatatataactgaaaaattgagggggacttacaaccattgccaatacattggttccgtacgtgatcgaaattgatttattgcaagttggattaagtctttcgtaaaatacactaaaaatcttgaccatgacctcatgtgactatacacccactataaaataaacttgtgaattgtagatgataaatatcaaaacttttaataagaccccatctactagctctaaagaattagagaacaattaagcgactcttgaattgaccgagagaacaaaataacttccattaaaaaataaaagctaatttgggagttgaggaaaggggagatgcatatttctgtgccaccactagttacttattcattgtgtttaaccatatattggctactctatgttgtgattagatccaaagttcaatgattaatctgaatctttccattatccaacttcaaaattaaagatttgattacttgcttacaaagtaccagaagtagtaatttttttttttacttaatggttaatgttctagtcaagtggttgaagaagtgaaagttatttacttttaaaaaataattcccactactatggagtcaaaacatcaattcagagctaatgatagattttcaaggctgtgatttggcccatagtaatacaagtgatgattttcatgcaatactaattactaacgcaataataaagatgcagttattaaaaaaaaagactcaataaagatgccgtacacttttttcaataataaaaagaaagaagccgtacattttggatcacagccgtcaaaaaatgtgtagatatataattaaaaatacatattatattaattaattgtactacccaattgtacaatagtgaataaatatcaattatgttacaataaaaaaaataactatatcagagggagagttagctttagcaggttttgtaaaatagaagataatattttaaaattttctaaaacaaaaaataaagtcaaatatttagctaaaagcaaaagtggtggtagaataatttagtaatttcacgttacattaattatacaggttacataaaaaaatatttgtatcagatggagagtgagctttagcaggttttgtaaaatagaagataatatttaaaattttcgaaaatagaaagtaagtcaaatatttagctaatagtagtgaataagaataataattttttttttatatttataatatttagaaagtggtgatagaataacttagtgattttatatctctcacattatattaattatatcaataattataaaggttacaaataaaaaaataattatctcaaatggagagttagctttagcagttttgtaaaatagaagataatattttaaaattttcgaaaacagaaagtaagtcaaatatttaggtaaaagcggtgaataagaataacatttataatatttagaaggtggtcatagaataagttagtgatttcatacctcttacaaataagacaaattcgaaaaaaaaaaatttatataaataaaaaaactcctagtccaaaattaaaaaaaataccatttttcctatatttatacatgtttctctactctcaacaaactggaaaactccttagcaccttcgtcttttccatttttaatatattaagaagccattgaagctcaaagcttgtcttgaccattataccaattctttgttttagccctttttgttgtttatctaatactccacactgtattgggtttttgtgtttctaactctgaagctcaacaactcatcttgatcatcacaggcaggtttttttttgttcttcattttaatttgccattcctgttttcatgaaaaaaaataaacactatactactaagttgcgttgttattttagttttggttgtaactctgtttttttcccctgaaactgttgtaactaataaccaagcttctggctgtttggtctgcttgtccttctcatttactaattaacctttttttttattctttcatcagaaaactacttctgattaaggtactaccatccatggattcaggagtcaatcagcttcattttgttatgatacccttaatgtctccaggccacctcataccaatgatggacatggctaggctattagctcaacatggcacgatggtcaccattgtcaccacaccactcaatgccatcaaattcaaatccatgattgaaagagcaagaaagtccaatcttcaaatccagattctcacactcccattcccaactttggaggctggcttaccagaagggtgtgaaaacatgtcccagctatccacacgtaacttgattaagaatttttatgaagccactaacatgttgcagaaaccatttgagaacttgcttcgaagcttggatcctccagcgagttgcatagtgtcaggtaagaatcttggatggacagttgaaacatctcgaatgtttaagattccaaggatcttttttgatggaatgggatgtttttctttctcatgcacgaataaactagagactagtggagtacttgagaatatttctaattcagagccctttttgattcctggattgcctcatagtgtggagttgactaaagccaaactacctgagaatcttcatccgggatcagcagacttgactgaggctcgaaacaaaatgagagcagctgaagctgtctcagatggaattgttgttaatacttttgaagagttggaaggagaatattatgtcaacgagtataagagggtgaagggaggcaacatatggtgcattggacctgtttcgggttataacaaatctgagttagacaaggttgagagaggtgaaatggcttccattgatgtaaacaagctcttgaaatggctggactcatgggaacaaggctcagtcatttatgcttgtcttggtagcatttgtggactcaaagaaaggcagcttaaagagcttggtttaggcttagaagcatcagagagcccattcatttgggtggtaagaggaggtgagaaatcagtaggcttggagaaatggatttcggaggatggatttgaagagaggacaaaggggagaggccttgtaattcatggttgggcaccacagttgatgatactgtctcatcctgcaattggaggattcttgacacattgtggttggaattcgactcttgaaggtgtaggagccggcgtgccattggtaacatgcccgttgttcgcagagcaattcttcaatgaaaaattggttgtggaggtgttggggagtggtgtgagtgtaggagttgaggctgctgttacatggggtttggaggacaagtccggtttggtaatgaaaagagagaatgtgaaaaatgctatagacaagttaatggataaaggaaaagaagctgaggaaagaagaaagaaagcaagagagcttggtgaaatggcaaaaagagcaatagaagaaggtggatcttcttacctcaacatgggaatattaatccaatatgtgaaaaaacaacaattgcttacgcttgaaaatgacatcaagtctagttgatgtatggaacatagactacaaaccccttataatttgtctctatatttttgttagttcatgtttttatgtattcctccaatgtcgatgtatataatcctactaatctctttaccaaggaaagcctattaatatttaaaatatgctcgttgaggtgatatttgttatttcattttttttaagaaaaaataataaatttagtcctgtaaattaaaacgaaaagaaaaataaacttctttcttgttttggattgatgttgagatgaggtaagcactgtccacacaaatctgttatggctgtgagcctctgagtgaagcgttacatctcaaagtaaatatcttggagctatatatataaatatacaaacaaaggaccaattgaaaatatctttgagctatatacaaacagaagcacatacatctggtactaagatctcctttacctaattttttttcttttcctattgaaatttcaatggcttcccaagataaacagcttcactttctcatgtttcctcttatggcacaaggccatatgattccaatggtggatatagccagaatgttagcagaacgcggtgccaagattaccatggtcaccacaccagacaacgcagctcgttttaaaagcgttcttgctcgagcagttgaagccgggctaaatatccacttaatgcaact

SEQ ID NO: 185142 - DNA, 3497 bp, Cannabis indica
aatacattgacaccataatttgaatcagacatttaatatatagaagaaaaataaaataaaccataacacattagaaagctcctcataataactataaaaacgaattcaactacataaagagaagagttagtagtaagctagctcttcagttttgaagccatggcatcccatgcagctcttgctacttcaagaatcccagccaacactagtaggctaccctccaagtcttcccactctttccccactcaatgcttctctaaggtatatttgtatattctctctaagttctccatctcacgttaactaacttgatcccaggaccgactctgaataatagtgagcctaaaaaattctttttgtgttttatatctaaagcaaagtgagtattataggttttttttcaaaaaaatttacgcaaaaaaatatattacgtaaaaaatttggaccgtgagtttgggtgagtcctacacacgggcttagcctgccttaatctataggactgggcctgatccatagaagtgtactgtagtagtaacaatataatcatgtagtatgatttccataatttgtttggctgtgcagaaacttgaagtagctgaattttctgggctaagatccagttcttgtatgactttttccaagaatggcagagagacttctttctttgatgtcgtggctgctcaactcactcccatggtctgtattctttcatatataattcctcatacatatatatttttggttgtataacaacagttgaaagatatccccttttcagacatgtggatcagcccctgtcaaaggacaaaccgtggccaaattgaaggtagcaatcaatggatttggacgcattgggagaaacttcctccggtgttggcacggccgcaaagactcaccccttgatgtcattgtcgtcaacgacagcggcggtgttaggaatgtaagtaaagtaaattaaaaccaaccaattatgtcatttgattaattgagtctgatctgatgattcaatgttacacatttttaggcatcccacttgcttaaatatgattctatgcttggtaccttcaaagctgatgtgaaaattgtggatgattcaaccatcagtgttgatggtaagaacattatggttgtctcaaacagagaccccctcaagctcccatgggctgagcttggcattgacattgttattgaggtacaatatcagttttgtaacatgtctttttccttttgtgtgtgtgtgtgttgtttgctttaacattgttgagattatttggaaccaaaccatagggaacaggtgtgtttgtggatggacctggagctgggaaacacattcaagctggtgctaagaaagttatcatcacagctccagccaaaggtgctgatattccaacttatgtgatgggagtaaatgaacaagactattctgacgaggttgccaacataatcaggttagtactattaatacatctttcaacaatagtaagggaaaaaagaagtactatgttaaatttgaaatgctgcttcctttttggtgcagcaacgcttcttgtacaacaaactgcttggctccttttgtgaaggtgttggatgaggaatttggtaagtggtcatctagttgtggcatgaattaaattgaattgaattcatcatgatttgatggcaaattttatgttggaatgtatgcaggtattgtgaagggtaccatgacaactactcactcttacacaggggatcaggtaagagaagaagcatataattatgttatgttatgttatgtaggggcatatattatattttagattatgttagattttaccatcccatttaattcaattaatttcactcatccaatcaatccaatatccattggttccatctattgaatgtatttcatatataattattggtttaatttgagttttcccaatattttaaactaagtatattttgaatcggtgatcgaatccgtccagtgttttaagtcatattagattagattagatggatccaatctaagaaaaaagagtaaaagtttgatgttaatttcatatgtatataaatattttacgtataacaatataaaatttaattactcattcaaactaaatgaaaatattaattagttcgattggatattggatgtattgggtttttggatacctcctccaacatctgacccgatccaattgaatattaaaaaataacattcaattcgatccgattataattggacatttaatatttgacggtcaattataattaaatctgttggttgttatttgacggtcgattataatgttatgttatgttgtgttgtgttgtgttatgtttttaattaatttgttgtggcagaggcttttggatgcatcacacagagacttgaggagagcaagagcagcagcactaaacattgtgccaacaagcacaggagcagctaaggcggtgtccttggtgctgccccagctgaaagggaagctgaatgggatcgcgctacgtgttccaacaccgaacgtatcggtggtggaccttgtcatcaacgtcgaaaagaagggtatctccgccgaagatgtcaacgcagccttcaggaaggctgccgagggccctctgaagggcattttggatgtttgcgatgtccctctcgtctctgttgacttccgttgctcagatgtctcttccaccattgactcttccttgactatggtcatgggtgatgacatggtcaaggtggttgcctggtacgacaatgaatggggttacaggtcagtctcataccacccttactttaattactttttccatttaattaattaaactcattaaattacttataattatgtattaatttcagccaaagggtggttgatttggctcacttggtggctgccaagtgggcgagtacctcagaaggtggtagtggagacccattggaagatttctgcaagacaaaccctgctgatgaagagtgcaaagtatatgaagcttaagtctctatataaatatatattaatggattttcttttttttttttttaattggattggatttgagagaaaagcttcaaaattagtgtgataatttctcaatcaatgtaatggaatcttttgtccaaataaattatgtcaatcaactatataatggaaaattgcaactactttaaaaagtaattaagatgtcttgtattgacattgataattcttttacccggtgatttagtaatctatatagtcaaatttaaattcaaggtataattgatacgactaaactgtcatcaattatatgatttttaaatcaaatttaatgacttaattataaaaattgaggataatttagttataataaaaatttattggttaaatttaaattcaaggtatagtataacttcaaattatatggcattagataagtatgattaagaatataggatactgagtatgtaatttaataaaaaaaatagtaccaaatgtttatttacccaatccaattctcatattttttat

SEQ ID NO: 185143 - DNA, 2409 bp, Cannabis indica
gagagagagagagagagaatggcaagtagcgtggtgagcacgcgcctgtaatggccaagtaccgacctttgtttgtgttttggccacgcgacatttgtatttgctctctctctctctcctctctctctctctcttcgagtcccatcgcctcctctcccggcctctcctctctctgcaacggttcacagtcacacccaccaccgttggatcttggcggtactggtaagataagtttgttcatgtctaagtatttgtaaatggattataaactttaatttgagtatgttttgtttgatgtttgatttaatagactcttaaatccttatttttcatcttcacgaaccaccttctccagaaattggcgcacatataaactcaaacctttacttcaccttccactgtaactaaagctctgtctttcataaaataagtcttgtttactcttttcatatgcacatgcttatgcttatttagggtccatgcttgaattttattgacatgtctcattcgaatcaaggttagtccttatatcttgttttatcttcatttctaaacgaaattccacaaatttattagtggttgatctttattttgtgcttattttgggaattcatgctcttattgatggaatgggaagtttttttttaatttgttccttttccatgtttatggcttatccattacgtgtttgtataaatgcccaagtgacttctcaaataaagagactttgaattgaaccaaagttgtgtttcacctcctaccttgcttccatttccaagggcattctcgtctaacgagtcgaatgatgactaacaaattgtgttactatttgacatgactatccatatacaatttgacttatatgagatagttagaaattattaggatcatttataactaaagttttgtatgacttgataatcctgtaaaacattcgttagagctaatctttcccttcagaagaagagactcaactcacataccaatgagttttaacattgtaggtacttgaatttgtttgaacttataagatagtattttacaccttcaaatgcttgaaaatagattctgacatggcaatgattctaatggttggttgttacacttaccaacaatgctctttttctgcaacatcctttcattctaacacaagtatacttaccattgcagttgtcaatgtcaattgattttcataaacaacaaaagcaaaccagtccaaactttcaataatatttgaacaattcaaaaaatcttgtccttcctttaactagatattagagcaattagtgtttgataagtcactttaatcattgtactatcatcttttctttctatctgccatacataacatctttcaactcttggtgcaaaattctgaaggactatgaatgatatatgatgactcatggatttgtgagatgtgtctactttttctgtcatcttatttatacttctctgtctctctgaaactcttttccaaatccaaattctaaaggtttccgtttcttcttctctaattatcccattttctcactaatatatttgctcaaactcatctcaatgcctcacttcaaagcactcaaaatttgttttgtttattctttttatgaaccactacttcatctgcagcaatacattttaggtgacagcttacaatgaaaaaatccagtaaaaagctactccaattggagttcaaaaatctatcgactgtcattatacagaaactttggcctctgatatagagggatctcaggtaaacattgatgtatacatcctaagaaccagtatgacatactacaaagtggatcatcatatagaacaaactaacatacacactaatcagccgattcaaaggcacacagctgccagtctcatagcagcattgagaaggataagccttgaattctttactctataagtttataattatttagcctcagatatcatgctttggctggcttttatgtgtaattacagtgatataagaataatatagtttgtgtacttaagaaaccaaaacttcattttaataataagattattgagataagacgattaggtaccctttttacaagagacacaaaattacacagggaatcattaactagaaactatttggattacaaatccttacatctaatcacaatcaaattaatcaactaatcacctcatagttatcaatatttgattagtgtaatgcattgatttattggaagctgttattagatgagtacctttttcttgaaaaggggaataagcctttttcagtttctttgatttcacattaccatctttaagtgtaggttggttaatgaaaaaactaaagtcttgcaaaacaactctaccttctagaactcatctttttctttctcataccacaatctctctctctctctctctctctctctc

SEQ ID NO: 185144 - DNA, 2701 bp, Cannabis indica
aaatcaaagctcgacactctccttctttctctccatgaaagctcgagcttgattcattggttaaaccgaaagaacagaacccatcaatttcgtccccagatttgaataacccaacattccttaatgggttcttccaagactttgaggaagttggaggtggcctctccggtcccagctgacattgacattgccaacgccgttgacccttttcacatctctgagattgccaatgagctcaatcttagccctgatcattatgatctttatgggaaatacaaggccaaggttattcattttgatttcaattaatcttgtcttgtttgtgtatttgtaatgggtaaataaggctttgatttgatcttattttgattggttgatgatttctgtttgttttgcttttgtttatgtttaattaattcaggttttgctttctgcacttgatgagcttcaaggatctaaagatgggtattatgttgtggttgggggaattactccaacacctcttggagagggaaagtctactaccactgttggactttgtcaagctttgggtgcttatcttgacaaaaaggtaaagtcttttctggttttcattctccattgctcagtgaaattaattactttgattggaattgagtttttgagtttcagcatcttttgaaattagtatcctcactttgattgatgagttatgaatattggcattaaaagtctttaacttttgtttagtcttttgaagagaagacatgaattgggttgcgtgaaactttgttgactggtctctgagctttgagttatctatctgtctctaacataggattctaacatgtgtaagttgggaattttcctgttttaggttgttacatgtctccgtcaaccatcacaaggaccgacatttggaatcaaaggaggtgcagcaggaggtggttacagtcaagtgattccaatggatgagttcaatcttcatctcactggagatattcacgcaataacagctgcaaacaatcttctggctgctgccattgatactcggatttttcatgagtcaagtcaatcagataaggctctcttcaaccggttatgccccccgaacaaggaaggacagcgcagctttagtaacatcatgtttcgacgtctgacaaagcttggtatcacaaagaccaggcctgaggatctcacaccagaagaagttaaaaagtttgctaggttggatattgatccagaaactattacttggagaagagtaatggatgtaaatgaccgtttcttgaggaagatttctattggccagggacccgaagagaaaggaatggtgagagaaacagggtttgatatttctgttgccagtgaaataatggcagttttggcccttacaacatccttagctgatatgagagagaggcttgggaaaatggtgataggtaacagcaaggcgggtgatcctgtaactgctgatgatcttggtgtgggaggtgcgttaactgtgctcatgaaggatgcaatcaaccctactttgatgcagacgcttgaaggaacaccggttcttgttcatgctggcccttttgcaaatattgctcatgggaattcctcaattgtggctgataagatcgcgctgaaactggttggaccaggtgggtttgtagtcactgaagcaggttttggtgctgatatcggtgctgagaagttcatgaacataaagtgccgatacagtggcttaacacctcagtgtgcagttattgtggcaacaataagggccttgaaaatgcacggtggtggtccagcagttgttgctgggaggcccctggaccatgcctacttgactgagaatgttggtctagttgaagcaggttgcgtgaatttggccaggcatattgcaaacacgaaatcttatggtgtaaatgttgttgttgctgtgaacaagttctcaactgacgctgaatctgagttgaacgcagtcagaaatgctgctttagcagctggggcatatgatgctgttatttgtacacaccatgcccacggtggtaaaggagcagtaagttactaaaagcattaacaacatattagtagtattaattattgatatttactcattggtgctctcaaaatttctatatgattagttgaatatcttgttattcagaatatatgcaccctttctatggaaagataggtccttgtagtgttgagaagcttggcacaaaatattgtcccaacttgaaatatttatagtttggaacttttttgctattcttggttaataatcgtgaccatatagtcccagattctgttccaaaatttgctgttatctaattattttggccgaggaagatcatgtataggaaagcaaatggattttgccagtgaatctagtaattcaaattattgaatactgattttgaaatgtttaatcttgtatacatattctgcttcttgagataatgatatgcgtgtgcgtgtgtctctctctgcgcgctttgttcttttttttgttcgtccaaaagaacaaactgtgggaaaggctatgaatggtgtctataactaataaatgtatttatgatgttcaggtagacctaggaattgctgtccaaaaggcctgtgagaatgttactcaaccattgaagtttttatatcctttggatattagtatcaaagacaagattgaggctatagcaagatcatatggtgccagtggtgttcaata

SEQ ID NO: 185145 - DNA, 1541 bp, Cannabis indica
gaatattaattacattaatagtaataaataaaaatttttacatccacataattaataatatttataacattattatttttaagttttatcacgttaattaatgatatatatatgtacattacttatttaatgggtcatatctactatatagtatttttatatgaggcattgatattttctataaaaacttattatttaattttatcgattcaaatttttattatattaaatttatgtgaataattatttattattaaaatatattttaaatttaatcagtctttatttattaaaaaaaaaaaataagtgcagtacattctaattaaaccaaacatattcagcacaatccaattcaattcaaccagtccaatcttctttcagcaaatggaacatcatttcatgagatctccatagagctggggttatatgtaggtcctcttttcttttcctcacaaagagataatttattaaataattaatatacacagattacatatatattatataaattatagatttgaattatcactggaagaggaatttaaagtttttaacagaggaagaaggctttgagttacagaatctaggccagagttcacaaagaagtatctgacaaatgtctggcttgtgtccactccactgcagtcaaatgttatgggtaacgttttcatcaacagatattatggctaggaattataggaaatcattgccattaagcaatttaaggtgtccaatgactcgttgtaaatagttaatagtttcctatattatttattaaataaagaagtgtaagaaccgaaattaaattagactagtgttgcttaccattttttttatatataggaataggatggatatgggtggaagaggaaaaaaaaaacaaatataacagtatttcagacacaattcgtcaatcactggtcacataaggagatctgtgatgcaaaaagagagtacaaacactagcaacaacagtttactgtgataaaagaaaaagcgggcactgtttctctattaattattattattactactattgtttttcttctgggaaaagatcatcagaacacactaaagaaggtctactcatctttaattaattggggaacgaagatcatagctgctggtttgatcagctcatccacacaatctatttatttaaagtgtttaaataagaaaaataaagcatgcggtctgagagtctgtatacgatctcaaatctaaatagtaagatatttcagctgtctgcaaaagcattattattgactagtagtagtaatatagtacatatacatatatatatatatatatacagctatagctggcttgagaagaatcaaaacgttttgatttgttcacaactgtttatgtaattaagaactcaaatttccagcgaagtactgatagcaacgtgataatgcaagagttctctccacgcatgattaaacacatctatttatatacataaaatatttatattaaatgtgatattatattaaaacgtgcgactgtacacacacataaatctatatatatatatt

SEQ ID NO: 185146 - DNA, 4404 bp, Cannabis indica
ggtaaaataattccaacattctacacttattgtttgcttcccctccatctttggtttgcgtgttgtcttaatgtaattactctaagattatagccctttttgcctcttagtttatttttttttttggaaaggacaatttgaatgtttgattaggttttcctttagacgtatggtttaattccgagtcccaagtatttttcccttttattagttttataatagcaaatgtggatcgtccaggcgcttcttccccagcatccgattctctttcttcaagtactgctcttgggtttgtcgagtccttgttagtttctggtaccccttctatggaggatgataacgctaacattcctgtggacctggaagttgagtgcttgggcagcatttcgattatcccccgctcccgctttggggatggcacaggcgtcagcgatcaggctgcgtcttcagaggaggtgactcttgttgcgcctcctcaaaagaaagcaaaagcgtaaaaacttaccttgggacgttcgtacttggatcataagtcgagtagcccatcgctattaactcattttgagcttgattccttagtgtgctcttgcggtttcccatcgggagtggaagttaggctccctaagtcacatgagagggctaacacatctcaggtcgagtggttgtgcatgcactcttattgtttgaatcgagaatcaaattaaggtcgcccattcctcagttaattaaggaattccttttgcattactcccttgcccctgttcaattacttcctaatgtgtgggttatccttctaggtctaatagttttgggagataaggcaggagttaagtgagaagtatcagatattattcattttattccttaatggagagtgagcaagggcgttaccatctacggtctaggcggaactgcgctattgttactgacttggagacttctcataaggggtggaagaataggttcttttttgctaaagggcctgttgagtttgtttctgatgatcctactgccccttttatcagtcggagctagggagctcctggtattctttccccttccccactttttttattgggatattcttgctcatatttttccccccatttccattaatacttttatttagcagctttcgatctttctttctaataaatttttttttaatgtgcagcttccgcggataatgagaaaactgttattggggaagttttttctgacaaagttcgtaaagtcactgctctagaaccaaagttttggtcgatcatgtatcttctgtcggacgaagctttgattcgatcctctgcctggcctagcgagctcaggattcccttacgtatccccattccttatcattattattttatttggcctgatttcataaaatgtgccttggagcatttaaaacaaacggtcgaaccagttttgatcgaattttctaaggtacattcctgccttgcagagacttacccccaccgtcttcctaaaatgaaattgtctgagttgtctgttgaagaaattaaggaccagaatgctgcccgccagaagagacttatggcaaaatcgcctaagaataaagaaaaaggcaagaggagtaagacggtggggcccggcgggataaccaatcggacgttggacaatcgtctcagcatgactcgacagcggatgattccattggggtgctactcaactctccataagatactgctttgaccgtcaaaaacattggggatgactcccttaactcagtattagctgagttgatcaaccccgagagcatctcccagcatgaggatcctccggcggttgacttggacgtgaacctaggctccctcccaccttcacctactcatacttccaccctcccttttggggctttacagacctcctagcttgctctatctccctttatggctcgtccttcatcttatcctagcagtcggggttctccttctttgatcgtccacccgctgagggtttcaactgagtgggacaagatccatgctttccgaatttagaaggatgttccctttgaggagtcggccaaaaactactttaagtccctattagaggccgtcagaaaactagacgatgacttctatatttctaaagggcgagatcaatcttgatggacactactatctccgacgtcaaggtacttgttaaagtttgtttatggttttagcactcctttagctgtatgaatgttttgcctatttaattctaacgaataagtattttatgcttcagacggctttgagatgtgctcatgccatgaaatttgctctgcggatggataggaaaaatagagtctggggaaaggttactctcgttataagaagagttataaagcggtcgtcactgcgaagaaattcgttgtctcaaaatccaatgctttagaggttcataatcaattattgaagggtaaggtcgataacctcgatttggagaagaaaagttgggaccttgctcggctggttttggaattcgagaagaaaacccttactgagaaggtcgcttctcttgaggctaatttgatcgagatgaagttgggccatgagaaactgaggactaagaacgatgcattatctcaggagcacaatgccttgcttttggctaatgagaggatgaaaatctgaggtctcttctttaaaggtcaagttgtccgaggctgagaagacggcgggtcaggcgaagaaagctctagttgatgagaagagctttttgtttatggagatcaaagttctgaccaagcaagttaaaaaggtgttcctcagtgggagttatcagtccacattcaaattttattctgagtttaaggagggtaattttgattcgtatgacttggagaagtttttccagaggtacgctgagttcaagaaggatgaagatcttgtggacacttcttttgactcggacggggatagtgatgataacgacggtgccgacgacacttagggattgcttttacctccctctcctctttttaatttacttacttttatttcaataaatggtgtaatatttgagacaattttttttacatgtggtttgtaaggattcttacttagactaatgccttaactattattattattacattttttctagttacttaattgactcttgaagtgatttgacacttgtctacccgtagaagtagagtttattaatgatatttaatgtcttggtgaccggtggcttcacctttccaccttgccttctttcttgaacttatttaaacgtgcattctttcataacttgtatcacttgcaaaaaaaaaaaaatctctctttctttcttgtttgttgtttttatttaaaaaactcaccttccttgtcaatatttctgtcctttctctatgagatgtcgaaccatccaagctcccctcttccccaatccttgagtggagatgaattccattctactattggagattgttcccccacttgtctcgaaacattctcatatagcaatcagcctagtggtgaggccatagttgggaggatgatgcgggcctatcaagctaggcccaatgacgcatcctcatcctctgatgaggaatggctccagaacttctttaaaaacgaaaggtgaaatgtcccttctactgccaatgttccggcttaattccacgctcttcgtttgcgctctgagcgtcgacgcaatctttgtcaaatgcgagctaggactcatcatgcatgggatgaagattttgaacgtgagcgtttaacgaatgaaaagtggatggaggaatgtttaagagatggggtccccttctatcctccaggttttcctactggctgtcgtcggtgtaagaagaggttagtgacgggttccatcgtgatcctaggctctctatgtattttatgctggcatcaccctgatcgtgagtgttttttaatgcaactctcagtgttctagctttagttttatctaatttaatttttagcttctcttttttccctttttttcttatccttttgcttgttatggtctgttacttcggccaatgtcgtaacttgattgtaatttaattagtcggttttaggtatttttttttgtaaaagggtcttaccttgtagtttagttggggctcttattttgtgtgtattcgtatttacctgtttaaatattggtactacatagtttatcatgattatagtgtgtttattaccatttattattcgttctcttttgccttgtgagaccttcggtcttctcttaaaaagccatccaatgtgtcgtttctattactctatattacttttatgttattattattattttttaaaactagaaagacatattgaaaactggaaggacatataagcttttagagtttctcaagatttgaggggtgtttaattgattgacgcgtgttaccatcttaattgatctagg

SEQ ID NO: 185147 - DNA, 1169 bp, Cannabis indica
cctcaagttaccttctaaacttaaaatgttgttcttttcttttatgagtaattaccattatttaagttaaccattttcaatattaaatttagagtaattagtgtaaaaactttttacgttttaatttttacacatttaattttattttatttttttgtggcaaaatacccttaagttttactttttttgtaaattcgaggcgtcagttaaatgttactgttaaatactaactgaaagactattgtgtacacttgtgtatacgtgacagtaaatctcaaagttaatacactagtaatctaattggtatttaacggttatatccaactgacactgcaaatttaaaaataaaaataaaaataaagggatttcactgttaataatgcttaaatttacacgattattgcctaattagtaaatgacacgaatatataatgcataagttattagtttaaaggagagtaaaataaaggtttttattagaccaatattttagttttgaatgtattaaagcaccaaatcccataagaatcctaggataaacacacagacacatcaatagatcagcaaaaacacttgaaactactgttaaaaccagattgaagatttgaaagatgtcgtaggaccgagttgttttgacatcggtgttccaggaaccgaacaatacaaaaagttcctcgctttcaacaccattagcagaacaatgctgtaaagttttaacatttgagggtcttttagagcataagctctgcaaatactaccaagttatatgaaaatcaataaaatttagaacagaatataatctttgatgtgtatgaatgaaatccaataacttttcaggttgaaggtttgatcttttctattaacttgtcagcttcaatgaatcctaatggtcccaaagacaaatactttatatacttccatctgttgaaatgacacattgagaattgttcagcatttcaaagcacaagaatttaaggctcattcatatatcaccattgaaacttgaaagagctttttaccttggggtgtatggtagtgcaaaacagtggagatgtaaatggtttacactgttgaatggaggcctatgaaagccaaatctgtcaccacataataagatcacaataaaatcaaatccgaattcatgtaatcaaattcacaaaaatgttatc

SEQ ID NO: 185148 - DNA, 2981 bp, Cannabis indica
tgaatctcccttgtatcataactgctattagtagattgaggcacaggaaaagtagaagggagtaattttagtagcaaaaggctcttttttcttgcagcattgagttttgttgagctaccacctccacttactacattcttgctcaaacatttccctaaagctccacttgaatctccagacaacaacttttgtaaggatttgagattatcaacagcttctgacatcatcttcacaacttttaatgaaataagagatgttggtaggtgcgtaatcaaactctccacacaaaaatataatcgttctgcaatgtaagagaatctcttttggaaaaactcctcaaatgtcaaatgtataacatgtgttttttcttcaagattttccttttcatatgaaagatcgttcactcccttcctctcctcctcatgctttgattctttttcctttttgttgtctttcatctttttctgattcttcttgttttctttcaaggtttctagtataacttgcttcaatggtttcttatttttcttctcttcattctttgaatctccagtttgtgtcaactcctcatcattgtcattttctttcaagtcttccaccacagtttctttcaaatacaattggtactttccttgaggatcctcaagcaaagaaatcatataaagcaaagtacttctccaaccactttctgaagaaaacaataatcaagtacggcaatacggttatctagaaacacatcatgaagctcgtcgcgttcttcaatcttcattcgctccccatttccaaacaaaacaatgtcaccaaggccatacgtaccatacttagatgactccataactctttgtatgagcctccctgttacttccaacactgcaatatttgtaggagcacatgtaagtgtcctaaatttcatattaagcaagcaatgcaataaaaaccgacagtcttggtttttcctgtccccggaggcccccatatgagcttcacagtattctgatgagagcataaagttgtctgaacacaacttaagactgctttctgttgggattcattcaactcagatgattgaattccaatcttcgcgtttaaatatgcagtgctgcaattttgtttaaagtgacaattcacacacttttctgcatcctgaaaacattgaaactaagatcaaaacataaaaagttctgaattcagcagcatcaagcaagaattgactaacatcttacaggaaattcaggccgtagaacattctcaatgatcttcataccgcggtctttaggatcagaagttagtgcttgccatattcgaatgttagttgtcatgttgatgagatatacagcaaaaagagatgaattattcttagtcctgtccatatagtcttcgataggctttgatgaaagtactgtgagaataagatcatctttcaccccttgaaccaaagcaacaacatatgacctttccaaatcagcaatgcttcttggtttaacactggttatggcaataagatctccatgttgaggttcatagaccatatgatcattcttgttttcgttacctttcaatataagtttgtaaaacaagtctttgggaggcttatatgcatcggtaaaagtgaaagaccttatctcacagcaaagggggtgagacaatgatttcacacttgataacaagtcagcatgtgtttcctccataagaggagcaatgaatgagtttaagtattctgtttttgaagagaatgtgtggggaatcttgttcacctgcacaaacaacatatttcccatgtttttttcttctcatattactcgaaaacaagcatatatcatcaacttcctattcattatttccatagaacaaagtttattaatcaaaagaaataaacaatcattatttttaacagagtaaagtttcatatgaaaaagagaatgataaacgtgatcaaattctataagcttccatattcctctgtataaactctcttctgaaaaacatatgagattcgagaggtttttacttgccaaaaatattacaaaatcgatattttttagggtaacaaaaaaacaaatgggtcaaaagtacggtcaaaattaaaacgagaaaatgacaaacaatatagtattaaatacaaaagaatacagtatacaattttttatgtgaattattatttatattacattttcatttaatatttttatggaaaatttatttatatttatgacttagattttgaggatatatttttatcttttactattcctaactctttgttttcttttactgacaaaaaaaaaaatagcaataatttttctatgaagaatttcacaattttaaaaaattcatggtacattttccaattcaaccaaaaagagatgtttttacaaatatccctcttatgatcagaacatgcatggttgatgacgtgtatatgtatatatatatatacctggttttgtagagattattgttgagaacatctttgaaagaccaatcaaagaccaaattgattaaacttcttccgggaacatatcttatttccttcttggtggcgttatcggattgcatctctaataattttgttcttaaaaattgatcacagaccataaaagaaagaaaggaaagagagaagaaaacgacaaagaacgaaaattaagagcaacaaaataacaaggatcacttgccattgaagaaagaaagaacaataagtagtagaatcatatacccaatagttatactaaggacatcgaaaagtcacattctataataataataatatatatgattcttttttttctttattttgctttggaaaatctgattgttatttctttccttccgctagaagttggaatacaaaaataaatggaaatataaatgggttttagttattccttgcaagagaagttgtaattgtaaaaacaaatacattttccttgcatgagatgagaagaagtatatacattggtcgaggtcgtttgattatgacatat

SEQ ID NO: 185149 - DNA, 4517 bp, Cannabis indica
agttaagattcgcagtccatgacgagcattgttgaaaacataaaaataatgtaattttaaagcttttcagtagacctccaatacatcttacttttgtggggggaggtttggagagaagcttgtgttctcattttgattgcattaaaaggcaaaacaaggagtttctcaagtttaaagccactaaatgtagaaatagtgtgagcttacaaaattttttatgttacagtagaaactaagaattagaatcttaaatgggatcatgagcatgcaatataagagtagtcagtagttgagatgtgtgttaataggcctaccgaaatgctcctcctgcatatgtaaaatatcacaagcttgaaaaaaaatagagtagttagtagttgagttgaggtgtgtgtatgttaattttacattgactgataaaatatttgtttatatttgcttcaattgtcagatagacagatttgggcatttcaaaatatggcatggcgcagggtctatcttggttgctatttctttttcttcggtgtttggtggctgcttaccttgcacaattttttctaacacttcatcagcattggaaactgttagttatagcacatttgcagctatctttaatattggttgggctgctacccaagtttcgcacatgtaagaccgctagtcctttttctatgtataacaaacaagattgtattgcagtctagagagacagaagcatacttgcttatttattgttcatgaattaaattattcattttcatgtcatttgatatgcgggataaaaaaacctggagcagcaaaatctctcacccaatatttctaattttcacttatgctacaatgcatatcttttttgtggaaggtctatggtgaattgcatcacactgaattcaactagcagagtggtgttggctagttgtcgcaatgcttttacaatggtcgacttcctatattgacctggttcttattccttttatagtttataaagcttttgtaaaatgtaagataaatgaatgctttgattctaatcgtataggttgccaacctcagcctgtatgcagttgcctttgtagtcattagtgtcacaacagcaaaaacacatgctaatatcgaaaatcaggtatggttatttgttgtataatctgctaagagattcttgtctgataatgaatgtaacacagttttgatatatatattcagtatcgctggattgcatatgtgtccatttttattgggtgctgctttgtggttgcatttctactcggaaccaaagagccaaggtttgcaagctattcgctttattctaatttttcatgaacttagttctagtgatagtactattatttatatcacgacgagtatgcaacttcagctaattgactgttacaatcatttttcttatgtaattagtttaaagataggtgtacaaggaagcagacatgaaagaatagcatggtcttactggttcaagagagttttatattatcaagttgctgttgtttatatgctgaccagactggtagtcaatgtttcacaggtaatcctgctggtcactatttgatcgataatacttattttctaaaagtgatgggaaactgtaaggatcctcctacaactaacttcctacccaaaaacaaacaaaacagagcctaggtatccgttcacaacgctaatgtctgagaccctatccagaaagtgtgtaatgggttgattttatttgctttcctttgtaaaggtatgtttggatgggagtaatgaaaacacatgaataagaatgggaattggaagataatagtaaaggaatagaattccaacactttaatatgcattggatttgcctttgctctcacttttggaacttacaaaagccatttcgatgcttaataaagcaagcaaacaaaaaattggaatgaaaatgatttccattccattactgccaaccaaacataccttaaaataatccagttctttgcacttgagcactctttacatgctatttatatcactcaattttgcacacccgtgtagccaccctccagccgaagaaacaaccaaaactctaatgccaactactctttcgtatttctaaacttcagcctaacataactggaacgtataggaggtctatcatatcatttacttgtttccgagtacagcactcatttcaaattgtaacttcctaaacaaggaaataagttagcgaatatgacttcttaattgtgttagtttcttttctcaggcatatcttgcattctttgtgattaatgatctggggatggccccatcggctaaagcgttggtatgtggacaactaaaaaatcttgttgacaagtgaaatctcttctagccttaaagatgaattatttttctaattgacccaagactgattttcttttcaactgatgtgagtaggttcctgcaatcatctacattagtagcttcattgtatctgtcagtctacaggtccccttctgaaactcatttctttggttgattttttacatttaccaatggtttccatatgtttctgttttataattatttctaattatgtaatatttgtattataggaagttccatggactggtcgacgtctgaaggcctacttctccattggagggattatttgggtattttgtggtgtggtggttctcattttgcctagtaacttgaatggttttgtgtacattctatcaatatttatgggcatcgcgaatgctttgatgatggtatgctgtcaaatctttttcttctttttgttcagtttcaggtttgagtcaagaaaacaggagttgaatatcaattagattaaagttctttaatttgcatgtttttttttatgtaacaggtaactggagtcagcatgcaaagcgttctaatcgatacagatctcaatggctgtgcatttgtttgtgggtcattgagcttcttggacaaaatgtcatgtggaattgctttatttgttcttcagtcatatcaaagtaagttaatcttttacatttcacaacatcttatagaaataccaatttcatctgctctcatttttctcagctgcaagacatacatttgatagttttattgtttgaaagttagtattgcatattttttggatttcttgatgcaattaattatctcagatatctctgaatcccagcatagaatgattaatcacaaatgtataacttgatatgtttaatatgtcttagtgcattgatttcattttcagagtgttatattatttggttaattaatccatatcaactagtagcttgaagttagagtaaagaggcaatataattttaaattaattgggaccttagtttcaattcttagaatgcaagaatagtcccaagatttttttttttttgacaagaccaattgtacagttaattaatgttttggtaagaaaacgtatactttcattctgatttactgtgaaaatttttcttttcatgaaatgaatgagaaaacatggtcaaactatatccccaagagttgacagaaaaaagcctttagcctatttcttatgattagatgttatgctttttcttgtgttaatgatgattactcttatctgttgacagacatcgaaatagatatcgcttcgccaatgcaggcaaccaatttgagttccatgtatatttcagttacgagaatcggcttgggtcttcttccggcactttgtgcacttgtggcagtagcagtaacatataccatgaaacttcaacaccctctttcaaaacccttagtggaaccattattaggatgaagaacttgattcatcaaactgcaattcgattgatctttcgaagaaaagattctttcttcggttaggaatagacaaaccaactttgttcaaggatacttctaatacattccacttgatcaggtttaacaaattctcaacacttactcctgattctttgttgttattttactcaatttgtacagatcatgttgtatgtatatatttgtgctacattaaaattaattgtactctcttgtaatccaaagaaaggattgatcagaactctggacactgaaatggcatcaatttaatttttgaagctccagaacttatcttcattgtttatctctactagaaagatacagaataagttggatatacttctgggaaagttctaatagtctcacttgtacttaaggaaacctttttctcagttaaagtttcttggcatgtttttaatggaacttggggaattttctcacaaaaactggtctttggagaattgataaaataatgtttgcaaaacacacttaaaataagagaaataaacccctgaaaaaaaaaaataaataaacctaaggggagtttacacataaataatatcaaatttgttaaaaaaaaatatacctaaatacctaaaatataataatgattagcggttttttttttttgttttttatttttacattttagtttagagaaatttttattttttttatttttacggaaatccacataataacttacatgctaactaacgaaccaattc

SEQ ID NO: 185150 - DNA, 5005 bp, Cannabis indica
aaaaaagaaaactaatcaagatgcaacaaagttgacagataatgaaaatttccatgaattttgcaaaaagaaatgacaaatttgctttaaagtgatccccggatatatttttcagaaaagaaagaaggatcaaccctcctcccggtgcattataggttggtgatattattcaattttctctgttatctggcattggtcgtgtaatacttcctgctgcaagctaaatatttgtcattttgctcacaattgttttccacatgtatcagaactggtgcagggatgagtatgaactctttatagattgacataaaattgtaagtgctctgccaaattttcaggaataattttattgtaaattctcctctttctccaactgctccagatgtcattattgttcatgacagtattttttaaattataatgaaggaatggcaaacaattgtcattctcattcagtgaagactataatattcaaagcaaaatttatttgaccagttgtaagaaaccatcaatggtgatctctattctctacaccatggtttgattaccatgacaagctcctccccccttgataaatgtctgtgatctaaagctcccaaataaataactgcatcaggtccttaatttataaaggaggattattaatcttcaatatgaatcaacagagaaaccaattcatcagttacagtatcccgttctgaaaccaatagcttcaacacactatttatctcttcgcattgtggatgagaccggtcaccggaaacaaatgcagaaatctgatctttaatttttacccaagaccatcctggctctttaaccacaccctttgatttcaaactcattcttattgctgctgcttccctccatttccctttggcagcatatatatttgccaaggtgatgtgagttgctgcacaatttggatttagtttgagaatctcctctgcagcacgttttccacagtccagatcaccatgaaccctgcaagctctgagcagagttgaccatacaacatcatccagctgaaacggcatacatcttatcattctctctgaatcgcttaatcgtccagctcgacaaaggagatcaatgacacaaccatagtgctctttggagggagtgatatggtattcattacgcattgattcgaagtagcggaaacccagatcaacaaatccagcatggctacaagcagcaagaataccaacaaaggtcacagagtcaggtctcaaacccaccatttgtatcttgtcaaacaaatgaatggcttcttggctgtatccatgttctgcatatccattaatcatggctgtccatgacactatatcatcttgtcccatcacatcaaataattctgaagcttcttttacactaccacatttacaatacatattgattaaagaactttgtattattggtttatgctctaacccaacagacacgacatgagcatgcagttgcttcccttggtcgagcattgccatgcttccacaaacacttaacaagctagcaaaggcaaattcattaggcttcggtccatcctttctcatccatgacaaatactcaaaagcttcttctccataacctccttgacaatacccagcaattattgtgctccaagaaattacatcttttcggctcattccttcaaacattattgaagctgaagtcaaacgcccacatttcaagtacattgtgacaatagagtttgttactgacaaataatccaccaaccctaaacatattacatgagaatgtaactgttcaccatagtcaactctagctagattggcgcacccagagatgatggcagcaaaagtatactcattaggactcacactagagtccttcatccttctgaaggcttcaattgcattcttctcttgacccatctgaacatatgtggtgataattgttgtccaagaaaccacatcacgtgtcttcattgttgcaaacaaatgcaagccatagtctaatttaccacatttattgtacatagtagaaagagagttggctacaaaggagctttcattcaaccctttcttcaatgcttgtgtgtgaattgccttcccatgatttagtgaactcgaatcagcacaagcctttaatgcaatagcatatgcataagcatcacattccacctttgacctccacatttcagagaagtaaataagaccctctgcatgataaccagcatgaacgagcccagttataatggcagtccatgatactatgtttctaaatggcatttgttcaaagactctacaacctttatcaatcttgccaattttggtgtacatgtcaagaaggctactaccaacaaaaactgagttgatcaaacctgattttattgagcacccatgtaatagttcaccataacaaatgttcatactgagcccacaagcctttagagcaagactaagcacaaaagggtcaagttgcagttcagacttcacaaacatagttgaaaataaactcaatgcctcaggtgcttgaaaggtattcacatagccagaaatcatattggcccatgaaatctcatctctttggggcattttattgaacagtaacctggcatcatttaggaagcctgttttcactagttgcttcaagtgagagtttagctcaacagtactaacatgattcacaaaatgggtttctggggctaactggtcttgcctcacctgtaagcatttgcctgtggaaataacagccggctctacgaaaattcttctggcaaagcatctcattgatgaaaccatattgcagttgtagtcttaccatgcaaggcagttcttgtgaaaacttcaaacaggccccaaagaaatatttcgttgagcatatttcattatgataccatgtttaaattatcacttttactttcaggggtgcctataaatcccatatgcacgattctatttgacaaccatgatttgtaggccaacattaacatttgattgcaagtcaaccatcaaatatgtttctattagtgatttcaaaacctgggtccctactataagttggagccttaaaataatttcagccatgaactctgtaactaaggatataggtcaaaccattaaggaacgaagttttgattgacaaacaactcaaaattaagggttgcaaagcgggatcgttttttattttattttcctacaaaggaagcaaaaaaggagatctaaaagctgcaaaacaggtgcaaaataggatacttattaaaaatatatacttactcttttgctcatttagctcatacgccattgtttttactccacggtgatggtgataacaaacacaatctgcaatagaaagaaaaacgcagaactaagaatctagcatcagtattaactaaaaccaacattaaaactgaaagttatggacaagaccaatatgcaataattgaagcacggaattagtataaacaccacttaaacacacagatgaaagatgtaatggcataaatgataaaaccaatgcagtattttagcagcggggtctatatgaaaaccactaattcctccaatttagtcatcaccaaaagctagaaccccacctaaacagagtattacaacgtatcaaagaaaactaccaaagtcatttttcctgttggaaccctatctaaatcttctgtgcaatttaagaaccttttttaagaagaaaaaagaaaaattatgtatttccaatacccaaaaaacatctcaaaaagaaacacaaaacaactagggcaagaattcttaacctgaagtagcagatataaacaaaatgtattgatttagaagataaagcagcaaacatgttaaaggatacggctgcactattttatttataacacctaaatttggctaataatctgattaaaatgagatttgaaaagatagtttaggaatatgaatgtctgctaggcatgcatggcttatctttcctatttgtctgaattactgttgtgcctggacattggtttagaattggcgagactagtaacaaacttaattaaattcaataattaatctcttcaaataaccaggcaatcttgtaaggtgaaatgatccataatcccgagttcctttgattctatatgttttgcattattggccataaattctaaaacaaatcaaaatcacagctcaaaacccaacatttgcttcccttctctgtttccctttgtgattacctacaaccaattacctcaatatctaatagaaaagattttgacacccatttcaagatccatattaatgaaaaatcatgcttaaaaatgaccagcttagtcttgtttctttcattaattagtattcaattccgaatcagaaaaggaaaaacgcaaattaaacctttaatcacacgcaaacaaaattaaccaacaacggaacaaaagaagacaaatccaaatgtagattttgctatagagttgaaaacacacgaacaaatacgaaaaatacatacacaaacacacgagacatacatatatcatacagatgagaaacactgacctcaaaactataagcgcattagcagccagagcagagtagagcagaacaatggcgtaagtatgttgctataaccgagtcaaatccaactctttagagtgtttttggttcttcgatacaatttgaactcgtgtacttttcttccatttctaggcctgactctcatttctatattttcttaaagtgagggttatttatgtaatttcaggttataagtaggttttgttttcttgaaggttctttcggtcattctctctttcttctaaagagagaaacataggacgagctggtgagttattacttgtcctccaataaagccacaaaacagtctctcctcttcacacaaaatataagaaaccaaattatcaaattccaaaatccttcagacaattaaaaaaaaaaaaaaacaactgtgggaacaaatttaaacaaaagccctaatttgttttgctttggaaagagggttttcttgcagtttggggcatcagattgtttcgccgtcagtttcagctatg

SEQ ID NO: 185151 - DNA, 3916 bp, Cannabis indica
gtttcactatcattacaatcatatttttccattcccttcttgtttgtattttcacaaattttggattgaaaacttaatagtgttcttgtcacttgacagatcaatgcctgcaatggattctactgtgactacttttctccaaacaaggcttataaacctaaaatgtggactgaagcctggactggctggtaatttccaggcttgttgctttctttgggaattatattcttagtttggctatatcagttataacattccttgtctacctgcaggtatacagaatttggtggcgcagttccataccgaccagctgaagacttggcctttgcagttgctagatttattcaaaaggggggagcattcatcaattattacatggtactcatcttgtgttttgaattgccatctaaaagtaacacctaattgaagttaattgctaattatttgcttgttttcatggttacagtatcatggaggaacaaattttggccgaaccgccggtggtccttttattgctactagctatgattatgatgcacctcttgatgaatatggtatgtgactatatgtgcaaaaaatgtttgatgttaaaaaaatttccccaactactttttcttagagatagttaaggtagatggattatgaataaggtaggtgactacagtttaaaattctagattctgttgaggttggtgaagtaataattttttgatgtggcacaagttgtcaaccatattacaaagtggtgatgtgcttgtttgacatatagacgctgaactggtacgactttgtggttcttatgactttctcgtgagccttttgatttctatgtgaaaagcacttgaaatggtatcatttgaaaatgttgaggatgactctttatcccatcttatgtgggcccatgccctttgaatgattgatccctggtcataacatagtgtacacttgtacttacatacattacttgttacttagctttgtctcctcagtggtccagaagataaaatgtgtgcttggtttatgaaagtatacacatttagtgtttatatctgatgtgtctatactgttttctgtgttcaggactattgagggaacctaaatggggtcatttgaaagatttgcacagagcaataaaactgtgcgaaccagctttagtttctgcagatcctactgtaacaccacttggaaattatgcacaggttggacttaagttttctgacaaaatgttgttctatatactataaatataggtatggaagtaaagcttacatctttaacttgttataatattacaggctcatgtgtttaaatcaaaatccggaggatgtgctgcattccttgcaaactacaacccaaaatcatttgtaaaagtgtcctttgggaatatgcattacaatctacctccgtggtctattagcattcttcccgattgcaaaaacacagtatataacaccgcaagggtaagagaaaattatgttgttcattgagttagatattaattgtgtttcagcacaattctatccccagtcattgtcattagtcgcatgcatatttggctacagaaaaggaaactgacattattcttttccaattcaggttggagctcaaagtgcaacaatgaagatgacccgtgttcctatgcatggaggattttcttggcaagcatacaatgaagagaccacctcttatagtgatacatcgttcacggttgttggcttattggagcagataaataccaccagagatgcctctgattatctgtggtacatgacagagtgagtaacataactgatcttttttcatttcctttgacatatagccataaatgtttctcttaatttgtggcatttttctcttaataataccatttgaatttccagtatcaagattgattccaacgaaggatttttgaggagtggaaaatcccctgtactaacagtcttgtcagctgggcatgcattgcatgtttttgtcaatggtcaactagcaggtaggctgcttattgttgattcttttgtgtttatgagcacaccaggaaaatttttttggcagaattgttctggcgagcacttagcctaatcattttaggatttctctccatgacatgccaattcttattaccttttcaggtacttcgtatggaagcttagaattcccaaaactacattcagtaaaggtgtgaacttgagagctggaatcaacacaattgcacttttaagtatcgctgttggtcttccggtttgtccctttctccttctctatctctctcatattccccttactgagcacgcattaatatgcacatagatatttgaatatgacatgtttacctatgatttggcttcagaatgtgggtccacactttgagacatggaatgctggcgttcttggccctgttacacttaatggtctcaatgagggtaggagagacttgtcatggcagaaatggtcttacaaggttggtttcccttgactttctcataaatccccgcaatggtagtgattaataagtctatgctctcccttcaggttggtcttaaaggagaagccttgagtcttcattcactcactgggagttcctcagttgattggattcaagggtctctagtagcccgaaagcagcctttgacatggttcaaagtgagtatcttaattttcaacttcagttcattagttacttatccaaggttgtgtaaagaaactaataggcactttttgagccagaatccaaatggtgatttctgacattctcttttttctttcagactagttttgatgctccaaaaggctatgcaccattagctttggatatgggcagcatgggcaaaggtcaaatatggattaatggccaaagtcttggccgttactggccttcttatacagcattaggtagctgtggtggctgcaactatgctggaacatatcatgagaagaaatgcctaagtaactgtggggaagcttcacaaagatggtaagtggataactaaaactttatttgggctctaatgctttggtgggaaggtcacaaactgacaaatattgttaatactttcaggtatcatgttcctcattcatggcttaaaccaacaggcaatttgttggtggtattcgaagagtggggtggagatcccaatggtatctttttggatagaagggatgtagacactgtatgtgctgatatctatgaatggcagccaacactaatgaattggcatatgcaagcctctggtaatgtcaataaacctttgaggcctaaagcccacttgtcttgtggcaccggacagaagattacaaagataaagtttgctagctttggaacaccagaaggtgcttgtggaagcttccacgagggagcctgtcatgctcacaattcatatgacgcctttgaaagggtatgttatgctagtgtaattgatttttcatttattggtttttcttggtttcccatcagccggcttacattgtttgttttacctgcagctttgtgttggtcagaactcgtgctcggttactgtagcaccagaaatgtttggaggtgatccatgtcctagtgtaatgaagaaactctctgtggaggccgtttgcagttgattctaaacatccgaaagcaaaaggtctctctcacattgtttttcgttcacgttcatgctcgcatatagcaatctcagttaatttttgggtacgtttatattctatacatgtaagtcagctgcaaccatttcattggctttctccttggtgaagttgtacaaaacaaaatacaacacaccgcatggttgaatgcctaaagagctcttcaagatgattgtgattaagcaatatgtacataactagctctcgtttcaattggctccctgcatgttatacaatgatggggaagagaattgtggggtcagtttgcacattgagatgacac

SEQ ID NO: 185152 - DNA, 526 bp, Cannabis indica
tcaatttcagtcaatattttggcctcccatcataaatttttttgtggatctggatgatgttaggatttaattccatttgagaatgagaagtggatcatatcaggtcactagaagagtcttctctctactgctggttcttctaagttggcattataactatgaggatatttatgttatgatcgagtggttggtggactactattccctggaattttaatgtgctaattattcgaaaatctcatctgtaatagagcaactaagtgaaaaatgataatgtcatatagtaattttatatatagtcatctttctaaggttatcggtggaattaatgacacgtttaccttgcaacttttgttttggttgatttctcattgggttgggtttagccttaggtttgtgataggaactccttgatccatggggttactggataggcccgttcgtttaagaaatgctttaatatgaagttaaaaaggtttcaattttacactcaactcgttacacttttttctttaataactgaagt

SEQ ID NO: 185153 - DNA, 2398 bp, Cannabis indica
  modified_base (27)..(27): a, c, t, g, unknown or other
agggagagagggctctggattttgcanagagaggaattatgcttttgggcagtggccagaaataaagcaaaccaaaactaagaatattagctagaaaacaagaaaaggggtaatctaaatttgcaaaagaaatatcttttttcaatcattagtttatgaatttctgatgattgacagatacccattaacaaaaataaagaatattttcatgacttcatttttacttatttatttattctctaaatttttaaaaaaaaaaaaagatgtaattttattttgttttcttgttataaaaaataatagaataatctagaattcacagatggcagaggacatgggaaatggggtataataataaggtttctctattccaagttggtttttttttcactttcaaaaaagtttaataaaatttacattttcatttacttttgataatatcctttgcttagatattcttttcatttatttatacttctataaagatcaccaaccttgatttatttatatcatgtggaagagacaaagagaaaagcaagtgaacttttttctctctttccatcctttttcttgctttgttgcttgccactcatattttttttttctgttcttctcactcaatttttttgtataagctcaaaaaacagataccaaacaatacttacattaattagaacagaacaaggccaaaactagactttctatattctcacttaataataaaatgtgacaaaatcccctcctcaaactaaagtattctctctttatttctttcaatatttttaggtgtgaaagtgtgtgtgtgtgttaggttagaaatttacaaaggtcgatctaatataaatttaaaaataaataaatagagaataaagagaaaaatattgctttcttttcttgcatggtttgggaaaacactatacaaatttatcctgaaacactttctatttgtgcaagtctattttagaggtttttagagaaagtttacattgctggattgcaatataggttgctaaagttagaaaactcaatacattttgagtaagagtattagaatttagaatggtattaaaatcagttgacttaattcttataataaaatgctgatatggcaaattatcaatggttaatacacccaaatggcagtatctgatctccttacaaggtcaacattagcaataaaaattttccttcctttatggaaaatattaggtcacctttttgtttgtcaacccatttcttaccccaccatatacatatggtaaaggaaagaatcaatcttaattttgatttagaataattattataggtactatttcttttgggtaaatttttatttagggagacaaaatatgctgttggcactagtatgtaattataaattaagatactccaatataacaatatatccagttatatggtttcaggttggtaaagtttctttcttgtatataaaaatgtattttatgtatagaagagaacatttaacttttttcttttcttcctttataaaaatgttatgtttcatacaatacaagtatagaagtttgttcacatacaaagcaaagccatcttttttattattttgattgataattttgttcacttcagattgcaagctgtattgcatagtgaaaaagttactctatagatacaaatatcaagacttgaaaaatcaacattatcatgcaaaaagcagtagcaatatattagctagatgcaagctagttttaatctattgactagacatttgtgaaccatactatgtctttaaattagggggtatttctttatttttaatttatttaatgagcaagtgtatacatatagattggtgtgaagtaataaaaatttcttcttacacagcaatagggtcttgtcagatgtgattgaatgtggaagaatcatataattattaggggaaaggttaagaggataaggttcatattcaactttcaagcatttgcatacaacaaagcagctactcttagtataatataataaccagaggactctattttttcttcattttttttttcatctttccaatgacttaagtgtttggacagaattatagtgtcccaacattaatgttcctttttttgcaccattagacacttaacactattgatagtcaatataaacatcttgtatcaagtatctacaatctactagtgattttcaaattttgtcttcttctaaattttatattttatttcctcttcatttctccatcacgtgattccactatgttatatggaatcaaaaaacaaaataatgctctttttttatatatattattaaagatgcaaagataagtgtattatcataaactgtaaaaaagataattgggcaaggttctgtgtcatattttgcaaagaaagtgagagagagagagaga

SEQ ID NO: 185154 - DNA, 3073 bp, Cannabis indica
ttattaaataaaaaatatgacaaaatattttattatatatttatgatatattcttaattatatatgatatattattttttttgctacgaattatttatttatatttatttattattatatattttaattttaatttattattatatatttttatttaatttaagtttttttttctaaaaggaaataaataaaatagtccagtccattcttaaaccaaacacaggattactttcagcataatccaaaacaggccctaattgtattttcgaggcgagtttattgagcacatttattattttataatccaaactggtttattttctaactttttaatgtgtcattagcatattaattgctcgaaatataagtataacacttgacaactctaaaagtttcttacatagttccaaatcacattaaattaataacttttggtaaaaattaactttttctcaaaaaaaaaaaaataaataacaaaaagaaagaaagaaaaatatcatgtgaccatccatattaagaacattttacataaaattaattttacaaatacatatagtaagagtaactacattagagatgctctaatagtattagtcttattatttttcttttctcttattgcgaggatattggaaactcgtataagaaaatgtcgaataaattttttgccaaaattaaaggaaagacaaccttaataagagaaacaaataattcattttataagtttgttattacgggtagtttctacaaagtgaacgattaaactaataatgtagtatatatataacacttgaattctcgatgtaaatactattatttcaaagattaaaaagaaggctgtgactatgactatatagcatatcaatatggtaattaagttcacaatcacaatcacaatctcacatatcaaaagtcatattattatatggtttggttcctaattaatttgtatatatagagagatggagaaccatagatcgagggtagaaaattataaataaggaaattatgaaacccatatcaattaatatattaaatttaaaataaagaagattgtaaaataataaattatatgattaatttaagtatataataaaggtgagttgatttcctagagaaaatttccttctttattttggtatcattttgtattttcttgctctactctttcttagactcacaacataacaaatcaactgtttcacacctttccacaatcaattaactataataaaaaaaaaaaaattggtgtcaagtagtaatttaaatgcatatatattcgatccatcttgctatttgaccacgtcatttattttatctttttctttatttttttttaatttttatcttcatttctttgtatagatctaaaacaacaatttttttctcaacttggtgttcatttataacctcttcttctttttttcttatgtaattttaatgtaatagttttatttgtattttaaaggttattttggttctatccttcctattccctcaaactataataagaaaatttctaacaaaatttttaaaatagattttgtattttttaaaatggtaaaaataagacattgagcttaaagtttgaataactttttttttaaaataatcaacttgaaaacaatccctaagaacagatatagaaaatgtaaacatttttgtcataacaactttagatcgaattattattaaattttattttgcaaaaaatcagttcaaggtcctatttgtactatcatggaaaatacagggtatattttgtcatttaacaaaatataaaatccaaaattagtaatttttacaaaacacaaggtcaaaaataatattataaaattttttttattatatctttatataaattataaaattatgtaataaataaaattcaatatataatgtatatgatactaattttttttttccgataaatattcttaatttattatgataatcatgatatttaaaacttgattttgttttgaaatcataaagaattaaaggattgaatcttgtactctcgtatgtagctcgatcaacatatgcaattcaaactctaccatatatatatatatatatatttatatataaatcaaagcatcatcatcatcatcatataataataataataatgatcagatggtgatagatgatcatgatcatgatcaagatggttcggtcaaagtcaaagttatgacatcaaccggtggcgtaatggagctctatgctcccataacggtcagctccattaccgacgagtttcctggccacgccatattccggcgaatccaaagccctaataatggtgacttagtcttctccgatccattactccccaacgaccacctcaatcctggtgagctctactatctcctacatcatgatcatcatgatcatgatcttatcatcatcactactgatcaaaatagtagtagtattgtgccgtacagaatctcgtcttgtgatggtgatcatgaggaattagggaagaaaaagaagaagaagaagaagaatttgatgatgagaaagatgatgaagaaaaatggaagtagggtttggagagtgaagttagctatatgtcctcaacaacttactcagattctgtctagggatgcacccactctagctctaattaatagtgttcggacggtggccaagtgtggcggtaaccgcggtggtgccgcctccttttgtgccagctccggttgatgtagtgtgtgtgggtgtagctagttttgatggacaaaagtgatcgtgtgtcacatttattttgaatattgtcttttggtcaaataaagatttacattaatagctacaagcctacaagtaatactaatgaggtttttattaaactgtaattacaatcagaataattaatgggagaaataaattaatttaaactaaaaaagaatcgaaaataatatttattatactatttactaaattgtacagaaagaaaattaaaattatatattattttatttatataactttgaaagataatagaagattttaatttgaaagataattaatggtaaatattttttgtttataaatttttgaaagcattttg

SEQ ID NO: 185155 - DNA, 942 bp, Cannabis indica
aaggagaaaatagacaaagagtagaagagtggtactagaactagacacgtactatggctattatacaaattcttcaataagcattaaagttgagaagttaaagctcatgtggctcaatgggtccgaatttaaggagttgaatcctcaaaataaagccccgtacgccgccgtttcatgttatttattaatatttgctttgggagtaacgaaagaaagagtgtgagtcagcataggagaagtgcaagagcaaagagcagtgaagatttggtaatcaatgagatgggactgcttttaatttataaatcttcagatcttggattttctttgggggacttacttttcaagtgaaggttttgatgagggattgattggcaaactttaacaagtaattcaacatgcaatgataataataacacagtagttgtattatttaaattgtaaaacaatgttatctatttttgtttaacttgagcttgttcccttctttcttcatcattaggcccaaaaagtaaaaaagaaagaaaactagctggcttcactctctcttttatatataagtggttctcacattcagctataatcctagttactcttctttgatgacacaaaacaaaagctacctaaaggttatgctacctattatagatttatacccaatgatgaatacatcgatgtgatttaagagtatactattacttttttctaattattgttattattgacagaatataatattacttgtatctcttgcttaaaggtaaaaccttctagtgttgttcactcatggtctctataatgataataagtcccttccctttttatgagaattttatcattattatggctacaaaggtgtttttttttctttcattttctctttttctttataaatttgacatatttaagtgttcaatacttcaacccaaaaaagtgacgtgggct

SEQ ID NO: 185156 - DNA, 2037 bp, Cannabis indica
ttgtgcaatgatattgctgctcagtcaaacaccaaacatttgtatgaatggaagttacaagtttctcacatgaacttctaattcctattagtctgcaataatgacaaagtgataattgcgggagtggatggcacactgttattattccttttctctaaaattgatgaattgtaatcaacaatagagtcagtgatctctcaagtctgaacatatttcctttttggactgccttgtgcaggagacatcctctgctcaatacatattgcagcagtacacagcagcatcaggggggcaaaaacttcagaattccatccacaacgcttatgcaatggggaaggttaggatgatagcttctgagtttgaaactgcaaacaaggttgtaaagagcaaaaattcctcaaaagcaacagagtctggtggctttgttctttggcagatgaatccagatatgtggtatgttgagcttgcacttggtggcagcaaggttcatgcaggctgcaacggaaaacttgtatggaggcacacaccttggcttggtcctcatgctgcaaaaggacctgttagacccttgcgtcgtgctcttcaggttaaattgcttctcagtttcatgctatttgccttgatccattgccctattgtttattatgttcattttctaaatggtttaactttgtatctcatttgtagggactagacccaagaacaactgctagcatgttcaccaacgcaagatgcattggtgagaaaaagatcaacgaggaagattgtttcattcttaagctttgcgctgatcctttaacattgaaggcccggagtgaaggtcctgctgaaatcataaggcatgttttatttggctacttcagccaaaaaacagggctgcttatacacttggaagactcccatctgacccgaatccaaaacaatgggggtgatgctgcgtactgggagaccacaattaattcattccttgaggattacagaccagtggagggaattatgattgctcactcaggacgttcagttgtaacccttttcagatttggtgaaactgcaatgagccacacaaagaccagaatggaagaggcttggacaattgaggaagtggctttcaacgtccctggcctttcaatggattgtttcattcctccagctgaactaagatttgcttccatgagtgaagcctgtgaactgcctcagggtccaactgtgacgaccaccgttgcagcagctgcatacagaccgaaagtcgctgcgcttgagaaatcgcgagatgaaaatgccaaaaattttgtgtggaagatggatgtttagggaaggaatctcattttgcattagattcattgcttggcaggcgtaaatgctagttttaaaaactgacgaagtctaaagtagattggcaaagtaggactatgaaaattctatttcttttacctactctttttcggcagaattaattctgcatgtggcaaatgtgtttacaagtttgtatatagtacacaatcgttcatgtcaccgtctcatatttctttatatggatatatagatgtgagttaacggttaaaattaatactacttaaattaattaattaatttatttttttactaaaattttttttttaatatttaaatttaatttaaaagttttaaaagaattaaataattattttttatataaatatttatttaatttaaaataaacgttatttaattaactaattatattttataataacatttaaaatatttaaatttatttacttattttatagtaattaattagatataatcttttaaatttatttaaattaaattttaggtatttaaaaaatataatagaattgtattaaatttaattttattattattatttaaattaataaagaagtaataacaactctgatacttatacaactgtaagtaaaaatatacattacatgttactaataccaaggatatatattgcatatttacattttttttttaaagattttatttacatttttatgaaaacaacgttgttttcatattacaacaaca

SEQ ID NO: 185157 - DNA, 4790 bp, Cannabis indica
ttttttttttttttttccattctgttttatttaatcaggccgagaattcatggagtgatttcataatcagatgagattagctcactctcttacgaacaaatctctgcagtgaacagttaaaatacaataaggctataaataagctctatttttaagaagattacaacttctcgaagtgggacaaaaacattctctatgacaacattttccaacacaagtaagttgatagcactaaattctacctctccaaaacccaagaactcaactctcaattcaatcccaaaccaggggaagaaaaaaaatattattccttctccaacctaaatgttacaaacggtggtcctatgaaaggtgcgggaaaaagaagatcaacaattaatcaagatacatagtgtccacccattataatgtgttctattaggcagtggaagctgtttcagctaccatgttccatactctcacttgacccgttccatctccggtgaaaaataggccaccagggcctacctgaattgatcgtacctcttgtttcgagaaaaatttccccctctcggtaaacctgagacaagaatgagatgtgagcaattaatgatccggctaatattttgatttccaaccatagaagtaaagcaacattactaatgttttcctaaccgagggtctaacttctgtggctaaaatgtttctatagacaagaatagtatttgacatattcccttcatatttgaaattttgtaaatgaaactggcatgtactaaatcattgactcacgatggcagatcatagaggcgaacagagttgtcattgcaagaacttagcaacaccggttttccttctgaatcatgcataccacagagagcaagaacaccctgcaacaatttacagaactaaagttacacgtgtgtgatagatctctcaaacctagatactgcgttgactgtctgcaaatatcacccagaaaatccatatttttcaacaatgatgccgttttaacagcataccctgacaaactcggtcacagttgtatacatactctcaaatttgccttaataaacaacaaaaggctattttggacctcatagacctatctatatatataaactacagcatagatgaccaggctaaaatttataacagcaccaaacaaataataacttacatgctcttcattgtgagtatatgttacttccaagcctccattttgtgtagaaacccacacctgccaaaaggatggaaaaaactagtgaaaaaaaataagtgacgaatgcattcaaactataaacatcaatattgtgacataatcggtacttaaagacatgtatatgctatagaagtgatgacagacctttattgtttggtctaaggaacatgatagaagaaactgatcccagcaaagaacagacataaccacggcactatggtctgtcagtgtctgtaaacactgcaatgtttcaaggctccaaacctgaaaaatatgcaaatgcaaataaacatataaatatatgcagtaacaaccgaattcaaatgatagatgaaacagaataataatactataactaacctacctttatggaatggtccatggaacccgagtagagcctgttagccccaactactaatgaaacaactggaagtgagtgacctttgagtgatgtgagtggttcaaaacaattggtagatacattaaatttccacacaagtatagatccatcctgcggcaaaggaaattctaacttataatatgtctatcagatatgcacaaaaagatagaaagtaagagaaggaatacattcatcgaagatccaaactttttaagagaatagttcaaaatttcataatccaaagtaaagcaaacttgtcatagaaaaataattacctgtgtaccagcaaagagcaactcattacccacaacaagggaatacacttgccccacaggcccagtaagactcgattctgtgttagtttgggtattccatgcctgtattatcatcatcacaagtcttgtgtataagaattttattccattgttactgctaacacaagcagagacaacaagtagaggatagacaaaacctctgcattaccttcaccatgttcagcataccaacaaaaatccaaggaccttcactgatcatacagcccacttcacagccaagttgaataacagcggcgcactgtaataataaaataactttttagggacataccgtatacccatagacaaaaactgcagatagtaaatcagactgctctcgactccacgacaaagaaaataatgagtaactaaattctaacacagctagtgttctgaaatttgagagaaagtcatctcaagcaaataaaaatgctactgcttatctggttgtttaaaacaatatcagaaaatgttaagagtaaacaataataattaaaaaagttattcgagaaatacaaacagcaatacttcatttggttttggaaataagatttacatgagttgggcatgtaaattcatgtatcaagacgtgatccacccaacataagcagaaaaaaggtgtcaaattaatattaccagccatcacattattgttgaatcagaaccatatagctgaaagaagcaacagcgacttaaaattactttacaaaccaagtattccttcaattacttccactaacttaaatgtcaaaccaaaactgcaagttgtgggtgctctttttatagctttattaagctgggaaattggcaaaatctcatcaaaagttgaactcaagaagatgttgaaaagtgaaggagcattcccaatcatcaccatgaataaaatcacaagcaagctatggaacgttaatataaagcattatttatcatattccctgacagctgaagccaaagaagtgagggagaagttatatttactattattatttgaaagtaaaaaaagaagaaaagaaggaaagaacaaatacctgtccagactggcaatcccatatccgcactgtctcatctttgctaccagtataaagcttatcagacccagatggcagagcaattccagtgacaacctactcataaacaataccataaatctcacaacacaaaaatacaaacaattttagataagcaacagttagttgttatcaaataagttaaattaattcaataaatgacaaccataatccatcgaactcacattctgatgcccctccagctgcgtcaacaatgagaagccatcccccatagtccacgaatgcaaaaacttgcacttatcaccatacgtacagttcccttgaatccaataattacaaaccttgtccgtcttacggacaaatttattgccaccggcgttgccgccatggactctaccccaagtgttattatgcgggacgcggcggggacccgaatgatcttcggcggaggcggcaaaggcgtggtggcgtttcgaagaagacggcgccgttccattaggagggtgcaccgccgggggatgtaattctctgtgaagaaaggggcaggggaagcgattgcacttgcccgctctccaatggtaacagaccttttggttcttcgagtcagaggagggaccggtcagcctatgaaagacgcgcttgtttccccctccgtccacatccattagcttttctttaactctgatccaatccaatccaacttctcccacaaaacctaaaacttccgccaagatttggaattgattcaatccaaacgaccactcaaatctgatgcgcaaaatttgagagaacagaacccctaatatgtaattcggttctgattattttattgggaaagaattgaattcaaaagccctaatttcaattacggtgccaaaaaagtaattatatgagtgggagaagggaagtggaaactggagaaaggagagagtgatgttactatacaaaatttcgagcctcgtcaccgagacgaatcgtcggtagctgaagaagttgaaatcactgttttgccctgacactgcgtggcctgactctctaagccgatttgtgttcttctgtgctatcgttgtactttaccatgtacgcaaccgtgtccttttcgcccacgtgcgatgttgagaaattgggccaagcccattcaaatatagactggactggcccatttcgagaggcccatggtttggggcttctactagactaagcctgctataatccaatgtttcgacaatgtaacgagatcttcgttgtttgtgtggccatttcaaaaaagaaaaaagaaggggagagttattagtttcttttactttagcgaactactaaaggaggaggagacgaagccaaagagagcccacgagacaggaggagctctgtcttggacaactcaactactgctccaacggactgcttccttcctttctctctttccttttctctctaagatcaggtccttgcctgcccttccttttttttttttttttgtgttgtaattatatgtctatacttacaaacatacatatgcattagcgcgcttgtgagttcaagtatttcatccctatggtaaaaatggaaaattttggatctgggtctgtctatttattgcttaattttaatgggtcaatttggtttagctgttttttcttcttttttttactgtcaatttagtgttcttagttcatgattagtggcgagttgctttgagtagattgtgggttgttttagatacttaaggttagttttctttgagtgaatcttaagattcttctgttaatgagttatgtgttttgcgtgagagaatctagttcgagttctgttttctaagcctaagccgaacgatgtcgacatcccat

SEQ ID NO: 185158 - DNA, 3682 bp, Cannabis indica
aaaaaaatgttctaaaaaactccgaaaaatgtggctactgcgaaaactagaaacagtacacctcccaaatagccaacctgattaaggacaagaatttagtcacatttcactcttgaaacaaggatgtttagtatgttttcatgggaggggaagattgtggttcttaccaatttttcggaaatgtagttggcgagaaatgcccctcctatgattgcaataacagtagcgagtaggtgtccggctatggccccacttgccacgccccacggagactacaggaaaatggaaactattattggtatgggaaaatcgacactcaaatccagaactcgttattaagaactaaatccaacctgtgcggcaccaagagcgattgttgccagcattgaacgatctccccattcctagaataaccccacattgtaaagttaaagtatcatctttgaggaacaatactactcatctatgcaaaaatagtagccttgaaagaaatcttgttgcatataaggaatgagatatgcttacagcaaagaatacaaggctgaatgacttccaaataatttccagcggattggagagtcgctttgatgcctgagacacatttataattgagaggaattaagaacataatcgacagaaaaagtagattcgaaaaaatgcttctaggcccgagcataaccttttctttcacaagctcctcagcttcggcatactcatcaagttcaggactactgttgtcaccgctcttggtactactcgatggaaggtcccatgcatcttttaatgctttaataccgaagaacagtagaagagttacagctgcatattctccaattggcaaggctgttggaatgacagaaaatcgagaatggatgtcaaataagctgtgaaagaaacaataagcgggtatagatgcaggctaactactaagaacttacttgtttgaaactgagctggtacagaatgaaataatcgcccaatgacaaccgagagaactgtcattagtgaaagagcacccattgaacccaacaaaacctgatcaatgttacataatgtgtaagagtaagtagtttctaaagaatgaacatttatctatttatgcattgtgaaatgacacatgatactttttattttaagtacacaggattaaatcgttgaataaagaaattagcatacttttatgagtttaagattttagtaggagaatccataccagccctttctcatattgcatggccaagagtgcagcaataaagaatgtctaccgaaaaaagaaaagaaaacggttaagatttaactcatcaaaaggaaactagaaaacaaacagtatctcatggtagtcttacttaccttgtccccaatttcagacacaaatatcaatgagaatgcagcggtgaaacccgactttgcaattgctgctaaaattgatgacggtcctcctttcacaaaggcaatgagtgaaaataacaaaccacaaccgaccagcacaaaagcaatagcgacgggataaggaagttggttctgtggcttttgactgtgaaatgatcaaaaagttggcatatgagtttccctaagacgaatttatgaacaagtaaacgagctagaatcaaaacgaaaacaataggcagactcacatgtataaaatacactataggactgaacagactttatatttatcatcactaattcttagaaaagtttctgtgagttttagacattgaaatttataggaacaactcacatttcaggtgcattgtcactagaggaacctgtggtaaatagtttcttgctctcattatcctcccttccatcatatccccccgatccaatgctggcgttagatgcttgaactcgaaccgagccacttaaagaactcgagagctctctacatcttactattataacaagttaaagacagtaaattaatgcaaagtcccatttcaacataatttgcttctaagaatcaaccttcatcaaaataaaggatcacatacaatgatacaatgcaactcaaccataatctttgtcctaactatttggcaccaatcaaatttgtgtgaagtagctcaatgaactgtaattcagcaaatttaagctcaaattacctctaaattcttcaaaacccatataggaaagtaaaattaatcaataaaatgcgcactatctacttaagcaaacaagattaacttacattcagccaatttagttaaatcaaatctaaattcttcaaaatccagatagacaaagtctcaaaaacaaaaacaaaaaaacatttcaatccaacttatccaaaacccaaaatctcagaaatcccaccaagcaaaatgcttgctttataatgaaaataagctcattaattcaaaattacaataagaatttaaattgagtgaggataacttacaagaagtaaaaatggcgtttttagaaagagtggcacaacatggtagagtgtccaccacagctaacaagggaagctttgttcttgatacaattggtctatgactatgaggagccaccaatttctgcattctgctccttcttcttcttctttactcttcttctatggagtgtggttttttcttcacaaattgagctcctccatcaaatattccaaaatcccaccaaaaaaatatgatcttttttctattgattttgttatttgaaggaatcccaaaacgaaaaagggaacaagtttggatttttttattttttgtatgagagagtttggatatgggaagagtcgtagcttagaaatatagtaatgaattaatttttgggtgtttttctggtagtttcttcgatctgagggtggggctttgactgtctgccacgtgtcatctggagataaaaacggaactcgaaattcttctcaagtatgtcattatttgtataaatatttgtaattactgtaaaaatctcttgtgtactgaactattagtacattttttttttttttgggttaagttgaactattagtaaatttaaaataatagctccacataaataatagctctaagaatgcgcacacatactctcataatatatcgttggattgctatttatatatttatttttatatatttattttttgtctgaatttttgaattgggtcagactaacattatgttaatactatatcaacaattcgtttaaataaatgatcagaatgcacttacaaaggatatttgcaaaattgcttttttaataattttaaggagaatttttcgacaaacaaaaaaaagttcaaaacacaaaactctagaaggaatatagtttggaaataatccttatttatttttaagacattatttttatgtatttgtagtatttttaagtattttaggacttttgcctcttgaagtaattttatcatacggtaagtaaaataataatattattacttagtcaattattacgtgagccctacctatataatttaatattaaaaaataaaaatttaaatcattaaactaaaaattaagtaatgattaagaaaattacctaaaactaaatttaaaaaaaattaaattattttttttaaattaattatacatgtacctttgacacgtggcaactggttaatcattatacttgctacttatgacaaaactcgacaaattccatttttaatttgttgtattttatttcattaccaccccaaaactcaacaccaacaatggaa

SEQ ID NO: 185159 - DNA, 2500 bp, Cannabis indica
ataagttctgcttggaatgtgatagaagggttttggggagtcttggatttgcaagcttcttgagccatattttcaaaatccaagtcacttggtgaaaaagtaactgtgatcggtggtaaaaatattggcctcgctaaggggatagtaactaaactaggcgatacaagccaagcatcttctcgcaaacaacgacgctttccctcaatgaattcttacaaaaattgtttataatgattacaagcttcttcctagtcagacctaatgagatagtccctaatttttgcatcatttatttcaagtgtggtttgaggttcttgggtttagggcttaaaagctatgattggaaattgaggatagtttatttctaagggaactgggatcgtaaattctagggtatattggaacatgattacagagaataatcccccaaatcctagaaaaacaaaacccaaaacctgcagatcacataaccataaaatcttctagccctaaattattctctaaatacacagttcactcaaaacagcaaaataatacaaaaaataatacatgccaagaaatgaagactcgaaacacaaatgaaactctacaaaagaaaatgtcacttactgggttgatggaagattctgagagttaaagaaattttctatggaaactttgattccagtgtaattgggtatggaaagattccactactccaaggtggaactcctagtttaactccatcactggaaaaatggaagagaagatccaagacaattaaacacctactatccgaatgacaaaatgggcataggggaaggcgtcccctaaaatttcttggagaggttccctccatactcatcacttatagaactctatttttcgtagacaactcaaagcaatagatcgagaatctaggggaaagttattagaacaaaatctagtagaagaaatccaaaaatcaaagccatttgaagtcctaataatgccaaattggtgtgaagctaatacactggcctagtgttcattcaaaaactcgttgtgccctgttcaaccctaattctaggatccagtaatatgcaatcacctatcaaatacagatggccatacctaactatccacacaaaattagcacttctatggcacaaaaatttccacataatcgtaccctagaaataaaactctacgggcaacactttaccactcaaacatgcaagacatcctagacctagcttgaactaagcatttctatcttagatacaaaatagcaagtagtcaacagagcgtcgggatacttacttgttgtatgagtcgaaaaagaaaggttttcatggaaatctgcctaagaatgatgaacccattcgattacatgatcatagccggcttgagcgtcaaaacactcgtcagtctaggggtggaatagtttgaggtctagtggctctgcgtctagaaaagaggttgaacagaggtttagaaaaatttgaatcaagcagtggaagacctcttgcattcactatcgaagacgacgatgaaatggaaacatttttggaaaacattaagttctggcttaaaatttgaaaaatggtattttgagaatctaaagtgatgaaaaaaataagaaataggtttggaaaatctatttatacttcaaccaagatccttgttgtttgaattagacgacccagatctctccttccaaaaaacacacgttgatccaatggatagaaagttgaaaatatggcatttaaaactcactgcaggtgttaattttttatcattacacgcctcaagtattgtacgtattaaaggatagattatttcaatcgtcatgccttcataacagttaaaagatggacccccgacatgcatgcgttgttaaaagctacattaaaggtgctgcatgcgtgccacgccaatggtacttgcagttaatgaccccttactcaatgacagcttacatgatgcatttgcgatcccaatagtcatcatgtgtcaaagtctaatctccatgaattagatgaagactataagatccccagatcttaaaaactctataagcttggggttaaatgttatctatatttttttagcatgtgacacgtggcatataaaggaagggatgaacctcataatctcgctaattaaagtctcccattacaatcccatcacggagaggcctcacagaaccagaagcgagtcaagactgatggataagaggaagtctattctgtcttatcctaagtttcttggacgtggaagacatattgtctctcctagacttgaagtggtccaaacatcagggccaaccctaggcataggcatgctaggcatgtgcctacggcccacactttttaggggcccaaaataaaaaataaaatttttaattaggcttttatttaagtaaaattaagtgtattataaacaacaaatatttatagcttagttggttgaggtgtatgaaatattatacaatgtcatgggtttgaatcccataacacacgttttttttactattttt

SEQ ID NO: 185160 - DNA, 3339 bp, Cannabis indica
tttttttttttttttttaacaggcctgtcaattctcaattcatatatttatattgttatatatgtttagtgtacgtacatggtccatcaatattatctaggacaactatttaccagaattgactagaaagacccagaattttattttgtcaaagtaaaaaataaaaaaaggtatttaattttatataataaatgtatttataaaaaaggcactcatgcattgaatatatgtaaaacgaagaactaaatataaaataaaaaaaaattacatttaaaacttatacaataaaaattatgagatggacatattcacaataaatacacatgtaaagggaagaaaaaaagcataaagagggccctaggcgtacctttaatgcttctatataaataacttaagatttatttttgaaataatagacatagatagttataagtggaagagagagatcatgtgaaacactaagaaaaaaagtcacgtacaatgttcacaacgacaactaaatgaaagtgtatatatatatatattgactgttaatccaatataaattaatgtcagattattttcctctcacatggccatggcgatgatgagttgaattgtatagtactaattaatcatgtgattatataggaattaagtagggttattgtatacagagagtataatacgcaaaaaaataattaatgcgatctaccatagtactgtaccaacaatatgattttaacaaactttcacaaatattaacaagaatcaaactttcaaataattgaaaataaggtaaacatatatcaaaaaaaggaaactgttataaaaaaaaagtgaaatgaatgaaatcattttcactgtggccactttctattcagtctggtctactggaccctatggaaactcaatgtttgaaaaaatttcaattgttttttttcatttttaagggtttgaaaagaaaaaaaaaattggccaaatagaaaaataaatatttgtgtatatatatatacataccatatcaaatggtggtccattggtaatggtctaacaaaacgttacattattttctggtttaattatatatatatatattttggtgaacaaactttatatagagtcatttacgcctccaccaaccctaataactataagataaagatagcaaataataaaaagtgacagcatgttattattactttatatgtatatatgcacattagctagcccggccagtcacataaagttgttattattatatattaaacaaaattgaaccaattaagaaaatactatgcaaaaaaccaagaaaagaaagaaacaataataacatgatcattattattattattattaatcaatgaatgaagatattatgttttacgtacgtaccttgcaaattgacatgaaatcataatcggtttctctatcaccaatacccaaatccggtaaagaagagccaaactctttaacaagaacttctctcttgtgttcaccaacaagaacacctggagttttgacaaatccggtaaccctaccggattttgtaacctccaattcggtcccgagaaccttatcaacacccaagaaagtcttgacaaaatgttccaccatgattcttggactggccgtgacgacataacgtttcccaaaagaactgaaaaccctccaagtgtccgggtgaacatcctcggagtagaatttgggaagaacagacctcgagacatgctcgatgtctttgatcttcaaacctgaaaaggctatgaagatcaaagtcttgatggctgcggcctcagacaagaatatgtacgtgaagtacacaaagggcaccgccatcaagagaatcaagcctcgaatgaggctccccgcttcaatggcgatgagcatgtaatagggaaaggcgttagacgagacgagaagagtcccgtctagatcagccgcaactgtttggtttgaacgattatcagggctacattttgtgattggttcgaaccttaatcgatgatgatgatgatcattatcatgataagcccccatagagaaataatgttcttttcttttttcgtaaaaatattttgtgggcgagtaatgaagaatagagtggagaaatggggggttttaaaaagagaggagaaagagagagagaaagatggtcaagtagtactcgtcgtgttggtgaagtagtactattatttttgttgttaccatgaaaatattatgtggttgagactaaatgattttgaatatgagatgtcaaaatgagatttttgtcatttatttacatatttatatattttaataacaatatatttaggagagaaggagtatatatgtatatattttgcgtgcaaattaggacagtataaggggtatatgagtagttgaaggtcgagaccacacacccacattaacattcaattggcctacttttttagtttataggcgccggccacgccgtttattaatataaagctcggctttacaatgctctttttgttgtactaattagcttaattataataattatcaatatatattcattaattcatttgttaatttcatttttctcatgcattgtaatcttggcatgggactatatttatatataaatgacttcaatgatgatttggttaattagcaaaggaattagttatgagaaatcatgagatggttatgacccacacacgcagtgtggatattgttacgagtgagtaaatattgtacgtattatctattaataatttcgtgatttttttttaaaaaaatttttggaaggtgaaattttgaagtaaaaattatgtggggaaataatgtttgatagaagttaggttgggaaattacaattttacgtacgtgggtatactttaattttgtgtctttaacaagctaagattaaatagaaggggtccacgggtcaatattacattaactactaccccattacttatccttgtatgattttctctcaaaaatgtatatattgtacttgcccactaagccgacctataacataataaaacataaatatatactgagttactaatgacaattgtatatgtagaattcaattatattgatttagaatcagatttcttacagtaattaatgttaaataatgcaaatacaacgatcaaaaatgttttatttgttatatatttacttttcaattagctataggtactatttgacctaccaaacttaatcatagaccgaccgagagtataccatatatatatatattgatcattatatttatataggtaagagtacccatttaagaatttaagcagatcattataaagacttagatttgatatattttatttcctagaagaaattaattttttcttttttttt

SEQ ID NO: 185161 - DNA, 1449 bp, Cannabis indica
atatggtaaaagaaagaaaccacaaagtttagactgaattgacaattgacctgtgtttggactttgaaagctattacgttttcactccgttacataacggtaaactacaatgtgcttaggtgtacagtttttctatgctactgcctccagaattcgacacgtggagccttatcatatttgttttttctttctagaatttataaagtttcaatctttaaagttcattaataatttaataacaaattacgtcgaaccccattaaggatttgaagaagttaatcttaattatatacttacataaatgttttgactttactaatgtaaaattagtcaacttttaaggtaaaaatcgttttttctttttaatcttaaaaaaaaaaactagtgaactataaaacgaggtttggaggagttaacaatagacactctccacctgttacacgttttctcacgtgaactccatttcatggaaagcctataatattgtcgtacatattatcaaaatgtatgtataattataaaccttcaattcatttcattgacctctctttctctctttaatcttcaaatttttgttttttgttttattttcttcttaccatagtggtgtggagcccatagctggacctttgctttgctggcttcaagctctccattgttggtcttttatggggtttgtctgctaagaaaaaaatagaggggtgagtaaatttttcatctttttttgttgttgttgttgttgttgttgttgttgggttggtccaatcttttctttctttcccataagactcttccttttcatgaatacactcctttcactttggtgttcttcttcttcttcttctaaatcagctttatctttattagcactagtggagagagaaactgaaaacccatctcttgatttcatggatccgtggatctgattgtgtttgtgttgttgccttttcttctttttcttcttacagtttccagatccttcttgtggtgtgtttatacatagttgattttcaagaaacagtcaaaattattaggtatgactctttctccttatctattgtttattcatggtttttgaatttagcagaaagttgttgaattttcatgatttgggaaattcgtgtaactttaggttgtttagcttttcaatgtgaactgaggtaaacccttctggattttctaaatggctgaaaattacactttttttttttaatgagaaaaaatagtaccctttgacccctctttgtcaaacatctccttctgtattatgttgttttctattcttatttttcatcgattgcggctatgaatggtcatgattttctgtttaaagcaaaaataatagaaagaaaagaaagatggggtttcagattatttggtcctttgcttttctttgacttaataccaactgaaataacctgtaaaaggggtagttttcattttgttgtt

SEQ ID NO: 185162 - DNA, 3762 bp, Cannabis indica
agatatatatatttataagtttttaataacttaaaaaatatatataaaaaatcttattagatcatgttttctaaataaaagacaccagtatcaataaccagcaaaccacagatataatcttacaatgaagtgattttcagaatgcacatttaaaattataatagtaataaatcaaaatcaaagtgattcgtgtaactcaataatttaatcttaaaatgtggcagaaataacatatagtggcaccagtaaaatattactcaaccatcttagaaaaaacacccgattccggttgacaatatcatggtcatgcatgttagtactctaagcactttaccagttaacgagcgttcttcttgacaccgagcaaagtcccacactttcacagtagtgtcatctgaacaggagcagaatttcaagtctgtcctacaaaagctgtttaaaaaaaggtcatcgtaaaatgatcatgaacaatgctcaaacagatataacatgtagaaatgtaccttaagtcccgaactgactctttatgagcagttttatttgccttcacattattcatgttgttctgccaatatctacaaggtaatccaatacaagagcattaaggatgttctttgtttcaggaaacagatgctaagaatgaaaaagaaattgatattactaactgtaaggctttagcatgaaaatacaattactttattgcgcctccatcatcacctgagaccatccagttatcattgtgactccataccattgatctgattgcttggtcatgggcctacattatttttaaaatgaagagtgaacaaaaaggccaacattttggtactcgatgaaaaatgtaatatcttaacactatgaagttgagtacctgaagaatcatttcaaaattaaatgactgtccattccaaagagtgaattccccactttgagatccagtgatcagccgccttcctgtaggagtccactttttgaaaagaaaagaaaaatatgaaagatcggcgaataccaagctcccgtgtacgtgtcacgtggatcaaaacaactcaacaactcaacaaatgaacaaaaaaatagaaacaacaataaagttatttcatgttcagagcatcttcaatgcagtgccagatctttgtggcaatgatatttagcataataagagaaaaacttgctccaatgcaatactaaaaggtgtgcaaaatttaacccaaagtataacatagtgccaaatttggcatatcaatacatagtacacttttaataaatgttcattaaagttgaccaatcaaatttcttcttttttctttattcactaattaaaactcattttcaatatattctatagtgcatttattgataattattccatttcaaaaaaaatagaaacattactgacttttatggcttttagtctcaaataatatttgcatattgcatctttcatctgagcataatgctaaatattgtgttaaatatagcatttaatctctttttattctaaatttggcattgtcattagctcttgcattggagatatgctctaaaagaccaaattatcactcaatagcacatacagcagtttaaacatgatatacaagtcaacgcaagctcaaatcatcataatcgagaaaacatacatcagctgaactactgcatacaagtccaacattttacaaagattacacaatgagacctattcagctaacatgatgtgagaaaaaatcttaatttaaacttacaagaacgcggttaatggagcaacgatttttgtttagagaagtatgtacaaactttgcagcgaaactagtagaaggattgtctgcataggcccccgttggcaacatctacaccacaggaaaaagtaagacatcgacaaaccatattagaataataattaaacaaagacaaacaaagaaaaagctgcttccaagttgttccaacgtttattccatccataacaaaaatgactaaacgttatataatatttataaagaggagaaagattgcagacatctatagccgctgctggagttggctgcaatattgtcctatctcttgaatcccgttgccacatacgaatctgcagaaatagtaacataaaaagttgaagtataaatcaaacaaccataaaagacatccgcacaggatctccaatcatttaaaacacaatgttgatttagaaaggttatgagataaatctaaagatgttgcattatgggttcataaatcataatgcgatggaatttaaaaaagttcctttctcagattggttaagaaactgaagttttgttaatgaaattttttgtgtatcttcaggagttatttttggggatattttttctaccctttcttgttttacttaacttttatttcataacacaagaagctttgtttcaaaaaaaggaaaaaagttctgttttctgatttaagtaaagattggagttccacaaaataattcaggatgatagctcctcatcttttataatgttcaattatatccaaaatatgacccacatttcttaaaacgctatatttccacccagaattgcagatactccatgatgttattaaatataaccctatgtttaggcatttcctatcaaaacaaaattacgaccggactagcagatactccatgatgttatccataaatatcataataacaactaaggcatcctctagggtaataatctttgtattaatcaactgaataaaatacaaagtatgaggttccttgttaacatcatattgatgaaaactttgagacatagaaacagctacaaatcataccaataaaacagaagaaaaggtagcaaccgtacaaaaaattgttcaaatctctaactaaatataagaaaacgggtccctcagaacctttaactttacaaccctatgtttccacccagaatgttttcttttcccaaggcatttcttccgttgcttctttttcttcaaaattatgctgttcttttctaaccacacagcccaaagtgccaacctagcactacggtggtgacagttttaattagaaccatcacataacagctgatccaagccaatcaatgatgggttaaagggagtatctagtattagttgtcatgagatctgatatagtacctttcaaagaatagagatagtaaacccacatgaattaacaaaatggaaactgtaatccacgcccgacttaccaccccctccaggaaaaaaaaaaagaaaaaaagaaagatatgcaagaagattatggaatggaggtatagaatcttttctttcaagtggtaagggtagtctatagaatcatagaatggagacaaaatttgtattttaaaattcaaacaaaatgtgacaatacatttaaatgaaacactggaaagagacaaaagggaaaaagtaaacgatgcatcatctgtccctcctccccaactttcacactatgtattacaaagatgaaatgattcaaagggtgtggtgcattacaagagaaagctaagaatctcaaaagaaaaagaagaaagaaaatgctgcttcacaaaagcttttaaaaaaagaaaatgaaactgccaattgtaaaggtatctaaaacaaaaacagaaccctgacataacaaaaggaaaggattaaagaagcaaccaataacctgcatataccgaacgacagtgctagtgtagtccacggcccgtcctctgtgtaagtttcttcattccttttgtcggcaagccatcagcatgagctgcaacctactagtttttgttttttttatacaga

SEQ ID NO: 185163 - DNA, 6951 bp, Cannabis indica
aaaataattttaattgatatatactcctttttataatcagattaccaaatataacctcacataacttattaaaattagagtttctaatgcacataattgggatatcacctataaaattgaatataaattaaagaataataaaatgaaggtaaaaattaaaatgagaaataaaaagtgggtataaagtataattttctttaaagggctataatatactatataagaataagaataaaaagtgggtgtgtgtgtgttggaggtcttgggtttgagtcccaggtaaaacaatgtaatgtaatgtaaaaaacgtttaaaaaaaaaaaaagataaggggataattaataaggcactatttttttgtaaaaaaaattacatttttacatttaattttttttttcacatttttacggtttttcataaaaacaacataaaaacaataagaaaactacatattagtaacatttaaataatatcaaaataacatacagataacaaaaaatcaataataaattaacaagagtacaacataaaagaccgtattttctataaataaaaccaaaaaaattgtaaaaatatttaaaatttcgtgaaactgtatttttgtaatttttgtgtatttgtaaaattatcccataaaaatatcggatgtgactattgtaaatataataatgaaattgaaaatggtaaaagaagaaaaaaaaattgtatgtataaaaaaatattgaattttattttaaattataacgtagaaaaaaaatatatataagaataaaatagacatttgatccagtaaagttttaaaaaataagtgtattatatgtattagatttttaaattactattttctttacattaaaatattatttgtatatataatttttaaaattttttctaaatatgtgtggattggattggatcgattacttttacatgtcaatcaacatctaatccgcacaagtgcggattttgaatttttcaatccaatctaatccgcacaagtacggatatccgcactttgcggattggaatggagaggatcggatcgtgcggattggatcggctattttatcaagggattttttttaggaatatactatattaggtaagtttttacaaaaataacgttaataatgtatcacacacaaaatgacgtgacacgtcatcatctcctccacgattacttgcaaacataaaacacaactgttaatcctaaaaaatgaaaattaccaaaaaacggcaattatatatacaaaaacttaacataacaaaaacaacgttattttttaaaataattgccaaaataaggtaggcccatgaaaatttcccttttatcaacacccctaaatattaaatataatgatgaaattgaaaatggtaaatttgcaaaatataagtgaaaaagcacgtttgagaccgaaataaggcagatatgaccctagctgtagctgagatgtgggccaagataaggcccatttttgttggacgatggaattggaatgatagcaaccttcagttaagttattgtgcctggctggcctggcctgtgaagaaacagcttcgctttgagtttgggttcggcttcctctttcttattgtgctttttattttattttctctcatcacagcagagaagggacgagaaatcaatttagggttagggtttttggctttgggaatttttgttcttcttctcattggtaaatagtttagcaatggaagagataaccgaggcagtgaacaacattaacttagcagcaccaggagattcctacaagaaaaatcggattcaggtttccaacaccaaaaaaccattgtttttctacgtcaatctagccaaggtaacaactccttttttcttacttattttcaatcttccccttttgttcttcgagttttatttgtcttatattataatgagtacaatgctctaaactagtgattgatatgttcatgcaatctgtttatgcagaggtacatgcaacagcataatgaggttgagctttctgctcttggaatgggtaatttctcactttttttttcccgttaattttagcttcagaggtttttactccttttttattttttctatgttctcatcgatttatgtttattgcctattgctttaggctctttatgtttagtcatcgctataaaacattagctgggattagttaaacaacaattttgctaaatttttgtactattaattgcttattcatgatggagcataaggttcttttcttaatgctctgttttatggaatagtgttcacgagttatgcagatgagtgtaattaatgatatatgatagtattcaaagatattaattcttttgtgtacttgtaattttatgtttgcagccattgctacagttgtcaccgttgcagaaattctgaagaacaatggattagctgttgaaaagagtaagatttttctattttgtaacatctttttttttctcaccacactggatgctatggattcttattaacttcaactgttctcagagatcatgacctccactgttgatatgaaagatgactccagaggacgaccaatccaaaaggccaaggtaatgatttgttattgtgcatatacagtacagggttacacaatgggcatccatgcaagacaattttatgcttttctctattgtctccaacttgtcaagggatctttatatattttcatgtggtattgtggtgtatgagtgatattgtactctattcttgttcagaagatcataataggttttctttgtttatgtatacacctggatacttttcaaagtccagttgaggttcgacaatttggatcggatggatgattgttcctcaccatttatttgtgtgtgtgtgtgttttttttttgtattgtgtctttaaaggtgcaagaaatgtactctggttattgatgtctgatggtgtatatatgggtacagggtacctatcatattcctcgcctagtttcctcatcgttattgttgcacaaatcgtttctttactgattgcttgacgtatttgccattcagattgagattgtccttgggaagactgaaaattttgacgaactgatggcggctgcagcagaggaaagggaagctgctgctgctgctgaggctgaagagcaaagttgaagagggtctcttacctagtttttctggttttgctgcttctaaaaatcaaagctattttatattgctctaatttttagatttaggattttgagttgctgttgtcgtgtgattctggtaaatcacaaagggtgttttaggagcttttagattcaagaatactttttctactagagatcaaattttgttatctgatcatttggttttttcattctctttgtatgttgatggaattcttttcttggtatgtgcaccttggttcgcaagttttgtatcctatgaatatgtcaccttattcatttgattgtgtgccttctttattacttgtcaccatagtaaataaatgtcgcatgtacttctcaaaaatgaataatattaatgaaaatgttcgtattttctttctttgttttgttgtcacagttgtcacagttgctcagtttatactttataaaagcaacggcatttgaatggaaatgggaaaatagtatccaaatcgatcaagtctattcaagtgtactatgcttttcttctaatctcaccatgggagtcttttatagtttctcaagaattaatattcaatgtttatgaacaagttaaatgtgattatttatctgaagtgaatgcaaaatagaaaggaatgtgaggcatgtcattgtaaactgaagaaggattaatgtacaaccctcatgcatttcttttttgattgttgattttattagatgggttacacattgcaatttagtgaacttcccaacaggtaatattagaacttttcacctaataagctaaggggcctattatagatctcaaaattcgtcacttcactaaaaccacttccactacaatcgcaatgtaaactaaaaacagacctttaaataacaacaccacactgttgattcacatatttttacgagaaggtaatcaaatacagatacacttcttgctcttacaaactttgctcttcctttgtagtctccaattgtggttaatttcttcgttgattttgcttatgggcaatttatgtactttctttttgttatttcattacaactatatttcgttttatttaggtcctattgagccatcatattctaagatggggttatctgatgggattttgtattgtttagacatgactttctaaatttagagatttctttggtattattatatggttttcagttgctttcagcctttaattgaggatttttcagaaggtaactttttttaattttcttctcttagagaattgaaagtgaaacatataagagaagtgtaaggtaccaaactaaattgaaatgcttgtagtaatatttcatattcttcgtaataaattgcttctttggaccttaaatttcttccttttcctctaacattgacctcttacatgcctcatagcacataaaagaaattccagcagcagggatcaatttcatgcagcttggccctaatcctctatacagtcctgaaattccctccctttcaattatgcttaaaagagcatgaagaaggtttttgtattgtctcccattgaaagctcctgcctgcatttgcttccgagccacctcaagtgggaacgttgcgcagcttgaaatggcagcagctgaagaacccatcaaaagagtgctcatatttccaatctcctcttgattgaaagctctcttgtaagcttttctcaacgtgtcataagcaaaatagtttgtggcagcatatgggatcactccaattaagcttggtagtaggcctcggtacaattctgcagctccttcctctccgatgatctttgataaggcgtgtaaagaattcttatacactcctctctgcaatgaaattatgcttgttagtgatgatttttgtgtgtgtaatttagatatcatttagcacttgtcttttttttttttgtttaattcaagtgaagaagggtgagcatcttcataaattgttgttggttaagaaaactcttgcccttattttcatttcttataacaatacaaaagatcaaaatgttattgagcttacctgaattgtcagtctggtttttagcagctcaagagggtaagtacagaaagttgagctgaatccagcaacagcacctgccactaatgaggcaggaattaggatttttttctgctctcctgattttggagtcagatacttcttaactgtatcataagcaaacaactgcacatagaaaccagatgtatcagctatggaaaaatattataatatcaatggttaagcaaatcatttcacaaaacgtttctcttctgtgaaatgatttagactgttatttcagcagctaaattcaaagaggagtcttgatttcatacctcgattgctttgttgggcgtaacccggattacattaaccagatttcccctatacaagccttgccaaccatcagttttcatgatggatctgaacacttcaccagccgagaagccgcagctccccaccatcagatgagtctttatagtctctaatggtgcaactgcagtgcgtgacactgcaccagcaatacctccactcatcaacttcctcagggtgtcattctcaatcttgattctcagtttaaagccacctctgtcattcttttttgccttcacttctccaaactccaaaaccttttctgcctctaactctggaacccaacttaactgaaaaccagatttagtaactgaaacatatttcatgtaagaattggtgtttgggagtttcaatatgatgttccttggctttaaaggacttggtgaaacaccaaatcccattcccacttgaccaacacttgcaaataagcctccagtacagtaaattttctcatcaggactcagttgctgaatgtttatcccagagctacagaacatcacagctttgttctcatgttcaacatcttgagattttcttctgcccattaatccaaacttaaaaagaagctaatttctttagcttctcagataatatatatcacaaggctataggagatatttcattacataaagattagtacaaatgtactctcttatgttacccaccccttcctttctttctctctctccctccctctttggagtcatgaaagagcatagaagggatggtatgatcttcaaagctatgatttcttctccatggttttcttgcttcttgtttctctatgggttattatccaattagaataagagctaattttattaaatggttggatgacattaaaggacttttaattgatttagctcaagaatgaaaaaaagtggtgatagcttgctcatgataatcagatgtgaaacattgtgaaatggacatttgtagacttaaatctcacacgggttatcccacttgtagattgtttcgacacaaactttctaagtgggtttggttaagctaagcatatgcccttttaagtcactttgagccactaaggttacataactccaataagtaatgtggattttgtctcccccatatggatttccaaatcagttttgatccagaaatagaatatgggatcttttcttgtctttcttggaaaagcctttgtcaccacaagtgaaaaaaaggcaacttggctacttagtggactaagataaacaaggacctacattagcaataatttactttagtggttgagtgaattatataagataataagcatatgcattttaattcccacctcttaaagagatcatatgcttttcttgtttgggataacaaaatgacaataaattccaattccatattactaatttagtacattattataatagcatcacaaatgtaatttttatttgaataaattatgtaacatagatataaattttttta

SEQ ID NO: 185164 - DNA, 2624 bp, Cannabis indica
tttttcaaccatataaattcaatatagttacgttgctaatttaacgttttcataagagaaaacaagataaactatttgggtttttactattagtataggtgaagatattgggattggattggataggataggataattttatttccaggcaaagtaattggggtttctctttaggacatattgaattctgctgttggattcaggtgtgtttgtcctgattgttttacaggctcggctgcagcgaagagaacttagaagtggtgctaaagttgttcccattacgcttgatcaggtaatattttgttctgaattgagtcatttccttttgtttgtcctagtcatgactttgcagaagcagttttctattacttgtttttgggtgcatgcaaatctgaacataagaagcttaagtgggaactagtcgattatctgagttggtggttagagtccaggacaggaacctataatggtagaaagggtaggaaagtatgaggaagataattgtcactgacatttacatctcctatgcttaagcataatacaatgagaaatgcatctcttttcaagtctatatgcattttgattatccctctaaatttcgctaacttcgacagggacaattacaaagaaacctgtgcatatgatctaatgcttttggttgtgatatttaggtatatatgttgaaggttgaaggaatagcatttcggtttttgcctgatccagttcagataaaaaatgctctggaggttagtttttctctactctcgtgtggaaaaatcttggttgacttgtatttggatgagataaatattaactattaagcaccacattactttaatttagtagcatttgtaatattctttctaaggtttctgtgtcaatttggctatattttttgtttttcactgtctgatcattgtattctgctttctgatacgatttaatattttcttacaattgtctttatgttatagctcaaatcaaccgatcgcaaaaatggatttgatggagttcctattttccaggtatactacacttgttgaatctagtatcttgcttgaatacagttgctctatcctttagtaaagtttgtgaggaatctagtatcttgtatgtttacagtactccattatatctaaatggttttatacacttttatttattcttttttatcaacatttactttcatgaagaaatttacctctgctcatacaaatatctttatattttttaattgtatccatcatgggacatctaatttatttatcttatcttatcagtctataaggtaatcgccatttgtttttttttaataactttatctcattagttgtttgtgtttacagtcagatctactggttgtgaagaagaaaaacaagcgatattgcccaatatattttactaaggtttgttttgacaactctgttttctcgtagttgtaggaaaaatgcttaaaaacaccattagtatctgagaccatatatcgctattgatgcaaatgaatatcgggtcctgcatattttactaagcttaattgtaccaatgacgtataccatctggtgttgggctctttagggtgccttttagcaatgctctagttgtaattgtactcaaaagaaccgagaacgtaacacttgttgtcacagacataaacagctcattcactagatgctaagtatttgacatcaatgcaggaagacattgaaagggagctcagtaaggtctctagggcatcaagaggaccagggctttctcaaaatatcttggtactaacacctgctttaatttttctcatcatttgcatacaatgtatgtgatttacttgctcatatcatcccttctgctgttatattctcataatatgccgattttaaattgcctttacaggttggtagtctcgaagacgttttaagaaaaatggaggtatttggcgcttagtttgattaaatttctctagtccttgattaaagacacagcttagtttaactttatttcgatcaaatgcagacgagcgaaaagaactctggctgggaagatctgatttttatcccacccggtaaaagttactctcaacacattcaagatgtgagtaaaaaatgaagataaacagcatagcttcaacttacaaaaacatcaaaatagtgaatcggttgcatttaccgatggctcactcccacagcgaaacaggtaaaagcatcattcctccctatctcttctcttttcctctttagctttcgcgtgacaatgcaacatctttgacaaatgcagctggtaccgaaattttggaaaattaaaataaaccttaacaacagttgcggaagtcagtgaaatgttaagcttgatctgtacagtttatctgaacttaaaccgttctggaaatcttatcttacaatttttgtatcaaaaatagaattctaaattaaggtattttattttgttgcattactaagcttttcttaatgcatattccactgctgtgggaaatccagattagactcttctaataatattatgggatttcttggcatttttctaggctggaaacatgccacagttgaccaatatttagatgagatcttggtcaacaaagccatgttatacttacacataagatattgagtagt

SEQ ID NO: 185165 - DNA, 3337 bp, Cannabis indica
ataggaaaacacaaggaaatgtccgaaacggacccctctagtagcgtgaaaagctactcataagcttcgctaaatttttacttttatctaaaatttttattttattttatcatttaaataattattatatatttttaaattataaataattatttttaaataaatttaaaaatatataaattattttaatttttaaaagaaattataaattttaattttttactttcaaattaaaaaataattttttatttttattcacactttaaattaaaaaataaatattttatttttagctaattaggatttttaccctaaacttttaaggttgttaaaaatgctcacgaactattgagattgttaaatttaaggactcctgtttattttcattcaattttactatttcagttattgtttatatactaaactatgctcctcaaattttaatatctatcaaatgatgtccctcaaactttgacatatactaaattatgctcctgaacttttatccatattagactattttattaaaattggaaaaaaaaaaatctttaaatccaactatctcaatagttaaagggcatttttaacgaccttaaaagttcagagagcttgatttagtacatatcaaagtataaaattcttaattagcctctattttttatccaacaatttttttaattttaaaagctaaaaaaacttaaagaaactaaaacccaacaagagcaatcatgcaaatagttaagaagcaacaaccaaatttctcacttttcaaaaattattaagtagtttgaagtcgcttaaataatttgtatgcatacaaataattgcagcaaagacttataagctgcttattaatcactactttcaccaacgttagctcataaacccatctccaattatacatggcttccaaccaaacatcatcatcatcatcttcttcttcttcttcttcagctgctcctatgaggaaatttgatgtgttccttagctttagaggcgaggatactcgcagaggctttactggtcacttgtatgctgctttgaatcaaagacatattcacacatttatggatgatggaaagcttgagaaggggaaaactattgcaccagaacttcttaaagccattgaagaatcaaaaattgcagttgtaattatatcaaggaactatgcctcttcaacatggtgtttagaagagcttttgaagatttttgagtgtcataataagagtgatgagaataatggagagagaataactgtttttcctgttttctatcatgtggatccatcacatgtcagaaagcaaaccggagtttttgaagaagcgtttgctgaacatgacaaagttttcaaagaccatgtcggaaaggtcaaattgtggaaagaggccttaactcaagtagccagtattgtcggatgggatttgggactcaggtaatatatatatatatatatatttatataattaacttaaatttcattttctttgatcatatatttagtcaaatttgttgatcaagaatattgttagtagttttctaccgtgatggtgttaaatgacatgttttggttttattcttttgagaaaattaagaaaactgatgccaaaatatttgtaacacatattgtttttttttcttttataaaattttgttgttcttaagaattgagacttaaagtaacatgattaataaatatataacctcacttgttagttaataaaattttccctactgaactttgaattattggtatgtatattaaaagctttaactttttcttttaaagctaatttattcgtattgggtgtgagaaaaatgaaaaataaacattttaaaataatattatcttcttctttcaggcctgagcatgaagttattaatgaaatagttgaaaagatttcatgtttattaaatcgcacatcatcaagtactaataaaaaggatttagttggagtggattctagaattgataaattgctttcatacttggagttagggaagtcaaatgaagttcttaccataggaatatgggggatgggtggtataggtaagacaactttagctcaagaaatacttggaaaaatcagacaccaatttgatgcattttgctttgttcgaaatgtaagggaggaatctgaaaagcataatggtctagctcaattacgaaaagatttatacaattgcttgttaggatataattgtgactattttagtagtctgggaaataattacaatagattgtgctataagaaggttctcatcattctagatgatgttgatcaatcaaaacagatagagactttggtgggaaactatgatgagcaacatgaattgtttggaccagggagtagaatcattgtaacaactagaaatgcacacttgttaaagagatttggagagaataacatctatgaagttggtaagttggatgaagaagaagctattaaactcttttctaggaaagcctttcgaatggaccatcctacaaatggttataaagacaagtccattgaagttgtgaaatatgccaatggtcttcctttggctcttgaagtgttgggttccttcctttatgggagaaatatagaagcatggtcaagcacattgtcaaggctaaaggagcatcctaatgaagacattgttggtccactccaagtaagttttgatggattaaaacgtacagagaaggcaatgtttttggacattgcttgtttctttagaggagaggaaaaatgtcgtgtgataaagatattaggagcttctgattattctccacttatcgacatagatgtcttggttgaaaaatctttggtgacttatgtgggagataaactatggatgcatgatttattacaggagttgggttgggatattgttagtcgagaatccccaaaacaacctggaaatcgtagcagattgtggcttcaacaagatatccttaatgtacttgaagagaataaggtatgtagaatgagtttgggattttttttttcagatttttttcttcctcattcataaccaaattttgtacacttgttgtattatagggaaccgaagcagtggaaggcatgttcttacgcttgcctaaaacagagcaagagctaaacttgaatgttgatcctttctcgaagatgtgttgtatgagattgttgaaaatatgtaatgtgaagttttctagatgtgttattggttctctttctaaggagttacggcttttggaatggcatggatatcctcttaaatctttgccaacaagtttccaacctcgtaaacttgttgaactcaacttgtctaatagtcgcattgagaagatattatggagagagaacatggtaag

SEQ ID NO: 185166 - DNA, 1259 bp, Cannabis indica
tttttttttttttgaaagcaatggtaagaattatttgttgctgtaatcatgcggtataagaaatattattcaagttttccttggttatatttgaggacataattttcttttgttcccttttaataaacaggtatcagaaaggttaatgatgatcaatcttagcaattgtcagtacttgaccaagatcccaaacttcaatacaaccccaaatcttgaaaagttgattcttagaggctgtaaaagactatcaatgattcatccatccgttggagttctcaagaaacttgttttattgaatttgaaaggttgtgaatctcttcagatactttgcaaggagatggagttggaatctcttgaaactttaattctttcgggatgttcaaagcttagcaagtttccagagattgtgggaaacatgaaagagttgactcaactttatttggatgggactgctatagttgagctaccaaagtccatcaagtgcttaagtagtcttactttgttgaatctgaaagactgtaaaaatcttctgactcttccaaacatcatttgtagtttgactactcttacaaatcttaacatctcaggctgctcatgtcttgatcagttgccagagaaccttggaaatttggaatgtttggaagaacttgatgcaagtgaaaccgccattagagaagtaccttcctccatttcactcctaaagaacctcaagcatttatctttccgcggatgcagtggcatgcctaataagtcatggttgttgaacttatgtaactgtttgtttgctgtagaaggctctgaacctgttggcttgatgttacctaattccttctcgggcttattgtctttgaagtcgttagatttaagtaaatgcagcatacaagaaggagctgtccctgatgatctttggcagttatgttcattggaggaacttgatttgagtgagaacaattttaggagcatgccagatagcatttgtcaactatctgagctgagagaactaaggttaaatcgttgtagcaagcttgagtcactgcctaaacttcccttaagtgtcaaacatgtgaatgctcgttattgtgctgccctagaaacttcaaatgaacatacaatatggatatcatcaaagggactttgtgttatagattgtcaaaaattgaatgaggaaaaagaatgcaaagggtacaagattccaacttctaacaaacatgttgtacccctgcttcatacatcctgtgaggttatttctctctctctct

SEQ ID NO: 185167 - DNA, 3728 bp, Cannabis indica
aaaaaaaaacaaaaaaactaagatcagaaaaatctaccaacaggggacatttattatttattagtacgttgtaataattcatgaaaagtaatatatatttatgtatgatagctttttaggttggggtatttttatttttggtacagtatatcttttgaataatttatagtgaaataatttagggtttggattaaattaaaataaatttgcaggtttcgaaaataaaatagagaagctgttgtggtccttcctggattggtcggatctcactagtgaatagaaagttgaatttacattggatctcacctgaatcatctcatctattctcttgaggaaaaattcggttcgaatagaataagtaacactgtaaataattcgtaatcagaatacctattaaaattatcttgtacaaagccgtataaaaaaattaatatataatcctatgcctaaaattaaaaatgtgtttaggataagagatagtctacctaaaattatttaggctaattagtaatttttcctctaaactttgacatgtatcaaattatgctttctgaatttttttggccgttcaaaatttccctaaactattgagattgttagatttaaggatttttgtctaatttcattcaattttattgttttagtgattgtttatgtacaattttactgttttagtgattgtttatgtactaacaatctcaatagttcgggaggaatttttaacggcaaaaaatattcagggcataatttggtacatgtcaaagttcagagaaaaaaattactaattagctaattatttatatatgtgtatataaaaaaataaaacatttgtgaacttatttggaagttgtttatcacatattgaaagggtttggagtatttagttaaatgaagattatttatattttgaatttacattttatatcttctataaccgttgatataagcttgatcattatagtttattccatttatcgaactaattaagcaagcaaatttcaatttagtgatcaataattgtgccaccatagtactccgatgtgtatgaatgtaataaactataaaaaatgtgtatatatgaaaaaactaagtactcttaaagaagaaaaccacagcattgatgatcacctttggcacaaattttattgtctcgctattttggatttgcaaatttaattacaacatcatatacatgaatacaacacccaaaaagaaaaaaaaaagtggtatctcaatttcatttggtggatggttacttttgagatttcttgcatagttctttcatccatttgaatttcaaaagtgatttcttcaacttgctcttagattcatcctttttcttcttcttttcatcttcttttgataccggaagaggatcagaattgtaatcccattgatcagcccatgacaacccagaatccattattactcttcttttttctatacgcaattttttttattctatgtgttagttaggttctaatcatttttgatgtgtatgattggagaaacaagttgggtaaagaaaaggttagttggatagtcattttttagaattttgtcattcctattcatttgcttgttttaaaccctccatttctctctactataatttgaataatcttaatttggccaatgcttattttggaacacaaaaacaataaaattgtttcataatagttgactgagtccttttattcatgcccaaccaaaaataacacaccaaaactaaactattagttaaaaaatatatatttacactaattattataaatgtgtgtgtggacaccataaaaagaaaaggaagctttgaaactcaaaatatatgactaatcaagtaaatcaatttctatataattcaatgatcaaatgaagaaaatacaacatgggaaggcacatatagtgttttacaatccataaaattctacatgcccagctatttctctacacaataactttgactcatcagctaactttatgcttttgtggatcacaagccctgtttttgtgtgtgttgaactaggtttataagactcagcctcttcttcactgcccagcaagagaacctccctagctggaactacattttcccaccaaaactccctcaaaatcccatgtattagctcccaataactacggtccctacaaacccgaaatattgtacttccatttggtgtccaacagtacaagtcaagccaatctctatccataatctccatttgaccctgcacctgaggcatgtaataaaatggcattttagaccaaggcaatcccaactcaggcttacccttgttataaggacacttcacttccagaatcccaccctccggaaagcatccaataacaccatcaggagaggcgccaacccaattgtatcgctcctcagcatgaacagcaaatcctagcgaatcaacttcccggcctgtaatgcttttgtacctttctatagcttctgtttcattgagaacaccccaatccatagcaaatctttgtgcaccttgtatgattttgacctctgatgcaaacaccttctcgcgccaaagctccattcgacgctgtcctttccaaaaacccaatgcagtgctgaaagtgcttgtggttagcttgtccttacgaagggcaaaccactcctcagaacgttgaggcgtgtcggatggtgaaacatgtgcagccaatgctagtgaggttaaggttcttgagtttctacaatgagactttctactaggaaaagttgaagctttggctttactttgagtgccatggaatctagttagacaggagttgcacattgccaataacacatctctgttacttgcaattttattatgtggaatcattctgcaaaaaccacacactgcttgaaaagcttacagtaagaatttggatattttgaaccaaaaaagaacaaggaatatgaatttatcacatacaaagtactaaattagctttaattaaacaacacacactaagttggtttcaatacaaacttcaaattactagaatggtatattgccaagaaagcaaaaaacatcattttggatatagaaaaaaaagaaatactttttatttgtcatatactcaaaagatagaaaattcatcgataagtttaatgaacccatcacccccaccaaaaaaaaaacatcaaagctaataaaaattagttattcctgaagtactattatcaagctacatgaaaaataatgtaaaaaattacaggaaaggtatttactttatgtacctgagaatgagtgagttgtagagctgaaggaaacagctggtgggtttgaggtatttctcagaatagaagaggctcctccattgataaagcaaaggggaacttggtacagagaggaagaggctctaatggtgaccttcattggcagaagaagaaatgaagataagaaaaaatggcttataaaatcacaggcctcctcatgaaaatagagtaggagggtagctcaaggtggggttggttaaaggacgatagttgtggtctagggtttatgggcttccatttgttcggtaaatggattcagtattagatattctgcaaaaaacgaaaactagagtaggagaagaagacaacaacccgacgaattcgtttctaagacacaaaaacaaacgcagtgtacgacgtcgtttcaattcttaagaatacatttgggcccgattcaagctttgatgtgggctaggaccaagatcaagattgggtaagttgaaaaatacca

SEQ ID NO: 185168 - DNA, 4183 bp, Cannabis indica
tgagtgttgttatcattatcagttccatcgagaatgccattcttcagatcaatttcgctagagaatggtttatattcaagaatgtcagctgggattgcagcagaatcagaagtctcagaaggtaagttggttgaaactttgtcctcaacgcttgaatcctcctcgttagtcttttccacgataacagctggttcctacaagatatcagagtgcccccataattaatcttccatgtcatgatcgaaatagttatgatcaactgttgatgacatcaaaagtacttagcaaaactatgaacaaaaatgcttttgataagaaaaacataaaagacccttgatagaacaaacaatctttaccagtttcgaataaaaaccatttttgtttaacatataagaaagaaaaacaggcacaaaactccaaaagaaaaatatcaaacaagaaaaaaaaacaagctgtatgacttacatcaataataccatgatcaccaccagcacatgcttcatccacaggttgctgtttctccaattctgatggagacttttctacagatgccatgtcttcataatcagtactcgaagaagccaccatcacatcaaagtccttgacttgaccggcattgtttgcatctgaagatgatgagtggagttggtcctgttcaacctgagtaatttcttcttcttgtgttggatgatccaatttatggtcattctcggaagaacatggatggatcatcgaagattgctcgattacatgttgaatgacttcatccttgaatgcctcttcttctaccaatgatctttcagatgaaaaatctaattggatatgatcctgatcaagatgaaccatttcttcttgaaccactggctgttccacaaaagattcagactctaaagaagacagattggaacacaccgacgcctgctcagcaacagttgaagattgatgttccagttgtggagtggcaactagatcttccaaagatatctgatcacttaaagccactgttgtatccaacttcacatcttcatcttggagcactgcaatggggatctcaacatcacgagttgacaagctcgcattctcatgctcgtgaggaatttgtctttcctcatttataacctcaggctctccagatgaagctagaacttcacccgagtctaatggaatttcatctcctgcatctaccttaggggaataagaatccatctcttcacaaacaggtgactctcgggattcaaacgaaacaacattttctgctgaggttggagggttaattacttcagacatttctacttgcaaatccgatgaaacagaggacaaagagagtaacctttcagccgtcggggggcttatatcataaacagggtccttattctgattctcctccaaagaaggttctgctgaaatgaccccgaaacttggtgaatcgtcctcatttttcatatcggttattggttcatccacttctgataaagaagataagctagacccgctactgtaatcctctctgccaacttgttctggttcgacatgagcagctgcctctcctctttcagacacattcgaatccatttcgtggtgatcttccacttcccctaaatcatctttggcttcatcatcatcatgttgaatatctctttgagaagcctgtgccatatccactgattcaacatcttcagacgatcgacttccccgttcgagaagatcagaagcctggtaaatggtggaaagtagttcttctttcgaaaaatcatgttcaataatgagtctcttctcatctgcatcagccaatgaactcacagaatctgtatcaggaactgagctcaactttgactcactaagttcacttgattgcctctggaatgatggatgatagcttgttccttctgaagccattcgttctggcacgaaaacaggcttccacttgatgttttgcttctcttgtctcgaatttcccaaccccgacggccccatgctgaaactttcatacctacgaaacatgtctttttgatgaaatggcaaaaactcctgctcgaaattgtctcccttgagatcaggtttctcttcactagagtcataaggaagatcaaatggatttcttcttggcaacaaaattgaaggagccgagccaggaataggcggtaatcccatatgatcatacgaatcgaacggagcatcaaaagggttttgtctagctgtcgaaattggtgcaacattgaaaggaagatcaacactatctaaatctattaaattcttctcagccaataatctaaagctttttcttgctcttctcctcgcaatgagattctccaaccgttggttcctttcgagttctgaagtccctaagtccataagattcttttcatcatcttctgtccatttgattgcagatttactttcatcctccttcccaacatgttgttcttcttcttcatcatcatcattgtcgtcgacaccatcctcttctacctcatcatctctatggttttctgattctgcatcagactcaatactatcaccactatgatgagagtcctccgaagcaccatcagactcgtcgtgggatataagaggagcctgcgtcgtttcttcatctaaaagaggatgtaattcatcaagcattggaattatgtcagccattgaagcatcaggtgatgaactctccgctctatcagagtccgaatacgaggaatcatcatcatcctcatcctcatcttcatcctcatccttatttttaccagcttcatcatcatcatcaccgccaccaccaggcgaagaggactccaactccaagtgatcttccttgtgagcactaagagactcttcaagagatttagcgaattccttcaaaagaatctcatcccccaaatcttgaaccaaagaatactcattctcaacacctttctcatcactcaaacccccttcaactctcaattcctcctcaaaagtttcctttttcatttcaaactgaaaatcaacaaactctctctcatcttcctcctcaatctcacccttaatctcactatgaatttctcttgaactctcatcaatgagtggcacacgatcaagtgaatcaacatcagtctccaactcaaccctaaccctttcatcatcaaaagacttcactcctaccccaactccttctctatcatcttcaacatatctttctataataaagctctcatctttatcaacaacaattgtaccattcccagaaaccccaacagctctaagagaaccaacatcatgtgttagtttctcctccttttcgatttcgatttcgggtatgttagactgcccaaaactcaaaagggttccaagcaaaatagcagtacagaccaaaacaggtgaagcagacaaaaacaaagaaaacagaaatggaaatgatctgtacataaacatcaaaaacaacaccatacccacaagaaaaggatgatatttaactgatctaaaacaagctttgatcgaaactattgccaatttcctcatccgtactccaattattaaagatcccattttttgtgtcaaaaaattcctacatagttcaaattatgataatcaatcaacactatagatccacaaaacaaagaattacccactaaagaaaacacaaaacccaactcaaaaaatcaatatgatcataaagaaactcacctcaaaagttggaaaattggaaatccaagaagaatctgaagaataaaaaaaaaagagatttttatttctaagcacagagattattaaggtgatactatcaatccagcttggaccagagagaaagagagagattgaataagaaaaggaaaatcgcaagggaaaatgaaagcaaatgtggaaaaagagagaatctttggctttgctatgtacttttgggccaaaaagaaatgatttttagaacagagatgatgaaacagccatggtgggtagctgtaattttttttctagagaatggggcggcacgtaaaggagaaaaagaaaggggaaaatatgaaaatcaaaagaaaaatactttctttttttgctattttatatgtttatatcaaatatgatattatcattaataattatgggatcatgggattatttaaagatgtaatctttttgtatagtgattcttagtgataaagatacaatttttaattttaacatcacctttttacaattttatttggaaccattttgatca

SEQ ID NO: 185169 - DNA, 2667 bp, Cannabis indica
ggcttttcatatgtacaaaccagctaatgctcgtctcatatccccaaaccgcacactggtccaaacaccacgttctagcctatgttgagcagccttagcagatgcaagtcgaaaaccactgcataagataaaaaatacataagcaacataacaagaaccttttcttacccctactagctatcttcccgaaacaaaggaaaaaacaaatagagaaggaaataagagaatatactagttgaaaaaattattcatcaatacaagagcattttatgttcatgtataattaaacaacctatcttcattaatgtttggtctatctatgcagttagcagcacgtgcagctcttaggaataaactccctgtctgatcatcttgaaatggccagaaagcttcctttaaatttcccaacatctgcagacatgttaaactatgaacaacatatgcaactgattaacgtgtaactgagcacatgtaccaatgataacaggctgacactgagctatttcttcatgaagatatttgaatgatattcttaaaaattaccaaaactaggttagcttcaagttttccttccatatacctcccaaaaaaaaggagagagagacataatactgacgcacttcccaacaaactctccgcattgtcttagaaacttttttggtagagccaaacaattcattgtgatttattctaatacctcacacaagcagaggttttgtttcaaaaaaatacatagataatacctcttaaagactaactccattgtgtacatatccaatagttttggcccactagtgagaaatttccaaacagtttataggattaagagtgctttcataaagtgtttcacaacccttctcccaaaccatgcgaggttctacatataaactacatgaggcaattgaatagtttcaattcaccatattctgtcatgttagtagaatgtgttacagactggctcatcaatataattttacaagaataccaatttctaaacaggaaatgttctagtttaccgcgggtaaaagaaacaactcaattctaaagtcaggatgtaatacttcaacattgcttgaaatacacacagaggaagtctaaggatattcttcgctcttacaatggaagataaagaaataacttcaatgactattattattttattagaggaaaaaagaacaaaaccttactaagaataaaatactagaaaatgtaagtaaacgagcagaaactccttcaaaacacggcatgaccaacaaaactacaagaaacaaagaagaagcttctggatagcatagttttacaaaaacccaacaagaaaataagcattcagtactttattgaacttgatcagcacacattctaaaaacgtataatttgtatgaaagaggcaagaaagagcactgaaaatgatagaaaagaagttacctccactagcagggcttgtgatgtcaatacatgtgagtgatcagattccttgctttttagtttatggtaacctcgaggaagactatggaaatcatgagggaagaatatttccacatcaaaatccaaaaggccccataaccgaagcatcttcagaatctctgaatatatgagtgaaagcattgtcaatgaacctgaacggtgtgtcaaaacctgttcaaacaaaaggattaaatattcgaaacgatgaccgtgtaacagtaagtagttcctcttgaaatgaataagaaagacaccatgtaaaagcatgtgagggtcagagttccatacagtgtgaagatatagagatcgcggttccaactgaaactttgtattgcttcttcggaaaccctgaaattggaaaccactttttatgaatagaaaaaaaaaccacaaaacctgagaaaagaaaaacattttgtaatgagaataaataaacacccagaataaagagagagaaatgatatgagggtaaaacatctcaaatatgcacccttttccttatagtttgtcatttttctttttgctcgggggaaatattcatctcatttcattgattcaaatcattaaaattacataagataatttcaaaagaggactccctccaaccaaactaagtcattgctattactaaggaaatactttcccaatctgtgtgctgccataatagcaaaccagaatacataattaacataagccctgagaaagaacataacaacctatattgtaatgtataatatcaaagcctgcttcacagaaagagcatcaatctcattgacactttaatagttataatgagcaacagattttcatgagtactctagacatattgttataaagaaaacatgaaaaaatgaagaaagcagagttgtctccaataccttcttgtcatacaaatagttttccaaactgtccaaaaaattctctggcgatgatcttgatgctgaattgtaatgagagcagtaacccattgaaagatcatccaatctatcaacgaaggcatcaacaggaagaggaactgaagaatgagacacgagagagtcgtcctctgcagctatataaagagctgttttccccaaatcaacatgtctattgatactaatactggtttccctctctatatcagaaagtttctcaatctgtgagcaaaatccctccctagcttcctgctcaatccattttcaatcaaaaccttcttagatttca

SEQ ID NO: 185170 - DNA, 4015 bp, Cannabis indica
ttttatttgcttaattttgatgttgggttttgaattatagattctctctttgactcactctttttactgtttctatctctctctttggactttctctctccttctctttagtagagtttaagctaagctaagctaatcagcaaggttttgtggatattattctatctttgttgtttgcatgtgtttgtgaagccatgaaatgcgtgattttttttttattcttttattaaaagggggaatgtggtttgtgggttttgattctcttatccaaaggtgagaagaaagtatgtttctgaattctatgttattttttttttttcattgagagaaaaaggtgttacattgtgttacacccttttggccgttgatttttttatgctttttgttcttttcattttcaaaattgcaatgctgaagatttttcttgagattttacaatgtaactggttcaatatcctgttttttcatttgggttgtttgaatttggagcttatatgctttgtttttgttgttttgtagaggggaagcttttcattggatcctcacattcgagtgtgtgaagtttagatgaaaatgatacttgtgttctgaatattgagtttgaaaactcatggatggacggcggcattcggttgatattcctatttcaaagactcttgtagcgttgaggagagtgaggtctctaagagatccttctactatttcaactagcaagttctctgctttggttgataatgtgaattgggaaactaattcgggttctggaatttctctccggttcttggattcttgccaagaaggtggtggttctggtaaaaaccatcgtttgagaactaacaatgtgggtaagttagatggagaaagagaggaatttgtggatgatttcaatttaagttatgatcttgggaaatccaagtttaacttgtatgagttttcgggtccattgaacatcgatagtggaagatattgcagccaccgtgttgatcataacaaaagcatcataccttccattgatcccttggaagatgtcgactcttgtaacgagcttagcattggtccattaccagaagaagaaacagatcacattacatcagaaagaaaattccagagtaacaatcaagtgaaaaaatcatatgggattgttggtaatggtacaagtccatctctctcacttagagatgtcctttcaagccgcacggcttcattgtttgcaaatgaagatgatgatgctgcatataatgatgaccctggatgtggtataagctgttgttggtcaggaacaccaagattccgagaatctccagacttagaaaacaacccgttgttatgcaagaatgtagaggagattagtggttatgataccagatgcttgaaatatacttgcaatgaaattgttccacattctgaaactcccaggagtttgagtcaaaagtttaggccaaaatcttttagtgaattggtgggacaaaatgttgtagcaaggtctctattgggtgcaatcattaaaggaagaataacatcgttgtatctttttcatggcccgcgaggtactggcaagacttctgcttcaaggatttttgctgctgcattgaattgcctttcaatggatgagaataggccttgtggtatttgccgggaatgtgtaatgttcttttctggaaggagcagagatgtcaaagaagtagaccccgtaagaatcaatcgtcgagaaaggattagatccttaattaagaaggcagccatccctccagtctcttcaaggtttaaaattttcatttttgatgagtgtcacttactacatggagatacatgggctactgttttacacagcttggataatctttcacaacatgtaatctttgtgatgattactcctgatctggataagcttccccggagtgcattttcacggtctcagaggtaccactttcctaagataaaggattctgatatttctggcagattagtaaatatttgtcatgaagagggtcttgattttgatcaagttgctttagactttattgcttctaaatcgaatggttcaatgagagatgcagagatgatgcttgatcaactgagtctgctgggtaaaaggatcacaatgtctctagcatatgaactagtaagtgaggaagccttatagtcacttttggtttttcaagtagtgaaaatgcatctctaatgaggtatctctttttatgttttcttttgcagattggcattgtatcagatgatgaattgcttgatttgctagacttggcaatgtcatcagacacttcaaaaacagtgataagagctagggagctgatgagatcaagaattgatcctatgcaacttacatcacaactagcaaatctcattatggatgttcttgcgggtaactgtgaggaagttgctctgaatctagaagaaggttttcgagtaggcataattgtaagtaatttgatatttcatttacacaatgattgccttactttccaaatgcttattgttctatcaagaggtgttgtgattgtagaattatcatgtcttgttgtgcttactgtttttctctcctgcagctgaaatggacttgcaaaaactgagtcacgcactgaaaatactatccgagacagaaaaacaattgaggttgtcgaaaaatcaaacaacatggcttactgtggctcttttgcagcttagttcatctacggaatgttcttcagaagtgaacgattcaaagttgtggatagacaatgttcatgaaagaggtaagagtctttagaacaaatgcttaatagtttaagtataattccaatggtaaactttgataccaattcttgttcttataatattttaggggagaactggaagcatgttgtcagttgctcatgtgaggagaaaaggccacacacattaagaatacctgaagattacagaaaaaccttggaatccatatggaagaaggcttcagaactatgccagtccagttcttttaagaattttctgctagaacaagggaaactatcttctttagttgttagtcaaggtatatccatattgtaaactttctttctttcactaaatttacttacaagagaggttataatatgagttgataacatctccctttgtgagtaatgatggaatttcaggtaatgcggtagctgagttggagttctgtcatcctaattgtatatccaaagcagaaaaatcacagaagctgattgccaacttacttcggtctactttggattgtaatgtagacatcaagattaatcttgtaccttgtgcttcttataagtcaaggcatgccaaagtaaggaaaacatatttcagattatttagttgttcccgaagagctcgtaagtcaccatcgtctactgaatgtggaagtgattcagactattcggaatacacctctgaaaggcctatgataagtgaaagatgtactaataggcctttctctgatgatccctgtttgaaaattccacataaatgttgtcacagaatggatgtagtaagaacattgggaaatgtgcaaagcacaagaacacccccctctcatggaccattagaacataacccgattcttgacttagttgctgctgcttcaaatgaacagatacaaccatgaaggtggcgttttaccttttcaagaacccgagcatcatcagccaaactgttttgctagaacttttaggcgtcatagaaagtcacgttcatcagatgcctctcaaatggtttgtatcactgaatcccagcagaacaagcttgcattgtctattgtgaggaaagcttcttctgaaacaagtgtaaccaccagtgacacaaataacaactctaacacctatactaatagctctggagatgagaatgggtgagtagttactattacataatcctctcagtctgttaattttccttcattcttttgatattcactgatttatattactgaatttcttattgtcttattgcagattgagagagaactcagaaaccctttgttggaaaacccctacacttcaccttaaaa

SEQ ID NO: 185171 - DNA, 3011 bp, Cannabis indica
taaaatttattcaccaaaacaattatcttcatattgctacaaaacaataactattaaagtttcttttccaagtcagaaagcaataactatgaaagttaatccctttaacatatctaatagtatcactcttctttttaaacatcatcctctctgtcataatgaatgagagttcagtgaacacatgatacttataaaggatatttaagtcattagttagccttcactcacttttatatcgaataagtgagtagaaatgacacattgatttagtgaggaaaaatatcaaattaattttctttgcaaatataattcagttagtagttttttattacttcaaaaatgctaattttgttaccaaaaattgcctaggcacaatctactttgagtgtgttttttgttccgtatttacatggagcaaaggacaaaatttagtttaaataacacttttaagctactgacaaccgtaatgttcgaaagagtacaaaaagacagtaaagtttcgaacaaagcaacacaacacagcccacaatcatataaagctaaaaaaaaaaatagaataaagaaaaagtagagaactgaaaaggttgaccatctggtaacagactcaaccataaaagtaatgctatgataataatattttaatatgcaaaatagtttgtaataagattttcatacctgagatgcaggatggaagatccttgaggcagcctctcaactttaggtgacgttaactgccaacgatgctgatcttgaattgccacgccacgttttagcaacctaagtcgaagcatggactttaaacgataaaaacagaacaaaagaaaacatcacttgtgttagaataactacagacaacaccccaaacgaaaaaagactagaaaagaaatggcaagtggcaacaatttcacctgaattcgacctttctgggtaaatctagaaactgcagcgcgttccaccaacctgttgagctcagcatgcctttccctttccatctgcataagcaaatccgtgaatgcctgccgccctctgatccttggggagaataaacggtgctctaaaatatgatcacttgccatggtgcggtccacttctctttgtggcgagctcaacggctcacgatcattatcgaaagaggaagaagaggatgatgataaagtagtgttagtaggctgcccatgatttgcagccgttaatctcttgatgatatcagctactttgactgtctctctttcccctgcgtctgagttttggctacgagcaggagaattctgaccactccaatccgccaatgattcttcattcgcctgccctgtgtcgagagcagagctccctgcttcatagcctcttggtgcttcttcttcttcctcttcttctaccggaggagctgaattctcgttacagctcagcccgtaatctgaccggcttgtggtggacgatgagctttgattctcgctgttggagcggttcaatctcttttcccaaatctgaacgagagaagaagcaccgagattttgaattccggctagactatccgatcgaggcagagctgctcgcggcgtatttgaagttgacaatgccgacgagaagtcagcctcttggggcttactttcaatcaaggcggctgttgttgttgttcttttagctgacagtgaacgccgccatggacattgactagatgaaaattcgtctctgtccttagatatttcaattttattctggttctgactggttttctcttcctttttaggaagaagagaattttcatcggcagggagtgaaatgcaagtgtgtagatgatccctgaccaagttcttgaatcttttctgaaaggaatgactttctctacacccatctctacgattatgatccctcaaaacacaaccgaacggagaagacgaagcgatttccacttgcgaagacgccatacttgatgtcttctgattctgttttctgaattccaacccgtataccctccttaattcaatttctgatattattcattgaatatatcagaatcaacgaagaacaagccatttggaagaaaaaagagccagggtgaggaggtggaggagaagttgaagatgtgaagcttcaatacaatccaacctcacaattttttttttgggggggttcacaaatgggatctatctttttctacaaactgggaaaatcccaaaaaggacaaacattacaacccaacaaaaacatgaggaggagctatttacaggccttctacatttgttatccacaaaaataggttgccaaccatttctgctcactatatttggaatcctaaacgaaataaacctaagggaaaagaaaaacagagcaagcacatcaaattaaacaaacaacaaaaagacaacaaagaaacagtgaataattatctaattaacccaaacacagaacagaacaagagacagaatttggatttttaggcgtgaatgatttctaaccccaaagaaatgctagatgaggatgaaaagttattttcagtgagagacaacaaggaaaactggagcgttagagttcttatgtacaaataaatttgacttgaaagaaggaaaacagggcaagagagattactgctaataaaacagtgagaggaagtttggtgaggaaaaagtggagctagaaagagagagacgttgggttttagccgttgggaacgtgggtcataacaattacaatgtaattatctattaatctatagtatggtgtatgggtagaggggtataatgtcattaataagcatattaaatttggaagaaaaaaaaatcatgatagatttttttccttattgccactatgtttttttttactagaatccttttcaccacgcttgaatctcgagcatacaggaaacctttcatttccaataattaaagatgggaaatccatttgcatatataattaaagagaaatggtatatttctagctcaagttgttatacgtgttggagatcctcagtttgagtcctaagttatacattagtgtaatatattttatat

SEQ ID NO: 185172 - DNA, 5349 bp, Cannabis indica
  modified_base (621)..(622): a, c, t, g, unknown or other
aattaaaaaaatatttatttatattaggtctcatctattttagtgcagcttgagtcacaccttatattgattaatattatttttttattatatttattatattaaaacatataaaatttgatattaaattacactaatattatttaagtagtgttaaaagcctgttattcttcttgttataattttttaagtagtaaaaaagaaaggctcttccttacaattgcattggttttttatttaaagtacaaatacattggttaattcattgaatttttattctttccctttctttttcattaaaaaacgttaaagtaagtcaaaggataacatgccattatttatcaaaaaaaaaaaaggaacatggcattgagtttagggtaacactagctacccttcaaaaaattgttgtaataataataatatatttaggtgattggggttcagattttattctagaatgaattttgttaggattggattgattgaatttgaaggatatttaattaattaaaaaaatacatcaaatttgaaacttaataatacatacaaattgaactacaaaaacaatgtattttatatctaaagatgacaaaatacaaatgcctagctagtaaataatanngattatcctctttgtttatttatttatttctttttagtgtgtttctcctgtattttgaggattgtttttgctgtatgtggtttgctttcactttttaattttctttgtttagtttgattaaactatagtttgctgcaaaaaatgaagaaaaaaaaataatttgtggtatgaatatttaagtttaatttttagttgcaaataaataattaagttcaatttttcaattgcagataaataagtacctgactcttagatgtcaagttattattcacgttttattttcttattactatatttaaattaatttttaaataaaaaataaaaatttgataacatggactaataaaagattactatgtattcgttgacttgacatttaacgcaacggtcgagtacctacagaagttacaaaaatataacttaaatattattaccgtcaaaaatttaatttaagtatatatctacatgctgaaattaaccttaaatatttatgacacaaattactcataaaaaacaaaaggaaaaggagacactagctagtaaacaaaaaaagtttgttaaaagagaaagagaattgaaaaaaaaattaaattaaattaaaagaggcaattgtctttatcaacaaacaaaatggcttcattatccaattaaaaagaaacataaaatatacaaagaagaagaaggagaagaaatgagagttttaaggaaaataccaaaaaaataattaaaaaaaaaccccctttaaaagagtgaatttttacactacatttaatcatggaaaaaaaaaagaaaaaaagaaaaagacataaagatcagtctcatggcaatatctccctatttgtgttttatttctttgtacacttttttaaatgatgatgatgatgatatagttgtagggccaatatgtgttctatatggcctacatctccaaactatttttcatcaaccggcacaatcatgaaagagattcctaaggcataaatgtgaccccaaagctacctctctctctctctctcatgcctcatttttcatgcttcttcatactaaatatcaccttaacatagcatacaatatttccatattataccatgtatcactacacttcttgttctaaaatgatctatttaaacatcatcatcatccttaataatgttcacaagcatgcaatcaagtgtaatcatcttcctaaaatttctcttttacaaaatacccattttggcattttgtcaaaagcaatttacatgcactttttttttcttttcttgtgatgtaatcaacaaatatataataataataataataataatattgtaattgggtatggttccatggtagttgatccatttggttaagtacccattacttgttttgtgttgtttttctttctaataatgtttatttaagcaaatcaatgaagttttcaatggttttggatccctatgtcttaaaggggtaccttttactaatttcagaaactattttcttgttctcaaccattcttgaagatggagaagaggtccacaagaaatgaaattaataatgttccaaaaagacatcatattcttgggccaagtgttccttgcttaaaagatgtccaaaatgcatttatttagaatcccaattaactaaaattaatcaaaaaccaacagcacaagtggatgaatggccagaaagaaagaaagaaagaaagaacaattttctatgtcatgtgcttaagtgggggtactatttttcccaacttcatttttgaccccaaaataaaagatggccaagtgcttataattggactatgctcatgaattctaatgtgttatctaaagaggtctagagacgactgttcaaacatagcaattattaagtagcaataaagagaccaaatcatatcaagctatgaatcaagcaaaccatgaagttatcttatctcaatgacatcattccctgttccatagcccactctcaaaatcaggcttgtacttcattttatcgacgtgtcaccctataattgattagcagttctcaaatttaaagtgtcccttagcattattcaacataggagtgatcaagcaaaagtgaaaggagataaacaatgggagagagagagagagagagataagattggatatccaaataaaactgaagggtgttactgttattatcaaactatagtttattcaagaccttgaaaattaccagtttgtcatgatgctaaactggtactgtcaagattacagtactcaatcatccccacatagaagctctctgatcaaacaacaaaacagaagatgagcatgggagataatttattcagatagatagatatgctctccctctaccttctacaacttcgaagctgcgttcttgtctagaaaccaagtcagctctccagcaggcgaaactagttcaacaggcagtgtgttagaatcatcactaggtgttccaagtgctttatgcacagcatcagctttaccagcaccagtcacaacaagggcgatataagcagaagaatttatcactggaaatgtgaaagtgattctctctgggggaggtttcggtgagttctttatgaaagtaacccacttttctttctcgttgacaagagggtgtcccgggaaaagggaagctacatgtccatctgggcccatgccaagtaacatgagatcaaacttcgggaatccactggcttcggagaagtctatcacaccgctcttaaccaattgcctcaaacaggtttcgtagtcatcagctgcgccctcagctgacaatgcatcgttgatggcgtaaacattaccaggaggtattggtacctgagaaatagaaatcaaaggagattagctggtttgaatgagataggtggccacacttttaatgcaaaacaaacaactaatttttcggtataggataggaaacaatgtatgagactctcataattgcctagttggattaaatggtgtattaaattttacaactaccaaagaagacatgccatgtaaaccttatatctaagcaaaagatttaaaaataaacatttagctggttcaactaagtaagataaacaatggctacccttttgatgtaaataccaaacaactggttttgagtatgtctttggaggacgacacacgaacaagtatagatcaagatagccatgtatttcaagtcaaataatagttaatgatcgaattccgtgtgacaacttccttgaatcttcaataattccacacttggcatacatgaatcagagagttggtgtcgaattcgtttgaatcgaggcctgattaaagtgacaatacacgaacctgttggcgtaaatggagggttgctaaatctgagcaaggcccgaggacagctgggaacgtgtagtgaccgatttctatagctaaatttctcatatgcgaaaacagtttcaaggcatcttcacttaacccaatttttgataatccggtcagaattgagttccatgaacacgatctttcaacttcatggatccaaatacatttagtggttccaccatggatctgttatttgacttgaggtacatagctatcaaagcattaatagcctgaactgattgttctcaatagctatttacttagtaattatatttaatggccacacacgaacaagtacagaacaaaatgaatcacataagccacatatccaaatagagcaatccaaaatgatatgaataagtaaatctgatatccccagttgaataaaactcaaaatggacctgaggaaagtaactatgcccgaagtaatcattttttaacttcaagtatatttcaaatataagtagatttatacatacatacttatagtctacccttcacaagcaacataattcaagaacaaaaagcagcaatcttgaagaattgcataatcatcatcagccatttgaaaccaaagatttcaacaagtaccttagaaaggaaaccatcataagcaagtttatagttactatcttcatgatccttaggcacaactctctcatccacccaaaagacacgccactttgaccaatccactgaatcaagatacggtggttccagcaatttcctgagaaaaatgataacattttcttaatacttacaatcacaattgtctcccgtagttccaaattcaagcttcaccaagcagaataacattgtttcccaaaactcttgtccacaattcagtcactaaaaaattattacttagtcataaaaccaccaagacattaaactaaatgatttcacatactgatcaaatcaaaaaggttgactgagatttgtcttccaaactttgacttcactaaatcatttcttctgaacttttcctcagatcattcaaaaatttctcttaattattgaaattattaaatttaagaacttttgtttaattttactaataggtgtttgaagtgaccagaagttttgagtttggtacatgtcaaatgtcaaagctcaaacacgatttaatagatgtcatagtttgaagagaataatttggtaaatggacaatcccatggtaggcgtttgttaatgaaattgagtggaattcaatcaaacaatttcaatagtttgatacatgtcaaaagccctaatatgtattcttcttcttcactactagaaagaccataagaaagtcaaactcaaaaaccccatatgctaaccacattcaattacccttaattcgaaaccaaaatgaaaacttgaaatcaaaatcaaaagaaagtattggtttttttt

SEQ ID NO: 185173 - DNA, 5478 bp, Cannabis indica
agactaacaatgactccttaacaatatatgtatacatatctaactacaagcagactacctgtatgttcccacttaccttgcaaaccattttctttgccccttccccactcttctttatgaattctacatgttgggggagcttcgaggtgtataatttttattaaaggctataatatattactgatttcttcagggaagcatgcataaatttcattgagctatgcaaacagaagaatgaggataggctttggataaatgagttagcagcaatgcaggcatgccctcagccagtcatgccctatcttgagacatccggaatcattcttgctggggaagacattgatcctactcaaattcctaatttgatgataaatgttaaccaaaatgggaaatcaaatggtgccttggacacatcagtttctgactccaccactagtcacggaagtttggatgcaaacaatggtatggcccctatgggaaactgatcattcaagctcccgttctttattgtaaaataagatagatttatttataaagaaaatactcatctttcatctctataataataagttttctcattttaattaatttcgtacaattacttctttgtactaatgcctcatctttgatgctaaaaaattgcagataacagcctcccattaccttctcagacatcatcaattgatggaaaaactcaaatgccagcatcatggcccaaccatcttccacagtacatgcataattttcaaggtcctgttttccatccatatcagggctacatgtttcctggtatgcaggttcctccttattatccagggaatatgaaatggcctcctaatatggaagattctggtcctcatgtagatagagaaactgttgattatcggaatcataagtctcgcaggagtaagaagaaatactctcaggggaaaatgcaggatgatgcagagcaagatgaatccactgaggaaagtgagtcaagttatgatagtgaatcggatgagcagacacatcatggaaaaaagcaatcttcaaaagagcagtcacggaagaaaagacatggtaaaaagtcctcaagaaaggttgttattcggaacattaactatataagctctaagagagatgaagaaggaagcggatctgaggaaagttcatctgatgagaatggagtcatcgatggtgatgcgattaaacagcaggtggaggaagctgttggatcattggagaggagacacaaaccttcctcgcgtcgtcataagaaacaaggtggtgttaaatattcaaatgggaatgatgagcaagaaagtaagagcgtaaatgctgttgataatcccgaaaagaaaaatgagaactgggatgctttccaaaatcttctattgcaagacaaagatacaagtacttttgatgaggaaccacgccctatgcatgaatatttctctgaagaaggaaaacaatctacactaggttttgaacaagagaagatcacaaagcaacgtggaatttccagcgatgattttgttgttacaggaaggggacaacgaatgagagcaaaactcaagttgagtacttcgaaggtggtgaaaatgttgttccaattactaagaagtatagccctgaagaggatttgttgttttcacaaagaattgaagaatctgggaacaaatctcatgttaatctatccgatagtgttgatggctcctccaaaaacaaatgttcaacagacggggaatggttccttggcaaccagacacatattgcagcaaatgtggatgaaagcaaagatcttaatatatatgatggtgcttattcctcatcttcaaccttccatgctgagaagaacaagaaagatgttctcgttgatgattcatttatggttcatgatcgattagttgtagatcaatctgattccctcttaaggaatgatatgagctttgttcctgagatgggagctactcattatgaatatggaaacccagaagcctcacatgataagcctgaagttttagtacccatgagcccgatgacctttacatgatgcttgatagagattcagctgctgaagcaactatgacatcatggaccccagagatggattataacaacttttcatcaactgtagcaaataaaaagggtgttaaaatctgagaacactgattgtgctgatgtgaacgactcacctaattccaaggaaaagactggcaaaactaatggagttcctggaggaaaaggtgcaggcaaagaagcaaggtcaaaaggcttaaatggatctttaggaagaaacagaactgatatagcatcaaggactaagaaaccagctccagcaggcagaagcatatctgtaaagagcaaagcggagagggtatttaacaaacctttaagccttcaaattgatttaaagaatgtgaaagatgtcaccttttctaaaactgtttcaagtttttcttatatttttcttttaaaaccttttccagaatctgccaattgctaattcatcacataatgtttgatgtaactctgatataatcttaatctcctccattttgtgctaaataggatgaagagaacaggaagaaactagaggaattgcgactcgaacgccagaggagaattgctgaaagaagtacttccagggggactactagagctacacctaaacgggcctcatcagaaagcaaaatgggcaacagttccccaaacagtgagaaggctcaaggagctacaaagccaaataagccagttcttcgtagttctaccatagaacgcctcgcaacagcacggactgtgagtccaaaagtgtccacacctcaatcaaatggcctgcccaagaagcaacccatgaaaagtaatagtgtagctgctacaaataagaaaccaagcccaaacaaggtgaagccttcagagaatgagccaaaaaagttaaaccgtgtactttcttctgaatcggatgccaaggaaaaagaatgcgttgtaatcacagaagcacagtctgtgaatcctgcagctgcaattgcagtgcagcctagtcataccggtagcaattcggaagatgttaaggagttgccaagcatatctttagttgaaaataatgaagtaaaagtcttggatgacagaacatatgacgagatttcatctgagccaattcaaagtcagcctttacaaaatgatcagctgatcggcaatgctgaggtcatgccaaaggaatctccagttgtcattattgaagagcaaaaaacagaagagactgctgaaagtactctaaatcccaatgtagcatcgcctaaaaaatcttcggtcgtcacttttgtgaacaacgaagagcacagggcagcagttgaaatctcaccactctcacaggaaatctcagagattgaaatctctacacctccattaagtagtgaaacgacggaagaagctctccactctagcaggaagaaatggaacagtgatgagagctctcctaaagcaaccaaagggtttaggaagcttctcttctttggaaagaaaagcaagactactgctgtgaattgacaaaatcttccattttcatgaaaacacttttgtgtttgtctttgaacattgcagctggtgaaataagatgtggtttttcatgtggaggaacctaaaagaatattagctatgcttccctacacaataaggccttgggtgttgctgccacgcggggaagtttatatgtaagtttatcgattttggcgtatgtattgtattgtagagaatggataaacagttaaaatctcttttatttggtatattgtgtacttaccttctttcaatactgtgaatctttttctgtatgttttgtattctttatttaattggaagcatagaaacaaagggaaggaaaaaaaagttatagtttgtattttttttcagagcttgttgtgaataaaggtgtttatgtatgagtttacaaacgttttttttttgttagtgtagcttagtgttattacaatttactaatatcttagcgattttggttttgaactcatgacttctttttttttcctatccctccctcactattgaactagtctctcaacctatttttgagtctttgccattgatgtttattcaagttgtctttctaacttacatacaaaatagaaaaggttgtctttctaacttttacgttcagtgttgaaatgaatatttgttaggggtaaagggaaaatctaatccagtaaatactcttttcattatggaaaggtgtttttagattgtagtggtatgccatctaatcaggaaaataattataggttgcttttcattatgaaagcacaatcgttaaaaatattgtatatgattaattaattaattatttttttttggaaagatttagaataatatggttttattgaaattaaatttgataaacacagtgaaacaatgtgtttttaacaaatatctagaattagtatgataataggctgaaaatattaggataacatataaggcaaagttcttcatgattcgttttttttccacaaaatatatggctactttttttagttataatatgtaaaataatttttttcctacaaaatatttatggcattttttttaaagttataatatgtaaaataatgattgtctaaatcgaaggccataaagagaaattaataattcaaactttagaatccattttaaatgagtcctgaacataactctagtctacctagtacctacattcagggctggctatagtccaaagaaaaattattataatactttgtttgatctaaaatatatttcttaaataacattttctttgtataaaaaacatgtttgacaatgaatcgtcaaaatacagaaaaaagtttaagaaatgctaaatttgaaaatagttattgcagtcattatctctaagtttttgtttttgtttttgtttattttaataatatggtctcgaaaagaaaattcatatgcaaataaaataataattaaaatataaaaaaatctcttaattgaaatgaaaacatcacacatttcatttttggagcagagtttaatgctagcctaagagaagacacattcattcatgagggccaaattttattgttcggattcccacccacacccaccttttgtttctttcaagcattccattccaaaccacattattccacattattttttagatctacctttgcccttatgctgtcctttttttaaatttaattattatgtgcttgtttggtttaaatatcttattatattagataataagaaatattatgtttagataaaactttgtattatattaattatgatgattatagattttaatacaatgccaattgtattatttacactatatctagtaagggatagagagagtgaagggagagtgatggaaagagagataaatcctctacaagggagagtaaaagagagaggagagacgtaactttaaaaattcaatccctctaattttaggagaattgtaaaaaaagataaaaa

SEQ ID NO: 185174 - DNA, 1559 bp, Cannabis indica
  modified_base (27)..(27): a, c, t, g, unknown or other
agtaaatttttgttttttttttttttntttttttttttttttttatgtagactcccacctttgaaattttaaaaaacataaaattatttttgaatcccactctaatgacttagaaatctagacaaaaatttatagtaattaattccctatattgaaacaataatttctacagagaaaaattaaaaaaagatgctttgatctacttttctaaccttatggctgtttttctgaatatgaaaactaaactagagctccttttataggtgaaggaagtcctattaaataggaataaaataataaaaaaatatagaaaaatacataaaaattaatttttgaaattgatcgtcaattttcgaatttcgagtcccaatagcaggattcactccaagtaagttgtatcttaaattcataactcccttagagtcaatttgaagtcgataactttaaaattgcaattgaagtgtgaggcataacttgatattgaattgaaatagcttcagaacacaatttgaatcgcgtcaatcgaatcaatattgagtgagttataaccactttacaaaaggttgttctggattcatcaccaacctggacactctataagtggaaaaacacgtgaatatattttttgatgcttatgtgatattttgacatcacttatgccatttctgtgttctaatgaagctgatcaccagttttcgaagatgttgctattttacgaaaacaagactcgaaactacccgatttctaagtaaatcatctagtcaaaaaaaaaaaaaaatatatatgaagttgtgaatttatctgttctgacttcatgtctctcaattattgtaaaatactagatgaacggtaaatcaaattgaattagaagaatctaatataccaggctatttgtcagcctaagcattaggtgtatttcaaagtttttgagatatcattttgaaacttctaaggttcaagaacttaggacggagtctcttactccatttatgaccattctaaagagaatgcttagagcaaaattggcatttaagtggtcaaaaccaacacaccaagttaatggtcaacctgagcacccagttattctgatgaccaaaaaaatgtttagaaatggcccaaagtttcaagctggaagttacatttagttcccgtaaatagtcaaaaaaaaaaaatcctcgaaaatagttcaaacttccattttgcaggttaatacaattaagtcctgagttttggtggacagtaatagcctacagaaggcccgagataaatgacgtcggactggttttggataatgaaaagtgtgttcggtatccagattacgggcaaatattttactttcttataaacaccttatcttagttattaatctaacacggataacaaacaacttcgttaacaatttcaagttcatcccttaagatttccaatttgaaataaattgttattttggtatcaattcgttcattatagagtacttttaacggttcatataaagaccttattttacttattaatctaactgaaggtccactcaaattttttatttctataaaaaaaaa

SEQ ID NO: 185175 - DNA, 2583 bp, Cannabis indica
cggacattaaatgtagatgtttgaagatctaattttgctgtgctcttaatttttgattgtgttattactttgacagggatccttacgcttgcttgttttgtgggcacttccatgttttatactaaagacagcacgagagattgttcgagtgtactatataaatcgcggttcttggtgggtttcaactgctattttattagcattagttgtatcctggacttatgtgagtacaatctctctaacagccagcattttgtttcatttgatatgcaatttgcaagctatccactttgatgattatgggaagctcttggaaagagaatctgatgttttggtatttatagaggagcacattcgtctgcgttaccatctatctaagattagccatcgatttcggatctttctagttctgcagttccttgttgttacaacaggccatgttgtcactctattccaaactacagggtatcgcggaatagttactttcgttaatggaggtgattttgctgtaagttcaatgccataagattagaaaggcacaagctttctttgaacatttcatgccttggttgatggcactagcattcaaaaaaataaaagaaaattagatcaagcatgacccttttttaacttgtttatttctcccccgaaattccaggtctcctcaattgtccaggtagttgggattattgtttgcctgcatgctgcaacaagaatttcccatagagcacaaggcatagcatcacttgcaagtagatggcacgctttagtaacatgcggttctaatgattcatcttatcacagagcttcaaacaacaatatgctaaacatggaagctgtccaagcattgaattcattagatttaagttactctgagagtgatttggaatcattagattatgtttcaatgccgactaatacacaactagtttcttatttatcatcatatcacaggagacaagcttttggtagggattcctatctttgcttctgtttcatatcagcttccttttccccatatatatcttgtatataactactagttgttagtttaattttcatatgaacaatgctgtgttgaacttaacaatttgtattttctttattggggttatacagtgatgtatttgcaaaccaatccaggaggtattacaatatttggatggacgattgatcgcgccctcatcaacaccatcttcttcattgaactaactctggttacctttgtgctgggaaagactattgctttcacatcaaaatgaatagagtttatacatcaacatagggctgctcaacatggtctcttttccaggcctgtgtttgttaccatcgccggacagtttacaatgcagtcagtcacctttatctggctccattgcaacactttcaccagtcctagagaaaccaacagagcgaagccttttgcgcctatgttcctgcaggaagttctagctggtttccttggttcataccgagtacccgggctagtcagtaaatggactcaaagctactagcattcctccaatctgttggacatcttatattatgtgaagaaaacaaaatggattccacattatttatttcttgaaaataggttaaaggcacaagttcaatagtttttataatatgaaagcttacaatacagataaattttgtagtgtactcggtttagtggttgattacaatacagataatatgaaagttatagatgaaataatgcaaatgatgaacctaaaccttggacaaatctttgttaagtacttgtgagaggtgggaaatgaattaaaatggatattataatattgattaacataaaggtttcgaacaaaaatcgtaaagataaagtgaatatattgaattctagggcatttcgataaaaggatggactcaattaagagtttagaagactttagaaagttttataatatgcggggcaatatgaacgctagatggttggagaagagtctataaggttaactaaattgggttaaaacatgaattccaatctaatgagaaccgattgattcaataataatcgaccgccaaatattgaaaattcaattgtgatcggatcggatgttggatggggtgtctaaaaattaaatacatctaacatccaatcaaactaattagtattttcatttagtttggatgagtaattatattttgtaatttgtattgttgtagtaaaatctatatgtatatatgaaaaataacattaatttttttttttttatggattggatggaaccagtccaatctaatacatgctagacctaaagtattgggtggatccgatctcatccaaaaaaatactaggtctaatatattgggtatacctaaattaaactaataaatatatataaaatacttccaatggatagaaccgatccaatccaacattcaatggatgttggattgattagatgacttaaattaattagaacggatttggataggcctaaaaatattggatgtgatccaatgaatacccataatcatagcagtcaagagaaattagagagaatggggcattcttttaattttgtggaataagagcatctattttttatttatttattt

SEQ ID NO: 185176 - DNA, 4643 bp, Cannabis indica
gctcaacaacagtgtagtattttcaacattcatggaaagttatccccaacagtgatgaagaaattcttttatcaccattaaaaaagatattattataacactagcgatggccaacttttacccataatttgataagacaaattatatatacattaggtgaagctgaatagttgatctattttgtttgcatagattttttttgtcatacaaaacagtgataccattctagtccaaacaaccttataaactttggatttggtgagccaagtgttttacaacatgcacttttagtatattaatcgaaaaagaacaatataataaaattctaaatttaacccccttaatccttctaattcaagaaaatattgtctgcaaatatacacaaaccccagacgaggaaaaggtttcagagtcgaaaattatcaaaccaacattaatctcccaagataatccttttaatataggcagcaaaaaaaaaagagaaaaggagaaaactttggaaaaggaaatgctaacaaataaagaatagatacatatagactaaacattactatgtatgtagtcatatagaagtgaataaacagaagagactatacactttattcaatttttgtttcttttggactctaagtttgtcccatctttgagtgtttcttgtgcatcattatccatgccaaggctgaagagacaagccgcttgaagatatagagcagtaggccattcaggagacaccacttgggcctgcattgcgtcccctagcgcctcttgctgcaattcactcatcagataagataggcatcgccttgcgtacacagtgggtgataccatggtcccgctatcgatgaacttcaccaaaacaaatggacaataagtttagaccaactactcagagtccaataaatacacgataatggaattgtgacctctcaaacaagcatgtataaattcagtgtgagcaaaggactcacttgtgtgtaagaatcaatggcggttgcaaagtccttggctcggaaagcggtgtctccgtgcttcttggaattcaaggtgtcttgcatttgatttgtccacatttgaaatgaaagctgcaaagccagaagggagtaaaatgaatttgaatcaagcaggaacagaaatggctaaaagagtcttaattctgttctaacaaagcaagcttcccatctggagcttgttgcacaactagtcatttatgacgtctgtaaagggaatttcatattgatgtcaagatagaaagaagcaaactctcttactcaagcctcatcacatgtgtgtgaatacaaaaaatggtgacttctaatattataaacgaaaatatattatcaaaacaagggcacaaagtaaccaaacctcgttggcaatcccctcatcatccttgtatccattcttatccagaatttcatgtatggcagtgagatccattctcacacaagcttcaccaaaaggggttaacgacaatggctgcactgaggatgcagtttcatgggcaatacccattaaaacatatgaagcaacctgctcaattacaattgaaagagaaattgcagttaattcattatttatttttagcagttaaggtgtagactgcttgatacaatccaacaataacatcgtttttttttcagtgtcataaaaggatggagaggaacgaggcttatttatgatatggtgcacaacctaaaaatgaaaggatcaagcagagtgcatacctctgtttctttctgaagtgacacgagagaagtaacaagagactttgcatttggtctctcacgtgcctcatattgcaagcagcgtgaagctaaacgcacaagttcagttccatcatcatttgaaaaattaccctcaagagcagaatccatcagcatcagaaaattcttgccacgaattagatcaagcgcctgcaaacaacataaaccaacaatgttgatcccaattttattgtccagttaaaacaagagatatatgcttctgaactgaaaacgaagtgcaagtaagcccacatgactagggggtatatgctttccactcagaagatccagcaacaacgtcccaaagctgtaaaccacactttctgctgtcactctacctgtaagcaaatgattaaaatcgtcccatgtatgtatcatagtgtcaacaaattaaattctcacagcttcataatatatatgcatataatatatttacttgtcacccaaagatattaaggtaaaaatcacaggaataatttttcaatcatcataactcttggaatttccattactaaagtcagaagctaatgcctctgaagttgcaaatatttatcatagcggtgcctgttcaacgataatccacattaaaagatcatagcatttccacttattcaggccaacacaaataccagttctcaggtactccggaggtgtgaaggccaagtttgtactgtagctcttgccatccctgctattcttcataaggccaaagcaggatagtctgggattggcctcctgatcattgaccacagccactctatagtaaattattttaaataaaaaatgtgaacagaaagaacccactatattaaagatgccactgttacctgatcaaataaaaccctgtaggcattgagatcgtgatacagtgcacgtcctttgctgctacagtactccagagcttgtgccagatacaaagccactctcaatctcatggcccatttcattggttgagcatcccctacaacgattcaatcttaagaaacaaactatctaattacaaaacaatgccattcatagctgaatttaattcaattgagtagcacatggatattgctttccatcaatagcacttccaaaatgataaacaagcaagtacttgggcaataaaggcaattaaataccaatacttgccttttaagtcccatgaaaaatctgttaatgataagatcttgaatggaacataagtcttattcaatcttatatcattgtgaacaagtcaaacaacgaaatattttcatccaaacattaacaaatacgtcttcccagcttcactttcagttattttagctctagttaaaagaaataaaaattcacaatacccataaaaaggaaaccaaaagggagtaccatgtacacacatagatataaatggaaataaaggcactcacagtgaaaaagatgcttagcgagagtttcatgaggcataaactcggcaacgagcaatctctcatctccttcacagcaacacccaatcagattggctaatcgctcacttctgagactccccaccgacctagcttcttcctgtttacacatttttcactcttacttactcattagaaagagaaaaaaaccaaacattagagaaaaagagagaaagagagagagtgtgtgtgaactgacgagaaattggcgagaatcaggccaagcaaacttgttgaatctcttaacggcgatccaacgggtgttattatcaaggcttcctttgtaaacaatgttcggagctttctctccatgctccgaaactacgttatcagacgaaaacccattggttgcagctttcagttgctccaagctgaactcgctgaaactcggccataagttccgatcactcttttctccattctctgcaacaataaaaccgaagttacaaagcttgtaaaaaaacaaaaaaaatcgaagcaaacgagaacgttaccgaggtcagaagattcgagctcggaaggtttgaggtgagagtgaaaccagcaaagagagaatttagagcaacgagctcccattgaaggagaagagagtgaagagtaaaagagatcggtcaaagccaaggaaagaagaaaaagtcaaagcatcaaacggttcgcatcggtcggattaagactagagtcaaattctcttcttacttgctgttcttgttcgaacaaaactatggtctctctttctctctctatatcaacttcaggttgttttcaaccattctcgctctagatagatacaaaaatatatagattattaaaattataatatttaaaattaattaagaaaaaaggaatgaagaatgagtgtgagtcggtcacgttagatgtgtttttccattcatttcatttcacttttcttttgttgcaaagggcataaccttttatctcattccctttactgctttgctttctgcattttcatcatttcatccttctctcctcaacactcaacttattaaagatacactacactactatcattggtataatacacgtcttatatatttgggtccatctacaccataccatctaaatataatcagtattgctatgtcctatgtgacactcacgacacttattgtgttttcgtgcttagtactacaatgaaatattgtcctataattagttggtaattttttataatatttattaaaataaaacaagtgagacctgatataatgttaaaccaatagtgatattacaattcacaaggctatcagacaacatgagtaccatttaacatttctcaaatataattattggacaatttttgtataggggcttcaggatcatgctcttgatcttaacatctctcaaacacaagatgctttactcatctccgtcgattctaaacaagtatcgacctgcacacatgtcctaaagcaaatgaccactgaagaac

SEQ ID NO: 185177 - DNA, 4982 bp, Cannabis indica
gaaagaaagaaagttgaagaaaagaatagacgacacgacattcatttaaaacaaaaggctttaagcgctttgtcccgataggttggttgagtcaaatgatgtattcgaacccgactcacagtaacggctaccaccaacagccgcaacaggaccaacaccccaccgaccgccgccccgagatgagtcacggtcaacgagcccgccgaggacgtcgccccggttctaggtcacgtgactcctccagagatggccatgacggcgctggtagccttagggtttccgaccagaaaaaccttcaacaacaacagcagcagcagcagaggccgccttgtacggagttcgacatggcctatttccattcctatgctcacgttggcatccacgaagagatgatcaaggtttcatgcggtttactcctatcttcttcttcttcttcttcttttctctttccctgttctgcattttgaaatttaaacttttgcactttctagtttgaccataatttttctttgctatcaagttttagctgtcgtgtaaaggctaatgttgatagaaatgagaagaaaatgttgaggaaagaaggggtaccgtacttcagttagagtgtgataactcataagtaggaagcagaagtggaaggcagggtaagatgtagtgggtttagtttaggatgaattggttgtttggctttaatcggagagaaaatggattagattattgatttcaattattagtttaagccaattttcaatccatgcgtacttgacatgcatgctctattttctctggtaccaaacgaatacttttcatctatactttctttctttctttcgatttttgagctttcttacttccaattttctctacctcccaacacaccttatggaaaggagtgttgaggaaggaaagaagttttactgttttttctcatttttttggaatcggattagagcactggaaaaatatgcacgtctgttttgtagtaaaattttcagtctgagaagatgcccaagtatattcgggtatatgcacttggtagccgtccagtatgttcattatcatctcatggtagaagcacaatcacatcctaactgtttgtttgcatctgagtttgaaatgtgagtgaaaactcaactgtatttgttttaagcattatatctgtaaaactgaattagtcctccctcctcaaagggatattctttatgtttgatgtgtatttgcatgtcattgctaaatgaaaatgttgtcatcacattacaactcgagttggcttatgaactgtgattgaggagaatatttcttcttctatacattgggtttcagttgcaacaaattgttttggttatcacttatcataataatagtttgttggcatgataaaactcaagctatgaatgatgtgttaatatcaatgtaattatttgctaatatggtaaaatctcatcatacaggatcaagtgcggactgaaacttatagacaagcgatcatgcagcaccagagttccattgaaggaaaagtaatatagctttaattttactaataaaatagtctgctgaattaagtgctactttattgtaaatacttctgtttttattggaattgcaattcctagtttacaaacttaaataataattcaaatcaatactttgtaagattcatgaaactttatactttatgtaaaccatgcttgcagctagagagactacatttctgcattgagttttggttctgctgctcactttgaggaatgtcatgagtacgtggtggttatgtgattcactttctaatggtcttttactttttgtttttcaatggaacactgcttataggttgtggttgatgttggctgtggcacaggcattctttcaatattttgtgctcaagctggtgcaaaacgagtaagcttacagctgcttgtaattttaataatatgtgaaaattgccactgtttttatctattactggccaaatgctcgaacagttatgttttgtatcttattaaaagaaatctcaaacaactaaaagtattattatcatcttttgatgaatgagaaatggcttaaatttgatggatgttctggtataaaacaaatctttaaaagaggatgatttctttcttctctctctctctcttttgtagaagtgaaaaagatgatggtattttattaatagctaatagaggaattcatttttaacacgcccaattgttccttctatatcaataaactagtttttttttctctcttatatattatatttacaaggaaatttattcttatgaagaatctgaggttatattgtgccatactgccataatctgtaattctttgcaacttgattctattaattaattggaatttagatactccctctgtcctaaatttttatctgcactcctaacatcgttgcagtcttttatttcaaactagtataataataaatccggaattgaagtattttttcttatcctttatttttcattagaggattattgtaatggtgttacaattagtataactagctttacgtttttgacctttatcatctaatttgcataatatatctgatttattttattttgtaacttatcaggtgtatgcagttgatgcaagtgagattgctctgcaggtacagtttagtgtaaatgcacatgttttgttttatgcctagcatatgtgttatggtctccataatctacttgtcaaaattcatatatctattaaggttttgatgtgtgactgggcaaatgattttttttctttcttgtttatggtttgatgaaccggcctatagaagtttctcgcatttatcttgaacttgaaaatgtattgaatgcattagttattagtttctacataattaagaactggttattatattgaatatgagctttgaatggattgatcttgttttgcaagcaggcaaatgaagttgtcaaagcaaacaatttgtcggatacggttattgtattgcatggaagagttgaggtaagatgtcttaatgatgcgaatatgttagcaacagtggcttcattattattgtagaatttgttgaatttactcacatagtaactaagacagtgtagatccataggattcttatctttcaattaaggaggaaaaaaataaaaggttccaattggaataaaaagatttaacttataacgtggaacaaattactagagatttgtagttctgagggaagccggttttctcacatttgttgtttttggacactgttccatgaaacaggtaccaatgtgattgtggattacccatggtgattgtcttgacaaactcattggtagatatcaggacactgggattctcattagattgaactaaagaaagtatttttttattttttgtaataggttgtgttgatggctaataaagagtctagtgcaagtatgaagtcatgggaatggttcatgagagtaatttttctgcaatttaaactggactagtgctataaaatctacattagctaactgcctaagcatgttcatgttatgggagggcttaattttatttttcaccagctgacttatcacatttaagagctagccttttctctatacacattattttattttgcttttatctttacactgaggcatgtaaactttgcaggatgttgaaattgacgaggaagttgacgttataatttcagagtggatgggctacatgctcttgtatgaggtaatttcacaccttgcagtatgttatctaaataattaactttatttaatttgtgttttattttttataacttaataagatctacttggttttgtattagagtatgttgggaagtgtcattattgctagagatcgatggcttaaacctggtggtcttatacttccatcacatgcaacggtatgtttgagttgattgttggtttatgctaatctattttctaatcaagaaaacgttaaagttactatgagttaattttagtatgctactttattgaatttatcttttatttaaaatgaacgtgtggcatgcacatgatgctgaacttagcttgaatggtttgcagttgtacatagccccagtgacacaccctgatagatacagtgaaagcattgatttctggcgcaatgtttatggaattgatagtaagaaaacatcaaactaagtaacatgaatttcttgattgtgttggtgatatttatgatccatattttgtcctattttctatttttagtaaaattgttttcatgtattgtaaggtgatttttaattcttctggtatgtgtatattttttgtgatactgtattgacttaccttggactttttctttttcttgggagggttcctagattgtgtttctctgtttgtaaattagatacattttgctttgcttttctttcctaatttgttattattatcttttggttggtgtgtgttggggggagggtcttgttatttttctcttcatcattgagatagtaatccatccattcagttcttttcaaaacgggtttcctatttgcttttaagctttctcaggcttcttccagcacctaagtaaacataattgtgaaataagttttcacatatagtgaggtacatttttcgtaatataagcctagtggtaatcaatatggttaccatctgaaatttatcaatagaaataattcttttgacctcatacctttggcattttttccatagaatgtgctcctgaactacttttccaagaattgctttgtgtttttgatacccagaaagagccttgagtctctgctggtaggtgtgatcaatttgggatagattttcttttcttggtagcctgtgcttggaatgctcagcttatataccacagagcttgttctaaatgtgctattcttcttgtattaaaaggtgtatagtaaataaaaggggtatgaggggagaataggatagtataaatagatgacgaaggagtagagtgggtatgcaggaatttagaatttttctctgcatctgaga

SEQ ID NO: 185178 - DNA, 2326 bp, Cannabis indica
aaaaaaaaaaaagtcatgaagtgtttggtttaaattcatagtattgaatggagcagaattttaacattgaccgcgtggtaaaaataaaataactctttcaaaagttgtcgtttcaaccctttccaagtcgtttaaagaatatctccctttcatgagttgaccgtgtctgtcttccattactcgattatatattggatgtttaagtgatgattatactttgtgtttgtgtttaggatttgaaagctcatcttgataggggtaggaagttgccttctcctgatggcattctcatcaatggccgtggtcctaatggttactctcttactgttgaccaaggtaataagctcttaaattagcctaacatgcagtgtaataaagctccctcatttctgggcatggtgtaaataaataaaatacataaactttcccattacaggaaaaacatacaggcttagaatttcaaacgttgggcttcaaaattccttaaacttccgcattcaaaatcacaaaatgaagttggtagaagtggagggaacacacacactccagactacctactcatccctggatgtacacgtaggccaatcgtactccgttttggtgacagcagaccagcctggacaagattactacatagtggtttcctctcgcttcaccactggccgtaattacctcaccacaaccggtgttcttcattatagcaattctgctggcaaagtctctggcccacctcctggtggccccaccatccaaattgattggtctttgaaccaggcccgctctattaggtactccattttatttctccctttttataattattatgcctacctaatgtgacccgtgtttgttgagtcttcattctgtgattataactgatcaaccaaaccaatctacaaacataacacttagggccacatttgcacgtctatttatgtgttatttgttaaactctaacaacatgaaatgtgaaatttgtaaaataatcaataattatatactaagcgactatgaagattgcaagtaattagtttttttttcttggagaacagttcattcctaataaaattttagaattaagcagtgtcaatagttatggaatattatgttttatgtatgctaaacatggaagttgatttcaggacaaatcttacagcaagtgggccaaggccgaacccacaagggtcgtaccactatggactcatacccttggtcaaaacctttgtacttggaagttcgggcaaataaacggcaagcaaagatatggattcaacagtgtgtccttcatcccaagtgatactccccttaagcttgctgacttcttcaaacttggaggctttcgagtgggaagcattgctgataggcctagtggtggaggattgtaccttgacacagctgttcttggagctgattatagaacttttgttgaattcgtcttccaaaacaatgaggacatagtacagagcttgcatttggatggctactctttctttgttgttgggtaaggcaaataataatttacaattgacttgtacattttctctcttattctaagtgttttgtttataataaacctctttgtttatttgttatttggtggcagaatggatggggggcagtggacaccgtctagtaggaatcagtacaatctccgagatgcagtttcacgttgcaccactcaggtataagacattttgaaaaaaccaaataaaataaataagcttaaatagttttgagttgcaactccataaatatggtatttaatgtgtgagtttgacatacttgaattggtgagtgcaggtatatcccaagtcatggactgccatacatgtggcattggacaatgtgggtatgtggaacttgaggtctgagttctgggctagacaatatttgggacaacagctatatttgcgtgtatatacagcatcaacttctttgagggatgagtacccaattccaaagaatgcacttctttgtggaagagcaagtggaagacatactcgacccctttaaatgaaaaaaggcaagtcagccaatttcgaaagacatctacggtttgggtaggaaggtctacccaagccttagttgatgaagaagattagatcagttatttattagtattattatattcttggttgggtaagtttttcattgtgatttgatttaatgcgtatgtgccttaacactacttaattttatgtcctcagctcgagggctcattctttttctatatctaaatctagaaccgattgtattatcgtttttcatttgtgttgagctttcatatctaatgagaggagtcatataaattatcaattaattcttg

SEQ ID NO: 185179 - DNA, 954 bp, Cannabis indica
aaaaaaaattgaaataaataaattagttcagtctattctttaaccaaacacatgattactttcagcataatccaatcttgtccagtccagtccaatctttttcagtctaatccagtctattaatcctgcgtaccaaacaggcccctagagtttaataaaatctctgaaattaagaaattagaactctaatgcccatttttaatattgggacgcacaattaaataatttcataaataattataaaaatatcaataattagtgctaattgcctttactaattcatattctaaaatgcggtcatacaaaccaaacttttcattgttgagcaaactttttgttcaaaaactcaagcttgctcaacactcacaacaacaaccctaactcaacaaaatcaaacaaaaccaacctaaatagagctcccaaaatagattcaaacaacctagactttagcagcaacaaacctagtaactcaacctaagttggtcacagtcgaaacctttttactatcagtttgaaaatgatagagacaaagttcacgaggcttttaaaacgatgctaatcttatatatttttttgttccagttttttccttttgcggttgtgtaattagagaaggatatcgaaccgacacaaaccatctattatttgtgtcattttaaaaatgaaaattacatttaatatgatactgttcacgttagtcaacacgatgaacaatctctttgaccgacgtgatagtaaattttatagtagtttttctatggaagactatgatgaaattgaaatgttgttttgttttataaaaagatccatattaagtcatttttattactctacgaatgaaatgaacaggggttagtttcctgaacaggttgagtcatatttcgttctacaacatctttatatgtattctatagtcaatatgtgaaattagtgttataggaaattaatatttat

SEQ ID NO: 185180 - DNA, 3404 bp, Cannabis indica
tttactaaattttcctacatattcttcctattgattctcctgttttaccaaaaaaaaaacccttcattcctattatctctccctccattgtttttactctgtaccaaacatggcataaaaatgccagtaaacattaatgaactccctcaaaaaccaacttattactgctaaattctagtccctaccttcaatttgggtcattctaagttcaacaagacaatgaatatagcacaaaaaaatgacataaataacaaaatgaaacaaaaatttaaaaacaagaaagaagacaaaatcaggacaaaacaatttggttgcaatgccataacaactccatactttcaattcgatataagaaaggaaaagaaaatgtacaaacattgtttcccaaacattgttttttgagattttgatgtctaaactggcattttcattataagctgtccttgcatgaaactgcaaaactcaaaacataaggtgcaaaaactatattaacatttttgaacaaatttgatgagataacataataaaaagtatgtaatttaaaagagacttattaagttattacctcttcatataatagtaacaaaagtcagtcaagataaatgtttgaaccatttctgcaagaaaagctgccaagaaccaaaagtaaccacttccaaccaagtataagtaccctcctccagtctcataaatctgtaccaatcaaattgaaaaaaattgttatatcttattattattatcattatattctatgtatgtggaaataaaccaaccaacctgaagaatccagtgagcacatgagaaaaatctcgagacaccaagtgcaaatacataatgagctgtaaaaggctcaaccatctgcaacaagttgccccaaaaacaaaggcaaaacttaatttggtgtaaaacataatgaatacgtggaaacacaggaataagaacgagaataagaataaaatttaacatgaatcaccaaaattagtgaaaaatcatttacattccaatactatgaaaatgaaaattgattcatttccattttcattaccacaatcaaacgaacccaaagagtatatattatttacttatttattttttgtaaggataaccaaaatatgtatattttttgttcgctggttaggtggaccctagacacaggcctatgcagagggccgagcctgccaataactatattggggtgtttgatacaggggttttagttcttggaaatgagaatgtaaaactaaatctgtatatagtataattttagtggagggtttatgattaaatctcaattcctcccaaataaaatccaccaagttcttacaccaaacaccccatacgttatgcaaaaaaataaagagattttttcatccaagaaagttcattattatcatggttgaaaattgaacagagatttaaaccttagcatttctcatcaagtgaagctgaggtagaactgaaacagcttccatgtagccaccaagagcccaaagaattcgcgcaacgcgaaaatgtcgtgtcgaaggatgaatcgccaccgcgagtattgcagaaggcacaaccttttctcataggattatacaaagaaaatgtgattactatgcaatataatttaactataaagattatcaattcacatatattgaaatattttaattctttttctcttcaaattatcacaatgtgaataagtaccacataatataaggggaagttgtctagctccttgatgtatgttgacttcaacttaaatcttatcatataaataacccaaattgtggaaacaagtgttgtaaaatccagaattgtgtgaatatcaccttccattagagtactacagaacaatcttactgctagaaacatagctgtgagttcttgagatttcaatgaaagacctgaattgtaataatacacaattactttagattcttaccataataacacccaataaacatgaacaattatgtcaacatgtcatctctctagttttatggagtaaaatatgagccacagtaaaaaaaaaatttcttaaaacaaagagagattattggttgcggagcgttgactaataaggcgagctaggtctgaccccaaaattagttttgaggtggtaatcaagtaccttatgcattttctttttttatatttttcatactaacttatgctttaaaaaattacattttaaaagaaattgttagtgtttttcaaaaatacaacatatttctttcaccagggagaaaacccacaaatttgtatgcctgtcctgggttgaaatttaattatttaacaatctaaagaaagaaaggtagatattattaccagagcaagtcttttgagtggtgagtttgtaaatgagtacaagaattccagcaacatgaacagcctcagatgcaacaaagaaatggttgtgatttttgacagtgaatttcaaagcaattagtgcaaataacccaatagtgacaccaacaaagattttgattttcatattctgttttctcaaccaaccaaacagaacattcacaggtgagcttctcttccttcccatggtgataagatatgatatgatcactttctctcacttccttctcttttattattctctctaataataataatattatgtatttggagttgttgaaatttaggggaagagataaaacgtggaaagagactgttttgtgagacacgaagagggcatgcagttgttgagaatttattatgtggcatttatgagtttcacttaccaattccaattaagtcaaattttaaggacaatttataatcttttagatttggagatggatttgtttaccttattggttcagatgggatttttttttttttgatgggttcaagtaatgagaggttgacctaatttccttacttgatttatgctttggtgacattgttataaggattttgtgagactttttgttttgttgtttgactttaactatttgaaactaaaatatgaagtttaattggttctgttgttttttaggagttggccaacatggtaatggtagtatcacaaaaataaaattaacaagataatctcttcttgtaaataaattaaatcattttttatccttttcttttcttgtgttaaattttatagcaagactgctgcttattatatttaatgaaaaatagagatatagcaaatgaaagagatctttcaataaatggaaaattctataaaatcaaacataattaggtaacctgcaaaaaaaaaaaaagaaaaaactaggtaaatatcttttcaacaaaaacaaaaagtatctcgatatgataatatttgttaagtgatacgatatgataatattattgaaaaattctataatgtatttttaaaagggatacacagatatatttttaactgttttagtatccgaaataatttt

SEQ ID NO: 185181 - DNA, 4724 bp, Cannabis indica
tgttatttaggatttttgttcttttttgttctttttttttttgttttttttttttttttaacttattttagaatttttgccttgaactatgacatttgcattcttatatctcttgaactttttagcttttaaaaatagtccatgttgtaaattggttattttgtcaagttttgtcacacgtgataaattaaattatgacatgaccatatagtcaattatcacatcagcaccatgtgtataatttaacatttaaaaaaataaaaaattaagcttttttaaaaaatcattaaactaaaataaattaataattaaaaaattacataaaactaaattaaatatatattttaaattaatcaccgttgacatgacattaacgtggtaactagctaagcaatcatgtcatcattttatttgtcatgtatgataaaacttgacaaaataattaattaacaatattatgaatagttcataaattatttttaatggactaacaagttcaggagtacaataatacataaatcataattcgaccttaaggaacaaaaattttaaataactttttagtaataatgatttaatttttataaagtgaacgagatcttttttttggcagaacaaaatccactcccctaaataaatagtattataatatatttttaaaaaattaatgataataataattgcatagccatttgacttatttatcatacaaacattgtatatagagtatttcatagactaatatatccgcacgtgagctattatatacttggttgatttgatacaattgcttgcaagctttgctatggccaaataaaataattaatatgataaatccttttatatcttatgtttagaggttttgattattattattattattatcaaaatgaatttgtatatatatgggacaaatcatattatataaataattataaatgtggtgggtatttgtgatgatgaccccatttagtgattgttgctatgccatcaacagacacaaaattaaattgggtgtactatggaagcaaactcattttattatccatcaataacccaaaatttaatcaataattataagataagataagaaagagaaaccataacaaagattaaagggggtttagttagaataaactattccaattttttttgctatttgacaatttactttgacattaccaaccaattacaaattcaattttttaaagctcaaaaacaatataaataacattaacattacaacttaattttcatgtataaacaaaattaccatatgagtacccaagaaggactcaaaactatttgagttacctctctcaggtgattaaacaaaagaatcatagcagagaaaagagattcattggggtctgttaattatatcttaacccaaaaccaaaaaaagcatatctgatatttcagttaacagttgaaaattgcagagaagatgatgtggaagaatccatacaaattttctttacttggctgtgagtttcatcaatcaatatttatttacattatattcacaagtagtataagaatgatacaggagaatgcaactcccagatagtaaaaagaagattctttgccaacttggaaaattacagttttaaggaaccgaaaagagtggggactttaccattttaggtgccgaggttaggcggtagggttgccacaggtggaccatttgagtatctccactgactacatgctgagcatttatccaatttcacactattttccaaagtacagaatttacaggaccagagtttgtgtttgttactcgtgtcccttggcttcggtgtcccgcatatctcgcatattggagccaatggctgcattaatcaacagatgttaatgttcacatccaaagagaatgttattagagctgtattaggtggcaacaatggagaatagtaagtaagaaaaaaggtatggaacatgggaccagataattgtggaccaaagcataaagtgaaactatgaaacatattccaactaagagattacataatagataagtaaaaacttactggattcagcaaagtgcatgtttcacacccccacatggtagtttcttgtctgttattgtctgaattgagatcacgtatggattcggatggtgaagcatcagataaatctataaaattaggaggttgagctgagggaaagttattggattcgcgactcctttttcgagagattgagtctgaggcataagcactattagtgctatcaacctttgagattcctgctggattatcagagctaccttctccagactcggaagcatcacaagacgcagatccacaccatatttcgtcttgaaatctcctttctgcagccatagcagcagcttgtattggactaagtgcaaccataattgtgctatctccaccaagacgctttggtccagatggtagaagagaattcattcggtttctcttttctgcagcagaaagtgcacttgaacgaagtgaagaaagaggtggctggcgggtaaacccacctaaccgcctcccaggaagatcaaacccttgacctgtgccagatattcccttggacatgaagtcctcgcattcctgtaaaatcgtcaaattcctcaatcacataaaagaaaatgaaacacatacaattattgggcatatgaaatcccccacctaaacttggtttactgaattccccactggaaaactggtaaacagggcttaaggtaatctaatcataaccacgtttgaaagacaaacatatcggttagactagcacagaaagatccccttttccctatactgtaaaaattatattgataatccagaatggagaacacacacaatgagcacaaaaatgataacaacagaagttcatattgataatccagggtttcaagagccatactgatcaaccttaaaagacaatatctttctagccaaaaagaagggcaatatctcaacacattgcatcatacacttgaaaagaaaaattctaacattagatgtgcatatatattctatataaaaaacaattttttttcccaaaaacaaaagagggtacacaggacaagaaatttaaaagtcgcactaaagataacgaaagctataaatacatatgtctacaaataaatacctttctaagttcatcccaaagcttgtagaagctagcattatgagggccatgagcattgtggcaaagctcatgaagcatggtatcaagaatttgatcaaaggggaagaaatcccagtctctatttggccttcgaagcctcaactttacttgaatacctcctcctacattcaatccgagaagagacggatttttggggctgccattcataatttcataccatatataaaaaaccaaggaaagcaatttgttattaaaagaatgggactttctgcaaacctacaaatcagattaatatataaaactataccaaaactcagtaagaagtttgacacgccatttgtggttacgcataatgggttggacctgtttggccacattctcaagaatcttcctggcttcttcctcccctggctttttcaaggctttgatttcccaaaccttgtgaaggtcacccacattcattgctccgagtaccgaaagaaaattatgagataacaatagtttggagaattatctacaaaatcataaatcaaaaagaaagtttcagattttaacacaaattcacacaaaaaactagaaaaagagtttctaaatgaacagcaataatctcatagcaaacaaacagaataaggtacctttagatccgaaattagagaatagaaagagtttcagccgctaatgaatggcgttgtggtgttaatctgaaattcaaattataatgatatcatactctcataaacaaaataaaatagttgatgatttcacccaaatatccccatttctatatatacacatttgatacatatatatacaatacgacaagagcatacattaaaactatgaaaaattcccatcaagacatttgaaggccaagtaggtagcatacaagaaacaaaagtccatggctacaaagcaatcctttgcttatcaaaagcagaccaaaacagcaattttgtttctaagtctccttagttattcaattgggctatctctttagtcaacaaactgtataaatgcaaaacgaaatgaaaagagagagagacatttcatcaaacacttcccaagcaagtttaaaaatatatatatatatatataaaggtgtcaaatttaacatagattcatacaatgcaatgcaacccaaactggtattagtactatcatcactcctgcaattaaattaattaattaacaaaatatgcttcaaactagtttgaaaaatcacctacaaaaatacaaaaacaaaacacacacacacataatatatatatatttatattagtattatattatgtgatttaacttgaatgtatatgtaaggggaagggttactgcataccagacggtggcggagaagaaggcggagacggtgagcgtcgccggggagtgaggatttcagccttgacttccggttgtgatgcagagaagataatgaaaccctcgtcgtggtcgtatactaggggccgatgaagttggccgaggaagaagaggaagagggacgctgcttggttttcaaatttcattctaaatattcattatttatattgggtgctttcaaaagggatgtaaatgtaatgatcaccatttatttgttttgtctgaat

SEQ ID NO: 185182 - DNA, 6742 bp, Cannabis indica
aaaggaaggcgtaggaatgaatgaggaatcgtttgaatttaaaaaaaaacaaaacaacttttaaaagaagaatcattaatgcggtcagcacaattgcagtgacactcctcttttacgaagagacgaagacgagaatgacttttcaggtccccttctacatagtcttctcactcttctcaaactttatacaacttacccaacaagttttgaattcaattataataccccgttatcaaccgcttccattttctttcttcaaacaaagctatcgttttttttaatattcggacccttcattgccatttgggttttaaagttctttgtgtattgttgtgttgatcggccttcaatctcattctgatttccttttctgggttttgttagtccaaaaccaatgtgggtttcttttttcttactgaaacttgtgtttttttgtttttgtttgaaaaacccatttttgattttgttacgtgattgttaatgttgcagagcaaaacgttgtggagcaagttaacatggagattgaacgatcccaagagatatccgctgatgttctgccatttgcgagaaggtgagggtgtttatgtttatgtttagtgtttgtttggttgatcagagaatggaaatgtcaatttgtttgcttgctgaggatgttgataaggagatagaaacgaaactaacgagcactgtgaacaagtttggattgttcttttccagtaactatataactaatgatttctctcttatgaacaatgggcaattgtttgcagttaccaactagaagcattggagagtggaatgaagcgaaatacagttgtgtatctagagacgggttctgggaagacattgattgccatcatgcttcttcggagttatgctcatttacttcgcaaaccctcacagtacattgctgtttttttggtgcccaaagttgtactagtcagtcaagtaagctccacacactctctttattatatttattacctttatttgctgaagtatacagagatgattgattgcaaaatgaagtgttggaattaagaagtaacatcacttgagtaagccttttgtgttctatatattctttatcagcaagctgatgctttgaagaagcacactgacttgaaagtcggaacatattggggagatatgggagtagatttttggaacgctgacaagtggaaagaagaagttgaaaagtatgaggtgcggtattttttacagtcattttatttccaaacatggaaatcctgctcatttgatatgattttgtgaatttagcatttcagttgtttggttatctttcattgtggtaacactgaagttattgtgtttataaataaacttgaaataacttacattgccgtaaattaggtgcttgtcatgacacatcagatattgctcaataatttgaggcacagttttttcaagctgagcatgataccagtcatagtatttgatgaatgccatcatgccaggggctctcatccatatgcgtgcataatgcaggtgaattgttgattcattattttatgtggcttatgttcatagaaatatttctatttcgattgtactgcttgctcatctgaagggctttttaaatgctatatatggtaatgaaatcacttgttaccttaacgatttgtaggaattttatcatcctctgttaaattctggtgaaaccaatctgccaagaatatttggaatgactgcttctcctataaactcaaaaggtagaatctttcgctatgttttctgtatcatttttgtgattggtaaatctttgtactttactttttggctccaaaaattatgatcatttccgtcttggttctccaatccaaattcagtgggagactcagcaatcgaccattggaatcgtatcaatgagctggagacagttatgaattccaaggttggctttggcctttgtttctgaattcattaaatgcggtttctgttgctttgtatcctccttggatttgcaatttatgttatgcttttgaagattgtaatgtcctctttgcttagaacttgttgttacactcacttggttctctgtttactttgtagattgtgtgtgtgtgtttttttttttaatttcttatacgttatattgatttctgacggtttcctcctattgggaggttcatttcagatgtatacttgtgccagtgactctgttctttcgaagtttatacctttctcgactccaaaattcaaattctaccagcacaaggaaaatcactttccgaatattgaagatattttaaagattttaattgaagaggtatgttttaatttaatgcagatgtaggttctcacatctcaaaatcactgtttgctatggaatgggtttatgttgttgtttggttcaaattcttaatatatgtggaacattaaatttggtaagacataaaatggaaacgggttttaaatattcattcaggaattaacataagaaatggatatggtgtttcgaacctgtggagctaaagaagcttaagctgacaaattccttttctcacttattttttttttaaaatattattttacttattgaaactatcgggcattcttcttttaaaatctaagttaaattgtaaagctaactgtattattcctttacggggtctacttattggttaattactctgcagcatgaattgactctgaaaaatttagatcttgatgaagcttcaacagactccatacgcagaaagctatctaaggttcattctgctttgcgattttgtctgaatgagctcggtatttggcttgctgtgaaggtattcatcaaataatgttgtgggtttgttcttttttgtcataatgtaaagcatgaccggggtatgtgtgtgtataacaggcagcattgtccttttcttgcaatgaaattgaattattctcatcagcgagattggatctgttcggcgagaaagttgtgaagaatttttgtgtggatgccttcgaggaaatttcaagtttcctaccagctagtatgtctattgattcttgtgtgaggattgatttgtttttttttttttggcattgattatttgattctcttttcttttttctgtgttataggaccaaattggtcactagcagatgatttcaagagaaatatggatcacggaattttgacctcgaaagttgttggtcttgttgaattgcttctggagtacaggttataatgtcaccacgttatcattattatttttatttgttttaatagaaaagatggtatattaagtaatggatacaatgtagaataaaaggtcgtaatgtgcttgtgaagtacggactacaattttagactgaatttgtaaaaaatttaacttgcataacaatcagttgtgtgtacacagggacttgggggacattagatgcatagtttttgtagaaagggtcatcacagctgttgtcattcaacgtttgttgaatgaattgcttccaaaagagactaactggaagacaaaatatattgctggtagcagcaataatctagagtctcagaccaggacaaaacaaaacagtattgttgaagaatttcgtcaaggcaaagtatgtttatctttaaagttttaaaaaatgtacttaatacaaaggtcttcttatttctaatggtgaagatatctacatgttgcaggtgaacataattgttgcaacatcaattctagaagaaggtttagacgttcaaagctgcaatttagttgttcggtttgacccttgttccactgtttgtagttttatacagtccagaggtcgtgctaggaagcagaactctgattacgtgttaatgctgcagaggtaatcacattttctttcaattaaaaaatatatttttatctgtacaaatacatgcttggctttgttattattgtttggaacatgggtgggttagacattaatataaacatgttatttgactaattatcttggtgtttattttcagcggagatcatgatacaaaatgtcgttttgaaaaatatcttgccagtggagaaataatgagaaaggagtccttgcaacatgctcatgatccttgtgtacctcttaaaatgaattttcaagaaggggaattttatcgtgttgaaagcaccggtgccattgtgactcttagttccagcatcggtttgatatacttttattgctcaagactcccttctgatgggttagtttcagtttgtgctatttgtattaggagcttgtattacagttttatttaccttcttcgtgggttttttttaataggtattttaaacctaacccaaggtgggatacagaaactcgaactctctttcttcctaagagctgtccattaggatttgtcactgtagaagggaattccaaactgcttaaacagattgcatgtcttgaagcatgcaaacaacttcatcatattggtgcattaactaatacacttgtaccggatattgttgtggaagaagatgacgcacaagtgcttggtaatcttatgatggaatcacaatcttacatcttcaatatatatataaatttatatatatatttattctttttctgtttagacttctcatttattttgttgcatttgcatatctattaattaatgctgtttagactttttattgttgcatttgtctcatctatttaatttgcagcaaatcaaccatatgaagaaatacaacctagttatgtgcctcccgaaatgactgcatcaatttgttcaattgccagttatcattgttatattattgagcttcaccaacactttgaatatgaagtgtctgctggtgatgtcgtgctatgtatgagaagcaagcttgaaaatgatattggaaacatgcattttgacttgcaagtggggaataagggtattctgacagttgacttgaaatatgttggacaaattgagcttaactcagaacaagtaatgcattttatattttgctaatccctcccttatcttatttgctgcattaattagaaggctctcattttcggaaaccttgttattataggtcatgttatgcaaaaggttccaagttgttcttcttaaaattcttctggatcataagctcaataacttgagtgaaattcttgatctagttcatttgtcagacactcctgtcattgattatcttcttcttccagccactagtccaaatcaaagatcttcagtcattgattgggactctgtcacatcagtattattttcgagtgataagttttgtaagaatcacagaaagtgtaattcacgaaagatttcttcttgtggcatgtataccaaaagtggtttggtttgcacttgtatgatcaagaattcacttgtctatacccctcataatggtcatgtgtactacatcactgacattttgaatgagatgaatggacattcagttttgaagctcagggataataaaagtactacatacaagaattactttgaagttaggtatgtactcctttatacttcttgtgtatgtgggaatagcataaaataataattttctattttggttaacagtattattttatctaattttcttggttgatttatctatacattagttgagatttttattataatatattttaatcccattgtttaaaatgcaggcatgaaattaatttgcagtttgtcaaccaaccattgcttaatggaaggaaactttttcacgcgaaaaactttctcctgtcccgagaagtaaagaaaaaaggtttgatatctgttatattagatttttcttctttatatgctcaattatgattagcagaagattcttttttatatatttttttattcatttgactgtgatttcagttgtttagccttgttagcattcctttgtgatgttactgtgtattataatttaatggaattattaatgagataacattctcaaatttaaatgttaaacacaaggtgaagttatggctgcacttcatttgaatttgcagtagaatgaagcttgagagaactaagttatgtgtgcttccactgtgcatttctatatagattttcaattaagggttggtttgtttttttttttttttttgttgcagagacaagtaatacaactagtaagactgttgagctgccaccagagctttgtgttcttatcatgtcacccatttctctttctgtattatataccttttcatttataccttcaattatgcatcgtcttgagtctttacttattgcggccaacttgaaaaggatgcatttggatcattgcacgcaaaatttatccattccgacaactaaggtaagagtcacacatcatgttttttgaacactttgaatgttgtctaattatcttcaaattgatgtgttaaaagagctgattatatatttaatattcagtaaggttttttttttttttttttattttttttactatttttgttgttaattttttgagttttgtttcgctttgttttttttaacttttatttttggttgaagttagtttatatgcttcacatacaaagaaaggtactttttctatttatctaatttgttgcgatgtgtttgctatcaagtatcaaactaaataggaagatcatactgggtaatgcattttggtttatataggttaagcattgagtacatcatctaagtttcttttttttttttagtttgtcatactggaaatgctgatgtttgcttataccatggctaattattcttttgtccttttaacttttcctatacttgccagctggtgaattcttcactaatcttttacac

SEQ ID NO: 185183 - DNA, 1506 bp, Cannabis indica
gggtaattttccatctttggaagtgatcgatgtttggcattgtgatgaattagtgactgtatttccatccaatactgatattgatgttgcatatccctccttgaggagaatggaaataattggttgttcaaggttggagtcaatttcagaaatgggattgttgcctgtttctttggaaaggctacttattattgagtgtaataggctgatagataatcgtatgcaatggaatctacagagactctcaaagttgactgaattaagacttgccaattatagaggagtggtggattcatttcccgaggaagggctgctcccacctagtttgacacatcttaccatccttaacttcgataagcttacagctctaaacgccaatggttttcaccacctcacctcacttcaacagttggaatttcgtaagttggaaaagttagagtgcttgccaataataggacttccccagactcttactagtttccctatagatcatcaggtaagttttcaaaagtcgtagtaattgaaagtctttattcttcttagttgtactagtttcccctaacattttctttcatattgtttttacttcattcaaaaaaaaaaaaggtataaatttattttccaagatgtaggcatgaatataactcattttcaattttccttttctctcttttctttagaacattagacaactattgatgtgaggactctactccttcggttgctttattgggctatcttgttttctgatacattcgttgtgttagctgctggatgtttgttgacagttggaaagaaacatgaagactgcatatcggtttcgtttctgattggccaatcctcttttgatgttggtgtggtctatgagtaatctgttctgtatttcaagtgtaaaagttgtgttatttgtagttttttttttgtttttgtttctgctttgtgtgtggatttcattgattaatgaatcagataaatacatacattcattaatgatcatataacttggtacaatttgcgatgacaaaatatgttatgtgtttccaacttgcctatgatgtctttgttccaatccaatttggtatggttatttagttgtttctacagctactgtggttggctgctataaaaaaagaggggtcagattatcaacaatacatatgttttgattaactttgaaattcttagggaatatacttgctataggcacctgtttgtttgatggatttgctgaaagtaattgtcagaggattgagctcattgttgaattagaactgaattagctcagtaacagtaatgctataagctcagccttgtttaatttgattggtatttctctctttaatttgatactgatgtgatgtgaatcatagtattttatgatatcacttcacttgttgttcctttaaacatgtcacatttaatctatatgcttcttaaacatgtaataataagtatacatataatattgtcaaaatgtaaagagattagagactagtaataaataaa

SEQ ID NO: 185184 - DNA, 1658 bp, Cannabis indica
tttttttttttttatttagtaatatttgagaccttataatatattattatgcatttatattgtagacagaaaataaataaggctaaatcatcaagggccatataatagagtgtggtggggtctataatagggaccccattacctttggaaaacttgactatttaagaacacgtgtcagaaaaataaagagatgagattggatcaatcaaaattagtggccaatgaaggcacgtgcatcacacgcgaggttgatgattttgattgatttgtagcactaaataagatttttatggttcaaaatctccatgggaaaatcctaatgcatagctttacatacaacaaattaacatatcaatatcactatttagataataataactactcatgcttctataatttcatttgacaaaaacattgttttccttttccttttcttgaaataggtatttagatatagatttattgttattaaataaatggaataatgtgcctaaattttatgcattagaaaaactaaaaataattacactaatttaatgtttaatgacttttaagggcatctccaatgctagcaagattggtagagctcatttttattttcttaaatattaaatttacatagtaaccaatcaaagaaaaagtagatatcggtactcctgacagcaaaacattcatattatcaattgaaaaatcaataattattaaagttatatggactcacatttctcacagctacactcattagagttgcactaatgtggttgttttgtttacaatctgaaattatggtttcaaactctaatcaattcaaattaaatcatttgagaattgagactaaataaatagatttatgtaacgtttagttggggaggaataaaaatattaatttttttttatcttgtattggaatggtcattccttccattttaatatggaatagtcattttaccaaaaatgatggaatagtcattatattagaatgacattctaatactttaaaatgtaaccaaataaaataatagaataaaaattatttcttttccattctatttcatttcatttcattacctaaacgccacttaattattaatagtttgatagatctaaagtgcttaggattctctacttacgtcagagagttctaatcaacagttcaaatcaaatcacactgcctactttatatatagttaaaggaagatttaagaaattattttagaaatatacaaaaagaaaatatatatatatgtatatggttgtacaaaattttaaatgtttttacgatttttaagattttatttacataagataatttttttatacatttttatattatactcttgtattttgttgttggttttcttttaattatttgtatattattttgacattgttttcctcaaactttggggtgattatttcgtatttttttaaaaaaaatactataaaaaataaaaatatatatttgaatgtaaaaatatagagtttttaccaatagtttgtgtaaattttccaaaatttaatatacttcttaaatgtaaaattgacatttgataacaacttttgcatacattgtattctagaaggcaacacatatatcttttcgtataaaactatctataattaataattaggccattaggtcatatatatatatatat

SEQ ID NO: 185185 - DNA, 9873 bp, Cannabis indica
agggttagagattcacacacaaaatgcacaagaacaatacacaaaattaaaattacagagattagggttaagaatatcaaacacagaagaggaacacaacgaattttctcaacgttcacccctaaaaagatgggcttacatccttgtcgagctcgccactgagatacttgagatttcactatcaaattaggtaaggttacatcgtcttcttaatttcaagtcacatgtatttgactagtaatcagtattacaatcttttgaatttctttctatctttcttcactataactttgccctaacttctattttgtttttctctcaaaacaaacgcaaatggagcttaacactcagactcatcattctctctctctctctctggatcttctctctctatctctggtatgaagctcttcaccttgatctaggtttaaataggcttagaagagatgttggtgaaagcactgagcagttgctgagctgaaaaatagttgtaaacgtattagttgagtagttagggtctttatttgttctgctgtgatctgaagccttcaagaaagtgttgtaacaacttatgactaatttgattgcattttcttgagctcaataagaggattcatctttacaaattccacctaaattatcttattaagcgatgatagtatatatgatctcattgggtttaagctcgatgtcatttaaggtcatccactatttccaatccctagcaggtttaagctatgtttgaacttcgctaggggtaccactttagtccccatgtctgaagggttgtcctctatgggaaccttttccataggcacttctccttatgacactttttctctgatgaagtggtacttaatctccacatgttttgtcatgtcatggaaaattggattcctacataggtggatacaactctgattatcaaaatagattgtatgattttcctttaggagatttagctcttttagaactcttttaatccacattgcttctttaatagcctttgtagctgaaatatattcagcttctgttgtagataatttccacctattagaaagaaataggcaaatgtagactacctagtatctctatctctagcatagtcaaagtcacaatatctttttatcttagttggtaattgtgactttctctaattcaaacttgtttctattgttccaagcagatacctaatatccatttcatggctaaccagtgaaagcattcctggattagccatgtacttagtatacttatagcataagctaagtcaggcctagcacttaccattaggtacattatagatccgacaacatttgaatagggaatttcgctcatttcctccttttctttagcagtagtaggacaatccttcgtagaattttgatattaacttgttataggctgactaatcttcctagcatccttcattgagaattttttaataaattttagcacataatcttcttaacatagtatcagagtcccctagttattatttttgcctatagatatacctaggatcttggtagcagtgcctaagtattttatttcaaactccgtgtttagaaatcctttgaccaggttttgctttagctcttttttttgcttattatcaacatttcatctacatagagtatcaagtagatgatatcactaatgttgtttccttggaagtataagcatgtgtcaaagtaactccttttgaatccttgtttagtcatgaattcatcaaacctcttattccactgcctaggggaatgctttaatccatacaaagatttgaccaacttgcacactagatcttcctttcccttagcttcaaaacctttaggctattccatgtagacatcttcttcaagtttaccacgtgaaaaagttatagtaacatccatctgatttacttccacgtcatgttgagttgcaagagctaacattagtcttattatcttattcttgactaaagggagaatatttctgtgtagtcgattctttccttctaagtaaacccttttgccactaacctggctttgtaactcattggttctcctttagttctaccttctttatgtctgaatagccaattgcacgacactatgctctttcctttaggtctcttgacaagtatccagggcttgttcttaactaatgaccccatttcatcatccaaggcatttagccatttcttcgagtctttactgtttatggcttcctcataggtctcaagttctagcttagttccttctatagcacttagtagatcataggcagtattctcatctcagatgttataactgtacttctagtttggcttagggaccctcctttccctatctcttgctaactaatagtgattgagattctctcgttatgttttatcttgatttcttaagtttccacctgaactatttctaccccatcttccatttgttccacctgaataatatcccagtcatttccagcattcttattaggttcggtttgttgagtagtttctagttcttcaaatcatgggtcaaagctaactgtgctacatgccttgttagttttgcccacatttcctaaaacagttgggttgttagaaaatacaaggaaatataatcttcttaaaaataacatccctgttgtttatagtttttaaacaaagtttttcttttacccatagcttgtatcctttggtaccttctgggtatccaaggtatacacattttagagcccttggctctaacttcccaacactctgatgtgcatatgcatcatatccaaaaaccttcagatgagattgatatggtggtttatcactccacttttcctctggagttttaaactccattgttgcaacgtcctacttaaacgaacgccacgtgtcgtgattacaatatgataatcccgttgaccagtgtccataagccaggtgattaaaaaacttatatttaacttaattaaataaataacttgtaataaaagcatactttactataaaacaaaatattaaagttacatatccgagattccgtaaaaatcattttcgaaatattacaagttatttcatacaaggcgacctaagtgggaaaataaaatttctatacaattccatgttggacccaaccctcctggtctaacttggcttgaacatatacaattcatcttcaaaaaccttgaactcatggttgactcgatactactttacccttgcccgcataatagagcacccgtgagccaaggcccaacaagacaataataaaatagtatgaacattaataaaaatcacatttcatacattacgtctttgcgtttataactgtgctactgcactgtatatcttattatctcaaatacattgatgccactgcatctaatgtctatatgacatagacttacgtgttacgctcttacgacttttttacatataagggcgtaataggttttatcttggttttagttaccgagtctaatctagttatgccttactcacataactcttctcatttattcacatattacattatcacatatttattgcaatatgtacttagggtaataactctaactcacaattctacatataaaaatcacataacatataaccgcgccaccgcgctatactctttgtgtttagttcactgtcttacctgatttccagcatttgaggagaatttcaatccataggtgatcctgaccaagtgccggtatttctagtcacaattcttgagtttcacacaacagggataatccccaaatcacatttcataaaaattcacatgtaagaatctaactctggaccaagtaatagagctcgaaacgagctttccaatgatatataaaacatccaaaatagagttcaaagtcaaaaattatgcccaaaaagaaaattagctaaactgaactgtcgtcgcggagtcgttgcgactaattgtcgccgcgaacagaccataaagttgccgcgacgagactgggcaggggccatcccctatcctgggatcaagcctcgccgcgacgaccatacatctagttgccgcagctgggcctgaaaaacctagaaatactaaattttcaataccttgaaatttacctaattcactgaaacttcatataatcatgcattcaattcccaaacaaattcagagtataatcaagtatacaacatcacaattactacatgcttaaacacccacatcaatttgactcatacctccatcaacttacatcatcaaagtttagaaaactaaacaaaactttcagctctaatctagcattgacaacaacatcaaattaaaaaataacctgaaaattagatttcaaacctaacataataaaacataattctaaccatggaatcaacacataattcaatttcaagaacataagacaaaaacacatgcaaactcaacttattaattttattctttttattatttttttatcattgttagtatggttatgctttggggtgagccttattatgttctattttggttttgtaggaaacttcacagttattcaagatgaaacaatagttcttagggtggcgttggattggtcacttggcattagaattcctctccattctattaaagctaactgtttagctgtaatttctacttttgctaagagatcttttctttgcaatgattgtggttctcttttagatgatatttctagtttttttgtataaaatttttctgaggcgtccctgattcatgttcgttggtcggccaataacgctgctcatgaattagctgtgcacgcactcagagtagatggtgagctagtttggataaaagattttccatcttttcttttcgatgtactcaacactgatcttttttaatgaaagtttgttcattgttaaaaaaatatattttttttataaacaaaaaactttatagaactcaaaacaaggggtctatgatgaaaacaaaggaatccacctccctacgcaaaaaagtaaggaaaattttcaaaaataccattcttttatgccttatttataattttacgactcaaaatttttaatttacaaaaatatgcttgtaaagttttaaaattacaaaaatacacttttctctacaaaaagttaaaaaaccaactaaaaaataacaaaaaacgtatccacgggattggcttctggtagaatctagtctcttaatagattgcgattttttcccttgtgtgtctttgccttagagagactttctacttttcgtgtgctttctttattaggagtcatttttcctctgtttgactggtctcatatttgtccgaagtcactgctttctttctttggtgtttgtttctggccttttttgttggttaagctgcgatggctaagctcagccctgtgaacgaagatattcagttgggcgttattgacgaggataagaacaaattcttacagcttgacactgcgcttgagatggagatgttggagctctttgaggacattaccttagaagatgtagtggctaacaaggcttgtatggggaaagttataggatgcaaggatatgcccgccttggtggttaagaagattcttacgggagtttggcgtatactgggtttttagaggatgaagaaatgtgaagatggagccttgggtttcttccttgaggatgaggaagtttgttcttatattctggataaacgaccatggttggtgaatggaatttcgttgaatcttaagccatggcatgtggagggagaagttcgggtaggagagtttaaggtagcgagattttgggtcctgttccatggttttccagctagatgctcgacgaatgataatgttcctattggcaaagaaggtgggcttgtacgtgaaggctgaaattaagagcaagaaggtgctggtgagaagtggacatatcagagcgtggatagaggtgtggttgtcgcatcttattcctactggtttcttcttgacgacagatgggaaaccaaaatcgtggattcaatttaagtatgagaaattacctcatctctgtttcaactgtagtagattagctcattgagacaaaacttgtcatgttcagatggcgatggttacttcaaaggtgggtaaagcagtccagatgtacatcatttagattaaaagcgatacagggaagagcaattgcttcaacatgaatggaaagggagtaacaaaaatgatagtcgatttggatgaaactcatgagtgggacattaatagaatatgacgtaagggaacttggagaagaagatcagtgcctgagacatcggaaacaaggattgtaatcagaagggtaaggaaaagattattgaagtggagacggtaggagctccggtggagctgagctatcactcgtcagaggcggttcaaggctggaaggccactactcggtactcgattgccaaacagggtacaagtagtaggcgtgggaataaggttcttgggaatgatggtggtcttggtgctgacgtggcaaaggagggaaagttaaaggaggtggaagaagataaggggttcactgttgggccagagattttggaattacctcaaccaaattttgctaatgttaatgaaaggaacgattatccctgatattggacctactattgcccaaagtcttgatattcctcatgattggttgtgtctgtcccaaaagccacatttgtttcctgagcctactcttatttgttagcctaacaatgatttagaagcccataagttgtttattttgtgtctatggcaccctgtatcaagaattgaaaagagcttattggcaatggatttcggataagatctctgagtgtggagagccttgggttttgatgagagatcttaatgttatccttgatgatttcgagaaggaaggaggcaaaaaattcacgatgtgcaaaagggagtttctcagagatttcttgttcaattcaggtggcgtggatctaggctatgatggtagtgttagtacctggcaaaactctagaaatgcttgcattagagttcaaaagagactggatagggctattgctgatgcatactggtgtatggaattcctaaaggctcgtgtccacaactttcctattgtgggctcggatcatgcgccaatttttttaaacctgtggggagaaacagtaagttaaagtacccatttagattctttgaagtctggacttcgagatcggattgtgagaaagtcatagagaagtcttggaagagggagaatactggaaacgatgactctttactgcaaaggaaattgcaatatacgaaataatatttgaagatatggaatgacaaagtttttggcttttgtgatagaaaattaaagtttcttcgaagacaactggtacatatttaaaatgagctaatttcccaatttaatgtggaaaaagaagatgaaattcagatagaaattatggaattggaaggtagaatggattggatctggaaacaaaagtctcgagaaagttggctcagtttggtgatggcaattaagttcttccatgcttcgaatgtaattcgcaaaagacgcaattttattgggtgagtggaaaacacttatggtttatggttgaggcagcatgcagatattggggtctacttccaggaaaatttccaatcgatatacaaatctactgagtcgtttatcgatcaagatttgagttgctttttgttgataaggtgtctttggaggagaatgaaaggatttgtaggattctagatgactgtgagattagagaggtggtcttcaaattacatcccttgaagtagcctggaccgaatggattatcaagtattgttggagagcaattctgtcccataagtctatgtaattttgggtataagatcaaatctcgtattttgacggaccagttaaaaggggtgattgatcagttggtttctccttttcaatcggcctttattccggtgcgttggattgcagaatgttctcttatggaccatgaggtgcttcattttatgaaaaataagaaaggaaaagtaggggctatggtagttaagacagacatgaacaaggcttatgaccgattagaatggggattttgtttgtgagtacttcaagcaaatggatttagcattcaagtttgtaagctgattatacaatgtgtttcttcaattagcttctcaaatttactcaatggcacccccttggctctcttcaatcctaatcgaggtcttcggcaaggagatccactcttgtcgttcatttttcatcctttatagcgatgtgctttctaaacttattttgagagctgaaaggggatgagatctagttggtgtgcatatttcgaggaatgctagtccaattactcatctactctatgttgatgaatctattttcttttgtcaagccttagcaaggaatgctgaaactctaatgaagtgtttacaaaagtacaaacattggtcgggtcaagttattagcagtagaaatgcggagtggtgctttcgcccaacactacccggaggtgccatgaaaaaattaaggggttacttggtattagttgtattgatccaaaggagaagtaccttagtaatcccttcttctttactgctaagaaaagggaagattatcattttttgaaggaaaaaattctgagcaggttggagggttggaaggccaaacatttgtctcaagctggaagaactacctttataagctatgtccttcaaagcattccgaactattttatgtctattgctcaagttcctagcgcgttatgtgaggaattagattgcttgtttgcgagattttggtgggttggaaatgtggagaaaaggaactattgtgctttaaaaagttggaatgagacatgtcaacctaaaaagtgtggtggattaggcattcgaaggttcaaatacatgaaattggctcttcttgtcaagctattttggctgatcatgaaggaggaggataaagtttgggtgagagcctttttggctaaatattgtcataccagtaatctgtggatggtagagaaacaagggagccactcaagatgctagaagagtttattggaagctagaaatgtgtgttagtagatggtaatagtgatctttaggatagaccttggattccttggaggtagatagatgaaatcaaagctagcttccattttaaatgcaatcacgccttttagaagataaaagatctgttcttggatgaatcttgggtgtgggatgaaagctttatatgagggtccatatgtgctattttggaaggctgctaaatcaagtaagttctcagttaagagcgcttattggataagccaacaacattgatttaaggaattaagtgtggtgtgggaaagcttgtggaaacagaagctacaccctcgtttgaaattacattgctggaaaattttggttgataccctttctactaagtctaggcttggttttattcctaacgactgccaatttcattgcttctgcaatatggaaaaggaatcgacttttcatcttttctgtcaatgttctttcattcgtgggatttggtttaaaagtcaatgggggatctgtattgactgctttaattggactaacttaatggactttggcaaatagtagattaacttggaggattatgggctaaaattttttactgcctgtgtttgtgagactatttggaaatggcataatgagatgatctttaaggacaaactgtgtgaaatggaactgttttataaggattgtctttcgagatacaataattttaagtgcaaccgtatctagtttgaagaaatggatatgaatgataagtatgtgcagatgcatcttcatcaaattatggaggatttctagtgttgcaaagtcgatgcttctgtagttgatgaagaagcaggttttgttgtttttcacaataatgtctaagtttttgtaaataaaaa

SEQ ID NO: 185186 - DNA, 7721 bp, Cannabis indica
tatatataatgaacaaaaaacttagcaacttcattatataatattggcattcttgaaaaggtgcttatttttatttttttgccttaattaaaagggtgcttaattgagattgttaatcgtaacaccaagaaatctaaagtttgaattttgtctcatccaaatttcaaacacccctcaccaatctaattctattttttttttcctgttattataaaactcgtagagctttttttattttttaaaaaatcgtagagcttaattaagtaaaaaatacctactcattaatcataatcaaataaattacaatgtttttgtttctttctaaacttaagaaaaaaaacactctaaagcaatgttgtttcaatcagtgtaagtatgtttgccacaaaaaaaaaggtgtaaaaatgtactgtcataggtatttcggtttaacactctagagttataattggacggtggtgatggaaaacggggatagatctgagggaggagatcgctccataaacgatgatattagaaggacataggtggagtccaatttttgagcccgtttttgtttttggttttggtatgtacgtgcacatccacaggcccattaacgcattcgtatccaaaggccacgttgaattagactaacaataacatctctctctatctgtgtctctctctctaacccacacaaatataatctctctctctctagagcgcgcacacacgcggattcacagagcaataaaaggagggtagaggtgtttcaaagggtttgttctctgtctaaaatctaaatcgcctcttcctcttctctctcttcttctctcccaaacaaatactattactcggagagactttctctctctacacattctacagctgcgttatctctttctctcacctttcatccctccttgctaaatctctttctcctttttcgattttttacagaacgatttgttttgggctctctatctcttcctctggtttcagatccttgtgcatcgagcgatatttattttgttgttgaaattggtgaatcaatttctcactcaaaccctaatttatctattttttttgtctttctctcttatacacactcagtaggctcatttttgttggaggcctgttgtttgtgttttgggactttgaccttggggctgtgaggtgtttcgattggaaatggtgggaggtgggagtggtaggcgggatgagtccccagtgatacagagttctaacgtttttgctgcgctcggtagtttgaagaagaagaagaagtcggataagagcaaagggaagaaggctgagaaggagcctgagaaggaggttttttgggctcccgcaccgcttacagttaagtcctgggccgatgttgatgatgaggatgatgacgattactacgccaccacggctccgcctgaggcggtctggagtgcccccggttcgaagtccgctaaggatagtgaggagcatgagcctgctcttgaggtagtctcctttcactgtttgagcttgttcatagtcttatatgtagtgagatttatatttgtatattcatagatgtgtttgtacgcactgcttttgttacggtatataggcacatgtgtttgttccaagattgatgtttgctttggagtattaagtagaaatagtgttgggttaaagtctggattacctagaggacacacgatttcattttctgaatgtgaatactcttgactatttggtttgtggtatttcagtgatctgaagtttaatttgtgaatttttaatatgtgatttacatggatcctgcattttgttactatcttgagatcgttttcatatcagatttagttaaaacggttgtgttcattcagaagaaaaactatctgatcttaattattaattgggttcctgtgctgttaatatttccaaaggaacaagttgttttatttcgtccacttatttagtattgatttgctcttattttttatggatgttgtaggaggctccatgataattattttaatggtagtatttgttgacaaagaatttatatgtagaatactttaaggatactttagagtgaaggcttcaatgtctactcttcttcagttattttcttacttattcagattgactacattcgatattgatcctccaacgattttgtgttctgcttagagggtcagtatttaatccacttgtttcttacattatttacatctctgttgttatgaccgggttttcctgtgctttaggtgatgaatttacttatgtttgtcaccatgctcgactttaaagggtaaatttgtccttgtgcaattagtgtcaatgacggattaaagacaaagacaactgttatgatttttttctattcctttttgtgcaactctagataaaatattcagaagataatgatttactttgtcaggatctttcaccttttatacgtgttgattgctatagaaaattaggcaatatctggttggttggcatagattttttcattcatttgctatttggcatgtatggatttcattagcaaatattcaaattcagctgggtcaataaatgataggtttctgtacgtattaaattaatttcaagtagtttctgtaacaacctcatgttatcaagtgtagaaatttgttctacatcacaagttcacaacattttcaaagtttgatgttggtcatttaaaattgttggactgggacctagctcatcaatcactcaactgttgtatgtgtataaagaataaagagattttgtagaggactcttatgtgcaaatagatttcaagttaataaaactataatggaagaatcaattattattagaccatatgctactaggcaaacatcatacttagcataacgtattaaatgtgattatgtgagaaaaaaaaagattctacccaaactagtcgaaaatatttgacattggactgagtagtaaaagaaccatagcctagttgggcctggatataagcaatggttagttttttctgtatatttatttggtgatactgagatgttatacgtactgtggattaaaaaggagggccaatgacatctttggtttctgtttcttgttgctattattggtagtgatctttcccattcagctaaaacttgttttctttcgcctgcaatttagaccccgagttgccatgttacagtgctaaaatttgaagtgtcaaaatacatttggtttattgatttcaggtaagcgacagtgatgaagaagctcttgatgaagttgatgatgatgcagaggatgaacatgaaaatgactctgaagcaccactgcaagctgaacctgttcagaatccttctggagctcctttgcctcctaaagaatcagaaaggcagctttctaagaaagaactgaagaaaaaggagcttgaagaacttgaagctgttcttgcagagttaggatgcagtactataagtgagactggtggccaagatgatgcccatggtaattttctttgttttttggctaagtagtcagttggctagctgttattagtagttatgttttttccttccaaatttaagtatatatttccattagaggataatttcatatgattgaatttgactgccaaatttggacatcgagtggttttgcttcagtccagtttgtttccaaattcttcttagaagtgttctagccaatagtttattttgaaattgatttaatacaaacacatatatgtgtgtatatataaatacctttagtggtttcaccacaatatgaaaaggttcaaagttttgaaagcggcaatgattctttagaatgcatttttaggggttttcattaaatttagacttttctatcactttgatttttgaattggtcaacattcttctgcatgtttaatttatctgtggtctatattttgcttctgatcttctttttcatacataggtgctgcacgagagaagaaagaagagaacctcaatggggaagtggacaagaaggaaaatgctggggagagcaagtctgcgagaaagaagaaaaagaaggataaattgaaagagacaagagaatctcaggaccagcccgacggatctgacgtaggaaatgttgcagatgaaactgttgaggctgagaaggcggaagatttatctgctgttgatgtcaaggagaggctaaagaaagtgacgtccatgaagaagaagaaatcgagcaaagagatggatgctgctgcccgagctgctgcaagtgaagctgctgccagaaatgctaagcttgccgctgcaaaaaagaaagagaagaaccactacaatcaacagccagttcggtaagctggccagttttgttctttttctttcctttttatatatgagcatgtactttttgttcatttgttgaacctaaaataagcatttaggaactggttttgcgaacttgaatgtccacaagaaattgttttacttgaaagggaaaaatgagaaaatgtttttatatatctcgttgtcttctgcacatcgtacaggctctttcctgagcacattaagagctctcgttctttctttctttctttttccgggatttgaataaataaccacgactttgaaaatctgaaatgcatgcttatgtgatagctcattaatgttctttttaaatcttaaaaccttagaggttttgatggttttgaagagaatggccaccataacatatgttggtgtgctgaacttttggaagtgatactgccaagtgtgtataatttcattattcattatgccaattgaattgaagggattgggcaagttcaccttagttctcgtatttgttgaccatgatctttctgtccactgaactactctagaaagcaggtttcaggtttggtatataatatgttcatgcgaaggtacgaaatggttggctgataaatctctttgatgaaatcttgatatgagtagttaattcattaatttgataaatctcgttatgttttggtaaatcgttggcttataaatcttgatatgagtagttaattcattaatcaaaggctaaacgaagcagttggagatcatgaatgttgacactatccaacaaattttcaccaaacaggacttatataaagtcgttgtgtttggcctaagccaattatctttgcatgtcaaagatatttggctcttcatcgtctacaaatgcaaaacttaggggtgattctcctccatggctccttcatgggttcaagagctccattttccccaactcaacatacccattaccattaatcacatctccccagtacttcctgcaggtcctatcccagtcactcctggtcaaaccctatacctctctaatcttgatgacatgattggatctcgtgtttttactccaacagtctacttctacccatcagatcacaacaagccagtaatgcagaccctatataatgctctttctagtgtcctagtcccctattatcctttgtctggtagactccgagagacagaaaatggaaaactagaagttttttttggaccaaaacaaggcgctctcatggttgaagctcgctctgaaatggccttagctcaattaggtgacctcacggtaccgaacccagcatggacaccactgatctttcgatttccaaacgaagatccttacaaagttctagacatgcctttggtgatagctcaggtaactttgtttagttgtggaggatttagtattggtttgagactatgtcattgcctttgtgatggtcttggagccatgcaatttataaactcatgggctgaaactgcaaaaacagggaaactagtcacaaatcctaagccatgttgggatagagagttcttcaaaccacgtaaaccacctctaatcaaataccctcatgtagagtttatgagaatcgatgatggttcgagtctcaccacgaccatatctcgagataagacgattcaaaagtgttatagaatcagccatgattttcaatctcgactcaaaatattagctcaagagagctcactatgttctaccttcgatgccatggcagctcatatttggagatcttgggttaaagcattggatgtaagaccaacaaattacgagctgaggttgacattttcagtcaatgcacgacctaagctaaagaaccctccactgaaagaaggtttttatggcaatgttgtctgtgtagcttgtgccacaagtactgtttcaaagcttgtcacaggtaattttgctgaaacagtgcgttcaataggtgaggctcgacgggggatctcagaagagtatttgaggtctactgttgactatgtcgaggtaaaacgaccaagaaggttagaatttggtggaaagttaactgtaactcaatggacacgattttcactttatgagtctgcagattttggatggggtaggccaatatatgctggtcctattgatttaactcccacaccccaagtttgtgttcttttgcctgaaggtgaggcaaatcttattggcagtagtggttgtggtggtgcaatgattgtatgtatttgcttaccagaatatgctatcgataaatttactaaacttttaagtacggaaaatatttgaaagttaaaatgttgtaagagtttgttcgattgaaaataagcaatatgacaaaattgaggcaatcttatataaaaaaaactagtagaaattgtccataaattttgtattaatctttgatttagtaatactgttttttgagtacttcactacatcattgctatggtatggtgcattttctttcgactcagaggattatagattaaatactgtttgttattaataacaggtcaaagtatctttcattaaaatttattaatttaagagcatatataatcacttttatcgggcaaaaaaaatcttaagatgagctctttgtcttcactcatactaatttctgaactaatttctatttgattttttttaattaaatttataggaagctcaatgagtgagtacaactaaaaaacgcataatataaatataaaattatagggacacgattttgtcccgtgatgtactttcatggatgtatttcatactacattagatgagtctcagggtacattagatgggtctcaagtatgtcaccatttttaactccaattacccctagatcaaccccagtcctcagatcaaattacgcccccatctaatagttgtcgtacatcacggaatacattccgtgaaagcacattacgggacaaaatcgtatccctaaatatataatactattgcaaaaataatgtaaaaaataaaatttttatttatatatataagaaaaactttaaatctgtaatatgaaattgtaatattttttatttcttcttttggatagttattgaaaaaatccctcaattatgtagtatgtactgtgttatgggcccactctaggcatagacaggttaagtctgtgcttagggtccactcattttagagacctaaataaaaatactttttaaaaaatatacatatattttaataattttaaaatatcatttatctttatgtaaaaggtctaaaaaagttttttgccttatgattcatttcaactcaggaccggtctaaccgtgctcaatgctcattgcttaaaccatttctcacactagtagaatttcggactccacactaaagtttatgtgagatgtggtctagctttttggacccacttttttccagcaaccaccaccatgataagacaaatcctctttttattaatttttttgaataatgatatg

SEQ ID NO: 185187 - DNA, 5649 bp, Cannabis indica
aaactaagaaaggaaaaagggtttgttaaaaggtcaaccaggttgagttgagcttggatgatacgtgaagaagcttgagttgtccatcttgaagtttctcccaaaaatgtgacaatccatctccatgtgcttcgttcgttcatgaaacacaaggttttcatatgtatgaatggttgcagtgttgtcactgtatagagtagtgggtagtccatgagaaatggggtagtccttcagtagggcaatgagtcaagtaacttcacaagtagtgttagccagagccctgtattctgcctctatcgaggatcgggacacattataggttgtttctttgatttccaagatataagaaagtctcctaggaagatgcagtagctcgtgactgatctacgaatgtccacacatgtacctcaatcagcatcggagaatactttgagtgagatgttgttatcagacaagctagaaggggcataggcaatgagttgtgatggtgtcttggagtagaaaaataagccttggcttggagtaactttaatgtattttagtactctatgagctgcaaggagatgaggctttcgagggacagtcatgaactgactgagtttattaacaacaaaggaaagatcaggcctagtatagtaaggtagattaattttcctatgatgcttctgtaagtggtaggatcagggaggatatcacatgaatacttgttgagtttgttgttaggctccattagtggaagtagatttagcaccccaagaatcttgtgtctgtcaatagtttcaaggcaaaaggtcattcagagactgaaatgccactggtagaccaagcaatttcaaggcgaagaaaaaatttaaggcggccaaggtcttttaattagagcatagaattgaggtgctatttaaagttgacaacaaatttataattgttagtggaaatgactatgccatcaacatagattaagacaacaagaaatacattgttctggtttttgatagacactgaattatcagaataagaccgtttgaaaccaaattacaaaagtgttgagttgagtttggtaaaccattgggaagaggcttgtttcaagtcatataagcttttttttttgagtttccaaacaacattatgggggataggcgcttgtgatttgtacccttgaggcagggtcatgtctacattttcatgcaaatccccatggagaaaagtattattgatatctatttggtgaagaggcgtttttaattatagctagggctaaaagtactttgagagtgttgatttagccactggagcaaaggtgtcaagaaaattaatagcttgttttttggaataccccttagttactaggcgtgctttaaagcgaacaattatgccatcagcaccatatttgtgtttataaacccatttattttctatggtgtgttggctaggggcagaagaacaacctcccacttgtgttgttgctccacggctgttagttcactgtccatggcattgagctattacttgtacttggaagctttcttatagctagttggttcgctgacattgtaagctccaagaatgacagcacaaaattggtcatataccctgccataagacaagaaagaatgaatagaatgagaaatggaacaagcataatctttaaggagggaaggtttgttgatgaccctgccagatttggagattttgaacaaaactagcaaagttggtgatgaggtctcaataggagtggcagaagtgggtatgtgatccacattagaggtagttgggattgcaggaataataattggatttggatttgcagaagtagtatcattagctgtgcgagtagtgccatctgaaggaaaagaagaaagggttgcatattgtgtcgaaagacctatttttggagcaaagactcaataaattgattagttataagtgaattttttttaatggaaagatattttcatgaaagaccacattttgggaatgaaaaattatgtttgttttaatatctaagagtgtataggccttcattccattataatagcctaggaaaatgcaaggtgaagcccaatgagagaacttgtgccttgatagtaataaggttgaggtataagctaggcaactaaatacccttaagtgtgcatagtttggtggtgttttttaagtagttcaaagggagttttgagctataatagtcgatatgggtagttgatgagatgaactgcaatatgtataatacaggtccagtatacaaggttaagatgagattgaaatagaaaggcccttgcaatatttagaatatgctgatattttctttcaactacaacattttgctcaggttaacctacacaataatagttaacttgaatgcctttggatgcacaaaagatagacatgcttagttcttttacataatcacattggatggccttaatggcagtatggtattgtgtggccacataagtgtgaaattaaggaatgatgtgagcaatattatatattttttaaaaataaatccaaacgtgtttagagtgatcattaacaattgttaagaagcattggtaaccctcaatgctcatactgtgaaaaggttctcaaatatcaaggtggattaaataaaaacaatgagcagacatactattggatgaggaaaactgcaaatatttttgttttaccaatgaacatagttgacaaaagtgagaatgagatttataactgaaaaaagaaatttctttattcattttttgtgtaatcttcttagtagggttccaagacgatcatgccaaagattattacaagaattatcatacaaaatagaaaagtagattgagtatgaggcagaaagtataggttatgaagccgtttaggaatcccaatcctggaaatctgattgtgtgcatggagaaaacaggcattgttagtaagcaaaggtgttagtaataatatgttcaactgaaatttaggaatgaatataacattctgaagagtgatgtgtggattaatttggacattctcagtgttagttacatgaatttaatctccatttggtaaggtaacattatgaatgaacggtttattagaaaaagattgaaaaaaattgattattgtagacatggtgtgtagcaccattgtccacaatccaagatggcgaatggatgttaccagagaggttggacaccaatagtctcatttcagattgtgttgattgtttgagaaacttactaagaatactgatcagttcttaaacttgatttgtagtcaaggatgagagaataggagttggagatgaagtggatgtagaactattgactgcgggtttgggtttggaggaatcttcagatttcttcttactgccatatccaaaggaaatccatggagaaaatagaataacctagttttttgcagttggaacaagtaggttgtggtttcttggcttttggagcatatggatgagaggtggaggttgcagcaatgacgagattgagtccaagacctcattgatgctcttcttgagcaatcatgaaaaagacattggaaagatgaggaatgggattattgagcaagatttgagctcaaacctggacatacgactcattgagtcccatctagaattggagaatctgatcgagattgtaacattcttgcattttcttcatagcaccatagatacaaccatagatgcaaggataaaaggattagaactcatgaagttcatcccaaatagctttgagatgagtgaagtatgaggtgacattggaatcgcctcgtttgagattggagagagagatttggagctcaaggatccttgtgccactatcttgattgaacttctcatgaagttcattccacatattaatagtcttatcttagaacataatacttttagcaatatcaggggaagcatattggagaatccaaacatgaccatgttgttacaagtattaagaactaagatttggatcagtaggaggaggtcgaggtaatgtactgttaatgaatcgtgtttttttctttgatgcaattgagatagatacagcacgcttcctagaaaggaagtttttcttgtcaatgagaggtgttggaatgatgagataagttagtttattgccattgttaagatgataggggctttcgtgatcgagaggttgagatccttcgattgaggcataatgaggttgattagcatcgaatttgaatccaggtcaatgcaaattctgagaaccaacaccatggccattattttcaatgacaaaagcttgcaaaggaggactactcgtttaagcaggatgttgcatgacatggccatgatgcattgccaagaatgttggtggagctgggggtaggttgttggctagagctatggatagatcaacagttggacaaggatttgtgaagaagaagaaccaaaagacaaagtgtgcgcatgaacagagattgagcgaaagatctattttacttctgatacgataattgaagaacgaatcgactctaattctgatgaattgtaataatgttatagagaaagagaaggaaatccatttatatacacactcatcctctcaaactagctaagttaggagtaattaactaactaaccaaaactaacaccttgtaactgactaactaaccaaactgacaccacaatttagttctaataccctttaaatttttaagtccactaaaaataattctcaaactattcacattgttgtaaattagtccttttgtgaatttttgtcacacatgaaaacacaatgatgacattgttgtttagactattgtcacgtcaacaccacatgtgtcattttaaataaaaaatatttgtttatttttttttagaaaaaaaaatcattaaacaaaaattaattaatgattaacaaaaaaaataagtaaaattaaggtggtattatggattttccaacacgcaagtatacatattatttacaagtaatagacttacaagagtgaggtcgatcccataagaattgtagttaattaccgaacaattaaatttctaattcatctatcattccaagagacttcttctagatgataaggttagacttcagggaatgcccttccaaaagacatcaaactttccataaccaaaataatttttagagatttttatttagatgaactatatcatataaataaaaaaatattaagaagcatgattaagtattaagaaaaacctaaatgtaatttaatgtggtcttaaggtcctattcataatcttcaagcttggccctcctctttaattattttagaaacctaaattatgctcatcattatgaactccaatttacattttctaactttaaaaatttgaggataaattaatcacaactctcatgttactatccatcagatcatagaaaattaaaaatatatctttgttaaataattcccttgtaagctcagttgtcttcaaatagaaattacaactttgcatgtaggccaataccagtatagactcttaaactcaagaactcaactactttgagttacaacaaatactagaaaatagtttcaacgagaagaaggaaaaatacaaatcagcaatagaagacctaactactgtaactacatttccttcgtgagctattgctgtaggttgttgtagctattgttgtagctagagagagagagagagag

SEQ ID NO: 185188 - DNA, 3478 bp, Cannabis indica
tgaactaagttgtacttgttgtgtttgagtttttgcttgagagacttgtttatgctaaatctgattacatttcacacaaagcaacaactcacgtgtattttcaggctaagactttgaatgctttgtatcaattttatgagaccaaatatacagctcatgtgtttgcaaggcactctaaggcctaagctttatcatctcttgctatattttatattatacagaaaaaagctacaacaacaaaaggttattcaagaagaagaaacgaaaactcaacaaaaaaaaatgagcaaactctctaatgaattctttctaaaggaccaaaaaaaaatatataatatcaaatcacaatcaactaactattcctttttcggaccctattgtttgcagcctccttctgagaagaggaagaagaggatgaagacgacaagccagaccggctgttttccatgtctttcgaaaaagctttctgcagatcctctttcagctcaatgaagcgcgtcttcttcttagcctgctcctcgggtgtgcctttttctagaacatagacatcaggcatgtctatttcgtagtctaaaaagttatcaagaacttccgagcagtgtgggaagaatcgtcgacccttttccactgcaaaaacataccaacacattatgatttatgatcacaactatggaacactgaaacaaatttacatcaacttatcctgtttttggtgagaaattaaatgtcaagagtatgacaaaagtataaaagacaaagatattaacaaagagaagaagagaaggtaggttagttaggtggtacctgttttaatgagggcctgcaatcttgctctgagtcgtcttgtcctttcagcaggtctttcatttaaatcaacttcctttaagtttccatttgagcctcctgatcctgaaaggcttgttgtgtacattgaagttgagtgagcatctgccatctccatggctagcctggcttcagctgggaacagcagtcttgcaaatgccactgcaacatataataaaacactcttctctgttattaattaccatatacaattaatatcaactactgaggcctgatcggctgatctttaggccaacaaccaatgtcaggaaatcacctctattttcaaagtagacaagccttgcaaccaaatcatcaccaacaggctcagtttccattgacatgtttgctgctatagagcttcgtctcatctccctctctagaacatcgatgcatattcggtctttgttagattcctctcccctttttgtacgtccattacatgtgttttcatgataatcctttggcctagttaaccttctgcagattgtaacagcagtttgatcatcaggagtagtatctttgggagaggctcctcgatccaaaagcgctacaatcactgatggttccttgcgccttgcagccacatgaagcactgtaagtcctctgggatttcggagattgacatcagccaaatttagaccaagaacctccttcacaaccttaggatcacagtatgcaacagcatagtggagagcatatgcatcatcaagtgtaatatcagattccttaagaagaagctcaactaattcaacatcatcagagtccaaagctttgaggattctcccaactctcttgtcttgtaattgaaccgcattctccattgcagtatcttgttgttcttcatcatcatcatcatcaccaccctctttttgagcttttcgtcgcaataatttgatttcactagagacttcaagaggaagctctttctctaaaacaacatcatctagagatgactttgccactctctcaatggaatgtaagagcagctgcttcagctggcagtggtgagcagccacaagaattgggattacatcttctacataagctttctcgacgaagttcaaaagtcgacgctacatgaatttcatgaaaagctctattagattgaaatgtattataggcatatgaaatgtatagattgaacatcataatgagtattcgaacttccaaactctcactaactcttttagattgagttactttaagatagaaaattgagcagcgagcttaaggaccggtaccctatatgtattatacacaggtgggactttccattagagtctcttgccacagtaaataagttaaaatatttgacaagtagaaaatgaaaattgggaaacagagaaaatcagagaatagacaaaactagagaaatctatagtaaaaaagtagtatgaagtatgaagttagtacctgaacaagcaaaacaagctctttcatttggaaagtagcagaagcatacattaattccacagcataatttatagcagggggacaagcatcatgagcacagttttcatccacacaagttgaaatttcttctggtgaagccttaagctttccagttccagtatacaaatagttcaagaaaacatcaaaggcctcaactccaacctttccatatggaactaaatcagacatgagatatcttgattttccttccttgactgaatcaggattctttttcttgaaaagctcatgaaaaaactgactcctagaagccaatatacaccgatgaacactaaccggaacaccctccaccacaatttcagcatcagtatagtcaacaaattctttatcaatcaaaagcttctcaagactgctactgagtttgctcaaactcagattctcaagactttgcacaggttcagtattgactaatacattattgtgacaagtacttgaaccattggaaatataggaagaagaggcaaagctcaaggatgatgttagttcattcatgttctccatagcttcaatattagaatatatctctactcaacccaataatgaagtcatcatcctatttgattgagtcaatgaaagtttccatacattaaagacccccaaaaacaaaaacaaaaaaccacttagctaaaccatattacataataaactccctaaaaaacaatacaagttcagattttggtatcaacaggaaaaacccagttgttaaaacttcatgaaaaagctaaaaattcaatctttatttttctatagcaagacaaaggatctgccgttttgaggaatgattcaataaaatatgaataaggatttaaaaaaccctttgaggctgaaaagctagaagattcattatatgagaacaaagattcaaatgattgaagaacaaagattacatatgaagaacacagcttcagacccagaaaaaaacaaaaaaaaaaaacgaaaaatctgcaacaatacagaggatcagatacctatgatgacaaacctcagagttgacttaagaaaaaatcagtctttgagtttgagatgtttaggggttgaaggcgattcggtccaagaaaataagaaaatagattaaactttagagagaagaataatggggtttttttttgtttttttgttttttttttttatttttttgtgagagaatctatgaaaagaagca

SEQ ID NO: 185189 - DNA, 3274 bp, Cannabis indica
tgctttttaaattataaaggaatactaaagttgtgttctttcaagggataattctcaagtagtttgccaccaacaattgacttcgatatgaacaaatgaaaagatttgtgaatgaggttgacatgttgcacttgcaggcactcactcagaaatagaacaatgtgcattgtctaagaggacgctgccacgagcaaatttttcatcaaaagcaagtattgttgaaggcagtcccacaggttgttgattttcttgacccaaatgaaattgacatttgtttttcaagttcttgtagtgagttttgctttgctatttggaatgcagaggctgtgaaggagctctatgatcaaattatccaatccgtggctgttaaacgaacaatgtctccaaatgcttggttatggtctttgatagaaaattgtaaaaaccatgatgatgtcaagcttctttttgatgctttggagaacctccgaagatttgttagtttctatctttacagctttagagtgatctcaacttcatgtatttgataatgtagtatgaatttcattcttttgattgttctatgctttggttttggtggcagagaatgtcgaatcttagaattcctgataattttaattctaatctctgccgagaagttaccaagacatgtgcacgtgtaggggccctcgacttcggtaagccattcaaatgtgtttccaaaaatgttttctcttagttatctgattttacaaaatttatatagttagacggattttcttgcattttggtgctacacttttttttaataagtgggttctgctggatgtatgtccattaaaatgatttattttatattttcaggtaagagagccttgcggaagcataatgtacatggattaactcctagtattggatctgcccaccagttactggtgatgcatttaacttttctatgttggttttgacatttgactagttgctttgctagtctagcttctggcatttgtatttacagatgctttgctgtaatatgactgtagttgtatgccaaggagaacaatgatgctaaacttatggtcgaaataatggaacttctagagaagaatgacttaccattacaacctggtacagcagatattgttttcgggtaagcaggatagtctatacccttatataaaagttaaaaagagtttattcataagtgtttacagtagttgtgcaaaatacgcatctttgagtgaaatttaaattagctgaaccttgataatagtcttttttgtaaatttctctttggtctgtaaactattatcctcttggagtgctgaatccaatacatcattgatataggtttaaaccctcatttctcctggatttgtatgtatagttgcatgtgagcatgtctataagtatattatactttgttttttcaacaagaatatgtatctacatcttaacctgtgttggtactgatttccaagtcctgtcagattcaagatctgtttctaaatactttactggctactgccattgtactattcaatgttctgttttcctcaaaatgctttaacgaggttctctttatgatattattttgaatttgaattaaactgttgctttgcagcatttgttacaacactgataattggtcattgatgaccaaatattcaaaaaagtttatcaaggcaggagtcaagctacgacaaacctcttttgatgtgttgatggagtttgcttctaaaataggtcaccctgaaccctcttttgctatgttatttctgatatatctacttaccatttctttagctatcttattgtttttgttttgaagtttttcaactgtctccgtttgtaggagatgttgaatcactacggataattgagaagtcgagatctgagtctatgaagaatcatactctttcaaccggattttcatgcgctaaggtaacttgcatgttcatagtgacatttaagaattaactgttttgaaatgtgagatggagtgaaaggcacttcctaagaagtagtaaattatatataaaatagttgctttaaaagtttatacactctaaaaaaacagtttatacagtctatcaagtttaaagatttacaaataaatagtaaaataataattctgatgtctgtccatgtgatatttgtgttttcaggggtgtcttttagaacacaagccggaggctgctgctaccatcattcaagtcctaaaccaggtgaggtgttcactaatgagaagctgacaatgaagctaacctttttgcttaaatgaagcaagtttcctctactttctttaagaaaacataacattaatatgcgtatacttgacagttgtggactaatatcatcattcgtaagagactgtacaattactaattgttgacaccgatttatgtaatccaggatctaccagaggcaaaaaagtcaagtatcatggttgaactacaaaaactggtaagtgagtggcccgtggaggttatcaagcgccaaaaggaagagaccaagaaggtagctagttatgtttgagttctgaaaatctttcaaatgattatatgatagtgtgtttccgaacataagcctgattaaccaaacataatgttgttttctgattctcaggaattagctgcgtctttgcaaactgatattcctgccatgatcaatgcgctcattaacatgggtttagaagctagtgtaaacatggaagacctcactggcaaagaaggtattcctagttaaagctcctgaggcagatcatgattaaagctctcttcattggtcatccatagaagaaacatgcactaaaggtgtaccatcccccatcagagccccttcggagcataagaaatttttctttattactcttttggataaaatacattccattcatcaaattttggtttttgtcttctaatttttgatacgtttacaatgtacaaatctgcatgtagaatggagggattaatggggggtataataatagaccctaattgtcattttggttggtttgccatttaaacgtgaactgaaatgaagattgattcgggattaagctaaaagatgaaagctatttcttgtttgtaacatgtcattaatgaacatatgtatatgcatggtaagctctctttctccccattctcttatttgagtaaaattaaggtatcttgatggtattatgtctcattatttcaaaaaaaaaaaatgaaactaagatctccacctctacaatttagggatgaggatagcataataattgctatgtaggtatccaaaagggactcgaact

SEQ ID NO: 185190 - DNA, 11588 bp, Cannabis indica
aaaagagattgaaaataagatcatttcagctaatctcaaggtggtcagttataaagtaagtcaaatacggaaaaaccctccaatgccatatataacagcaacgcttcagcaggatgctgctaataaattgggtttttcatcaacatacactatgaaggtttgggagagtttatcttaacaatttgcaattctacatttttactactgtaccttgttaggttggttttttctgtcgcattaacattattttcccatttggtgcagtaagcagatgattattggcggtaatattatgtgttttgctaaaagaaattactaattgtcaatgcagcttgcacagaaactttatgagggggttcagttatctgatggcaaagcagcaggtctgataacgtatactaggacagatggactacacgtatgtatgactatggttaccggaatattttcccggatttgatgtttaatggaactgttttgaaggacaatatcattctttttctttctgatacttgttatgtattttagatttctgatgaagctgccaaggacatacactctttggtaactgaaaggtgatgcaaagaaataaccattttttgatttaaataattatttgagctggttatatggaaatactgcttctgctgaaatttagaccaagttttgtactactgtttgctgctaattaaaggtttagtgcaaattatacattacatgtcattaaaattctatatattttaaagctaagagaacttatttcgagtcatataattatgagtatgtattttaaagctaagagaactactttcgagtcctatgattatgaggatggcattggtagctggttgtataaagtgagttgttccaatagaggcctctgtcctaattttaaagatagccagatggaggggcgggggttaggatagatgtatgttatatctaagagaattcatatgaactcaattgagggtgcgtttataatggtttgcagttggctggaggggtggtgattaggatagagatgtatgttaaactaagagaattcatattaagtcatatcagggtgagcttaagttggtttgcagttgactaaagaatttaagaggtaacaatagaagtgcactaattctagaggtagacacatgctaacttatctcttctaagaattatttacttgtatgcttgtcatttgtgcaccttgacatttgttgaaatgcagatatgtatgcttatccttaaatcctttttctttaattagtttattctaaagaaaagatccttttctgcagatatgggccgggttttgcatcagtaggtgctcagaaatattttaagaaagtgaagaatgctcaagaggctcatgaagccattagacctactgatatttcaagattgccatgtaagtatatacattatagggtgcttactatctgtttatttttttcttgatcgatttccttcgcttaaattgttttatatcaacttgtagcaacacttcgaggaacacttgatgaaaattccttgaagctgtatactcttatctggtgccgaacgatggcatgtcaaatggaacctgctaccattaagcaggttggctcaagaatctccttactattacttctatatgtggaaaataaaatatagctattctagtttgaaaatgcctcaagagctgtagtgacctaggcaattttatcattcttgtagataactttatttattttttttgtttgtttgttgttcttcctgtcaagtagtgtgtgtaaaaattaacgatatgcttttttttttttttgaaaccagatacaacttgatattggaaatgctgatgagctcattattttccgatctgcaagctcaaaggttgattttcttggatatcaagcagttttcaaggtaccagtagtcattttcttctcttgcctgtttcatatgtgcctctatgtccttaccagatgtaatcatgctcatcaccattctttcctgtatttttttgaagttactgacgctgtgtgttttctttttccatgttctaaaaaataaacctaaaccatgatatgttaatttgatcaattcgactttgtttcacaccacttgtattctgttataaccttttaaatagaaacttgagagaaaacaggccaaaacaagaataaaaattaacgtacgggtgtataaaatacacactcatcgtcatcctttattggtaatttgaggatattaattagaaaattttacatgttcaaattgacgaaaattattctttttatcgaggggttatatagttgagagctaggagaggcatttggcatttttttttccctgaattgaattgcttgtgttggtagtgttcagttgcaattatccacgacggattctgtaatttgttgatctgttttattttaggacatggaagctgcagaagccagatataaagaaaatgaaggaattgatcacagtgaaatatttgcaactcttgattcattgaaggtaacaagatcagttacttttccagtacattttgtcatgtttcctatttttaagtgatcccatatactagggataggcaattttgatgttactaagaaggtaaattaccattggtttctaaattaatcctcagacctcagtgtgcttagtttaaattagtgtttcaatgcatgaatttgctaaagcttctaatttttctttttttgtagtctggagatccattatatttgcttgcagtggagctcaagcagcatcatacccagcctcctttgcgctactccgaggggtcactggttggaatttgtagtatttccttttactgttagcattatggatgctggctatatattttggaaacaggaagttggacattatatagataatagaacatttgtacttttccattcatcacagctccttttgttgcaatttccagattaagaaaatggaggagcttgggataggaaggccttcaacttatgcatctactttgaaagttttacaggtaatgatgatctgcaagtaatggaaactttaatctttagtttgtcttgtagatttgaattcattttggaattatgtggtacttgtgtatgcagaagtaaaacatgcattcattgacaaagcttgatttaacaatggacttttgtttaattttgtcttgttggctaatccaagctcaaacttaatgaagtttatgacaagcactcaccaataggttaaatggggaattgatagaataaaggtagtatagaagtacatgggtaattgtagtaatgggcagcagaagctctatgagaggatattatatctatatatatattttgtatgagggctgctttagggagacttttaggctggggtgttaagtttacggattggtttgattcggatttttttttctttcgaacgaaactagtatatcagttttttgaacatagaaaacaaaacaacattcccaaatttaacatagagtaacaaagttttccactagaacaattagcgattgatgagtgattaaaggtctagagcacaagtttgactttaagtatgccattagttgcataaccttttccgatagaaataccagtcttagtaatggtgtacatatcagcccgagtagtttgagtgaacccaatcttattaagcaaaaaactagaaactagattttttttatcatttcaggattatgcattacatatttcagtaacaagatctttcctgaggtaatcttaagttccagcaacaatagtggtatgactcccccaacaacacttttttatcatcagcaacattgtatgtttgagcatagcacgatcatagcaaacatgacttgaagcattagtgtctacccaccactcatccaatccactaacaagattgatctcaaaaatcatagccgtaaaaggctcttcagtcaggttagcctgcgaagtagacttagcttgtgttcttacacttgcgtgttgtatgacctggtttgttacaattgtaatacaaaaactggccataatcattatgtttggttgtggctgccgcattccatattggtttcttgtgttgttccaattctgattattattttgaggagtgtggttgttgttgtggttgagatttgaattcgatttgcgattctaattcttaacgtttttactattaggcttcagaactgtaggagtggacttattggtgttgttgtttgaagcagcaagcacctcttcttctagtcttgtttttgtccctcctaggtgccaaggcaggtgatcagactttctaaggaatattccttaagtcttatgcctgagaatatttttaaaatctttctagggaggggtagtttttccattattatagataaaatatgataaagaggagactagaacaaaaaaaatatgttgtcagtcaatatctgaaattccaaatgattgttgacaaatgtgtggaggcctagtatcacgagctgcaacaacaattttaagacatttctctgctctgttcgagatgagcaagacaatctatgaactacgccgtcctcatgataaaacaacctagttctctttttccgtatccttttgcaccaaaggaaaccgttcacttaccccaaatataattgctcaaaagaaaaaaaaatgattagaaagagtgtttgatttgaaatgattagaattgggacgttttatcttgaggatgacgtggttaatagattgtttttacaaatctcaggcacagccaaaaatgttttaaaattgttgttgcagctcatgagagctgactatcacagattagtcattaatcatttggaatttcagatattgactaacaacatatttctttgttccagctttctctgtatcatatttcttctataatgattgaaaaactatccttttcctggaaagattttaagaatatcattcgccttcacattgaggaggatgcacaaaaacaagagtagaaagaagaggtgatcattgcaaccccaaaaagtcaactcttgtagttctgaagtgtaatggcaaaaactttaagaatcagaactgcaatttaagttcgaatcccaactgcaacaacaatcacactcgaaataataatcagaattggaatcaccatggaaggcagtggccacatcccaaacaaaatgatccacgacagattttgtgttgcaattgtaacaaactaggtcatatggcatgtaattgtaagaacaagtgaaactctgcttcacaagctaacctaactgaagagccttttacaattatgatttctaaagatcaaccttgttggtggataaaatgggtggtgggtatacattggtgcttcacgtcgtgtttgctatgatcgtgttatgttcaaaacatacaatgttgctcatgataagaaagtgttgttggaagaccacaccactattgttgttgggattagaaatgtggaacttaagtttacctcatgaaagaccttgttattgaaatatgttatgcatactcctgagatgagaaaaattatgtttttggttttttgcttaataagattgggtttactcaaactattggggttaatgtgtacaccgtcactaataatggtatttttgctgggaagggttatgtaattgatgacatgcttaaattcaattgtcatcatacctgctcaggtgtttttgctatatcaaacttccattggattaagatttggaaaagtctaatgcctttgaaggtgatggtttccactcgacttttgtgtttggaaaactagatgttcattcatctcttttaaaaaaggagaccatactttgtgctgtctccaaggtggagtgtcaattgtaagaagagtgggtaaggcagtactcttctttgttaactgctctttttctccgagtttgtggtatagacttctcaaggaacttcaactttcaccaatgcatcccatacaacagtacaagattggggtggtggctacttggtgggcaatatggttagaaagtatatatctttgggaggaggtcagtcaaagacatatgacctctctgtctctttttcgagagtaccttcaaaggaattgaaggtgatgcagttcggctgtgggacagaattaaacactgggtggtaatatggctgtttaatgctagggagttttctgatttaagtatacattggcatccctttatgtgtgtttcttttattgtttccagtaggatctttttcctacttttgcttgcattttacttttcattacatgttgaagttttgttttaaacaaaaaattatattaaacaacaattatgaaatctgcttaatttctattcctccctcaatttctgtttgtttctacctattgttttggctattgaattgaggatccttatttgggtctatcagtttattcttttgctggagtgggcttcttaattgatctgacaacacacatttttatttctttgcccccattttgcccatttgtaaagctgaatattagctttgttcataagcttccctcatgttaactttgttcataagatcataacctttttctttagtgatacagaagtttgacttctaatttaatggcggtaccaggataggaactatgtgaaagtgaaaaaccgtattctacatccagaatttcgaggtcgcatggtatgttttgcatgtttttttatctactgctctatcaatcatcttttaaggagtgaaacccagaaatttgcgaaaacactacaaacgtttgttaccgtgatatgtttttggacaatcatgtctaatgatgtgatatacaggctgttgattttgtttttaaacaaagtaaaatttaaagtattgttatttcaatttctaacgaaaagtagttgattttcttcatataatatgtaaacaagtcttatgtgctagttcactattctcttgatatcttttgtcatcagctctctcagttgcttaatgttacatttttttttgttaccataatttaatctttcaatttgaagtgtagactctttttctattttttttatctgtggtatattttatttttaggtttcagcatttcttagtcaccatttttctgaggttactgactacagttttactgctgatatggagactgaggtacttgtcctgttatgagctcacaaattttttgcttttggagtacttttggctacatgatgatgatgatcttctgcataacctcacttatcattattgtgaacttgttattgaagattttagaatgaaataatcttctcttatttcggactgaatgaagagacatataaaagttaaataggttaaataggagcagaaaagcaattatttagtatttcttcgagttttctctgtataacttaggaaataaggatgctaaagtttcctccccaacccaaatgtgttctcaaaatcttatgttctctctttttccattgtctattttgaaagtgatcaacttgagatatactcataacatgaggccatgccttcccaccggcttctataagtcttattgcgctatccattttagtataccacaaagaattcttttccatagggaacctcactatttcacgagtaacgatttgtttctcaacaataactttccaatggccatgcttccactcttgggataacacactttttcccaagcaaatccagtactatataattatcttttggagaaaaccgtactgagtttgaagagagcaagctaatcatctatcttatgtggttagtcatttgttgtcttttgcttcagcttgataatgtttcagctggtttaactgaatggaaaggtctcttgggagactattggacacgattcagctcttattgtgaaagcacagctaaggttcatatccatcaggtatttttatgttttcttaattgttaactgttagtatattttcttatggatttcctgcaacacatttactggtttaaatttttcaggtggagaagatgttggagaagaaatttggggattttttgtttgcttctttactagacaatagcaagacttgtccaaggtatgattggaatcttattagtagaaaatggttttaaattgctgttatatcttgatccaaggaatgtgtatgtagaaactggcaataaaattatcatttacatgctcactttgcatcaacaatgtctttcattggacattgatagctacaatgggattccagcacctttttccattgatgctgcctattccatatgagattctaaaactgaatgatcattgcttggctaaccaattccatggaagcttagattggtcacatttatcttttttattctacgaccaaagacgtatgggaaactgctcaagattctctagacttgatgaggtatgtcgtcaaatctttggcaagaaacctttgcctgatagcatttgtaaaagtatgactcgaagaaagtcacaagagagtgaagaaagcacataagttgaccattctactttggtgtacgccggcctgaaacctttgatgagcatcatctcgttgagaatggccctgggtgatcattgcaaggaggggtttgtacaaaggaaacatgtttgagattatggcgaggcaactgtctaaaagctcaaacccaaaagaaggttgtgccaatttgagggcacaattttttacttctatattttgagctaacttcatagtcctttatccctttttcagcccaagtacttaatttcggcccctgtgtcttccttaagtccattgtgagaaatgaaatgaaattgagataagttatttatgcttaacttttcatatcagattacacacttattcataagccattctacctagatttaaggaacctaactagtcacctctttagaataagaaaatacaaattataactatacataaccaagacatctgtatctcttttaagagatatttttttcaatattccaacaaatgtgcattcctacacttgattctacgtgttatttaacaaagaagcaagagtctcaaattgccgatcgagtgtaatctttagcagtgcccttcttgcttcatagacatgaattcctcatacatgatggcttttcggtaactactatatgatttgtgaccttagttcgtcctcttaatcatttctcatagtactgcaaccgagcacgttcccatccaagcttatgatcattgtctccaacttctcatttatcaagcagtgaacagcaaaaaatactgtttttccttcaaaatccacccttcagatttcttgtcatcgttgtaggaaagctttcatgtttctgcgtgccccgtgaagctccaacaccttgctagtcaactcgtccggtagtgcctttttcgttgttaacaaagacactacttcttagtgtagcttaaggtcatgatttcttgctttccagaagcaaacaaactgatctatcgtgctcaccaaggcttgcaatacttttctccatagtcggtaacttctaaatttcatccttcaaaccaaatataatcttggaccaagtccaaaaaatcctccatgatatccaccttagccttcataggccatgttttgttcctatagatggtgctattggtacacattagtaagcatgataattagggaataagagggtggctttattctaattgagaaccacacaaacacctctaggaaatccgagaaacctgcttttgatactagagctaatgctcaatacaaataagattggacatgcaccaactcttacacatcctatttcctgaaattcttcacccttagagattgcctcagcctagcataggtgtgctgtactggaggtctattagatgcttatttattattatttaaaaaagaaaattaattagtctatttcatgcctttgtttctcagctgtattgagggctcattggctttcaaagtgagtcggtttggtgcaggatacttcattggctgcgatcaacacccaaaatgcaagtaagtttggaccattttgtactgtcttatactaagtagtttctgctcctttgtgtgcataggtttgggggcatgtattcaacggtcagacgaagcaagtagttatttatagaatttaattagttaagcaatttaatattttaattattccaataaactcttggagtaaggtacattgctaagacattatattgtcaagacgacgacgaagaggaaaaatctcaaagcaacttcattatagaagagccaaagttgttaggacttgatccaacttcccaagaaaaggtaaaattctaatatctatatcaggaaatatatagtctttgcctgaatatgttaatgcatgagttgacataacacaatctttctgcagattcttttgaagaccggtccttacggattttatgtacagcttggtgaagataggaaaggcttctcgccgaaaagagcttccctttcccatgtatgttaaatagtgtcttacctggaatttctatgtatttgatttgattctggcttaataccctttttcagattaaggatgttcaatctgttaaagttgaatatgctctcgagttgcttcgctatccagtgacactggttagtttttcgttctcctaagcatggtggtcctgttttatgtttagtgtctctgtgcatctttaaattttcttattctcaaactagggctcccatccagacgatgaacaaccggtgaagttaaaattaacaaaggatggaccagttgttcatcataaaagcagttacgttacagttcctaaggtatatttccattcattagttttctcttgaattgcatttcttcttacattttctaagctttttataccgagttggatgtgttggcggtgacatgagatacatgtgcagaatgtgaaactaaacgaagtcgacttagagaaagcattgaagtatttaaaaggtaaacaagtaagacatattggtcgtcctcggaagaccaaaccgaaggtcgaagcaaccgttgaggcgctctagtcattgtggtgagttgcatagggaggaaagcaaagcacaagcttttctaatacttatgactaattatttccacaaatgcagtggtgggactaagcttgtaaggctacttattttttgttgttgttgttggttgtgagtttactattctatacgagggaaataaattgctttagatgcttgacattctttttcacagctagaagaggtatagaacagaacaattcatttttaagtttatagatttatttatttatatatctttttgtccatgtggtttatttattaaggaaattacattatatattcactttactttacatattttaatttttacctttattttcatgttctttaagatacgcccacttttatagatgatgtcattatttaccttaagttaatgtaatttatgtgctaaacttgagtagaagatgatagtatatttggcaacctattcacaaaagtgggtatatttcaatgaaatataatataaaggtatttttgattaattgatacaaaaaagaaatattatccctaaataatgtattaatattttgtgaagtttcatgttgatgtaatagcactcctagtctttctctaggagaatattcaaatttatcaaataatttttacatttttttt

SEQ ID NO: 185191 - DNA, 1534 bp, Cannabis indica
atgaacgatgcctcagtagttactttctttatcttgactccccaatccacttcggccaatctccagactctacccaatattgtccgaataagagttcgattcatggttttgttcgagcaaaatctgcccaggagacaagattttcccacttctgcttcacttccttcattgacttcccacacagcttcatcgtctactcgcaggtttcccgtccgatcaagaagatcgtctatagtcagatctggctgttgaggcattcctccagggaaaggctcttctccaagagagagcaaaggttcttcttcagtctaagtcttctttctctccggtgatttttttttcccactttgagtttccaaggtaaaaaatttggtgtctgcattttatttaattgtggtattttagttgatattttgatattacttattttagtgtttgataaatatctatatagcattttcgaacaacagagtttatatgtatctttaactgccctcatggatggtagttaaccttatattacaagcgacctaacacaaaagttgaccacaacaaaagcgttgacttattgagtaatatatattgctttactgatcttccattcctttccacgttatatacatataacatttaacaagtaatttacattattaattattatgtattaacaactagtttattattattaataattaggttccatccattaacatttcacaaaactacactcttctttcttcttcttcttcttcttcttattctttccaatggagcaaagattacttgagatcaacgttatatccgccagagatctcaacgatgtaaacatcatgaccaagatggacgtctacgtcgtcgtttcactctccggcgactctcaacaaaccaaaaccaacgtacaccgtggctccggcacaaaccccacctggaacttccccgtcaaattcaccatcaacgactcatcagctgactccgccgcccaacacagaaatctagttttcaccctcttctgcgacagagccctcggcgataaagaaatcggccaagtgaacgtcccggtcaaagagcttctcgactctgctgccacgtcatcatccacacagttcgtgagttaccaggttagaaaaccctccggcaaacccaaaggcgaactccatttctcctataagctcagcccaccacaacaactcacagagaaacccgttaagttttatcctacggtggaggtgggccccacggccatggtggccactccaccctggccagttgttgggggttatattccggtgcaaccgggtgtagggtacggacaaggtgggtcctatcactactacgctccgccacctggcccaccgccacctcctcatcatcataatatatatcctcctacaccgcacggttatgggtcgtacccgcctccgccgccacctggatatggatacccgaatggaccgggttatgggtacccgccacatcagcaaggtgtgggattttgattggagatggggctggatttgatttttaatgtaattta

SEQ ID NO: 185192 - DNA, 4558 bp, Cannabis indica
tcccataagtgaaattaaagaaacacagttatggccaactgcaagtgatgttttcaagactactacagtaaattggctttctagtatattatattatactattgttgctctattttttattgtatggagaaaaaaatagatgattgaggagacaacatgagcaagaaatgaagggagttgtgatcttttttggtctgcttctactcactcaaactatcactgaagcaaggaatcatcatcatcattccaagcaccaccaaggttcaccagaatcacaaaagagaggaacaagtcaaagaagaagtagaagaagtagtaatagaggaagaagtagatgcagaggaggaggaagaagatcatgctgtgaccctttattccaatacctatttgatgcttgtggccaatggcctttttcaacttctccttctccagacaacccttttttaccaacacctaggccaaggcctaggccaccatctccaccccgaaatcctccacctctgcctctgccaccaccgatccttactcctcccccagttccaatactgccaccaccatcaattccaactccaatcctttcaccaccaccaccacctcctatctttccaccaccaattctcccatttccacctgtacaaccttccccatcaccaccgccattgtctccaccaccattgccaccattgcctccattgccgccaccagcagtaattcctcctcctcctccactgcctactccctcaccgccaccactgcctgtatccccaccaccgttgcctccactgcctccattgcctacaccctcaccaccactgcttccgccatctccacctccaccgcctttggttccatcacccccacccccattgccttcccctccaccaccacccatatttctaccaccacctattccattcatagattctccaacactaccatggacatcacctcctcctgatggagttccaatagtactttcacctcctcctgatgcagttccattagtaccttcacctcctattgttcccacaccacaggtaccggatttctttcttcccccgcctacaccagatttgccaccacctgaagactttactccagctccacctcttgtcccattattttctccaccaactgagcctctgttaccacccgaacccccattttcttttacaccaaatgaacccctcttacccccggaacccccattttctttaacaccaactgaaccgctgttaccacctgaacccccattttcttcaacaccaactgaaccgctgttaccacctgaaccgccattttctttcacaccaactgaaccgctgttaccacctgaaccaccattttctttcacaccaactcaaccccttctaccacctgaacccccattttcttcacaccaactcaaccccttttaccacctgaaccgccattttctttcacaccaactcaaccccttttgccacctgaaccccagttaccaccattttctttcacaccaaatgtaccagatgctggggtgattgcaccacctgaattacccgtcacacaggaaccaccaaatatctttctgccacctccgattccagaaaatccacaggaaccacttcagtttaatgagccagtgcaacagctcccaccatcacagccctttctgtctccaattcagcttccaccaccttcttttgattcacctccatttggaagctaaatagttcttgttttttttttttttcttggttttctatgatatcttcctgtagtctatttcaataatatctaccagttcttaatttgtttagtaaagtttgagtagttagtgagcttttttataacagtattcattactaaaacaataattcacaacagaactagctttatataactacgaaaatcatcacattcatatgtctcccaaattaatacagttgcaaatatgattcacattcaagtaccttcaaatgatctttacaattgccaatgaccatcaaagtataaaaataataatacagcaacccaatttagtttacagcaataagataagtacataggaaatgatactaatataccttgttctccgagaatgagtagttcacaaaagagaaaattttgatataaacagttgaattccttcaatagctagccttcacaaacaaaacatccatggcgtagaaaaattcctctggctttcgctaggaacgaagccacaaggtgggactattcttctgagtgttggcctagagaacaccatccaggcaatgatatctatgctaactttattacactgctttagaattatctccctcaatgctcggcagttcttcaccacttgcttcactccatcatcagtcactttgaagcagccagtcaagtccaattgcaagagttgagggcattttcttccaaccaaagccaatccatcatcattgattctcaatcctcttgcacataacacttccaatttagagaattcaaagtccataagaaaagtcttgacccctctacaataactcatgtccaagtacctaagctcagtgcatctccttgaaacttctaaaaggccttcctctgtaatgcttaagcaactgtttaaatcgagcagtttcaaattgctgatggcaaatgcgaattcttttaagctttcattgactaaagagaaattttgacccaaatacaaagacttgagagtgttggaaacatggttggtattggttttttagctcctacctttgtaccaacctttgtaccaaccatgttgatcccattcaaaactggacaattttcaatgagtccgaagaatgttgaatctgtcaacttagtgcacatagaaaggtttatgtattttaaacttgggagaaactttgttaactgaaacatggactcgtctgttaggaaatccgcatcctgaagatccaagtgctgaagagattggtgcttagatagcaattgtttgataccatgtaatgtaaaaccagagcaacaagagagaataagcttatttaatggcatatgtgcttctgcaattaagtaaagcatttcatccaagatattaaaaccagacaaatcaatagaacataaagcctttgctgaaaccaatgaatctgtcaatgctgaatccacaacactaagcctagttccaaatacagataatgaactcaaataaacacagccacggatcatcaaggcaattccatatggtgtaatgaaatcacaaaagtgaatcactatctcacgcaattggacacaattcgtagaaagatggacaagagacctatcagtaatgaagtgattaccagaaagattgagctttttcaaacctttgagcttcaacgacaacgtcaagatcccagaatcgcttatgggtttcgtaaaactgctcatatccaacaacccattagagtttgagcgataatcatccataagatagctaatatccaactcttcaagagttgggatcgaatttgcaatcaaacccagatcgctgtcctgtaaagaatagatttttgagcaattcaaacacctcaaattcttcattttggatcccaaaactcttaacccatgaattggaagagttgaccgattggagatattgagtgattcgaggtccaacccagattccgaaatttgagaaagaaggccatcgacatcaccgtggaactcactgaagtcaaccgttctgagtctggtaaatcttcgaagcaattgagggagaacgacgaccgtcggatgaggaattgcaagggaagtgatgagttgattggtgatggagaagaaaagcttgcaaaccaaagataaagatgcataatgtcggcggtcttcgacgaaattgaggactaattcccagcattcttctggcaaatcaactgaattttccgccattaatagtaattttgtttcccctgttcttcctcaaagccaaaatctttcatcaaattgtgaaattcgaaaatcagaggcacaaaaaggaaagagataattaagttgggaaatttgagttttgagaaggaaagagagaatctcacttttttgaatttcaaagaataacttttttaaaaaaataataaaaaataaaaataaataaaaattcaaatccacatcgctttggttcattttcaacttttatctttcattattaaattttaaaagattttttatctaataaaatacgtgtctattaaactttacaatatatttggctaaaaaaaaaagaaataaaagataatgtgattacaatggtgataaaaatagaaacacaccattaaagacaaggagataaataattttttattatttatttatggtgaagaaagcatagttcatctcatatataaaattcacttgcgaaataatcttttgaattttgttgggtacaataaattatttgaaattttaacatatttacaagatagtctaaataatttggggcctctcaaaagaaaaaaataaataatttagggaatttagataaaataataatagtaatattcacatgcaaataatataaatttccacatgcaatttttttttttttttttttgaaggggccacatgcaattat

SEQ ID NO: 185193 - DNA, 1924 bp, Cannabis indica
ttttctccaatatttttattaattaaacagaaagaagataattaactaattggtagttgataatcaatgatcgcgggaatgatactctattttatcattattacttagttcgattgcgtatacttgtgtatcaattttaccgaacaagttttggacgttattgccggagattgaaaaattatgaatatcagtctaattaatttttattctaatttgatttcttttgctcttgtctctaacttgtttagttgctccttttgcctatcttaagtgaatttttatatgtgtagcaaaagaggagctaacaatcttgcatctttgaatcctaagactgagaagtcttgtaagcaaaattgaaagaacaagaggaaaatccagaagtctggggtgatggcacaaaatgatggggattataggaatgatctcattcctgtagttgtacaagggggtcaagctcagaataatgttgaaaggagcctaatagactatgtactgcccactctgacgaggttacaaaactgtagaagttcaccagcagttgaagccaataactttaaaattaagccaactattttacaaatggtgcattcttcttttcagtttagtggattgtcgactgaagatcctcactctcatctgtctaattttctgtggctttgtggtacttttaaatacgaaggagtgagtcatgatgtaattaaacttaggcctttcccattttctttgaggaaaagagcaaaaagttgtcttagttcctttcaactgaattctattgttacttgggaagatttggctcaaaaaattttgtctaaacttttccctccatctaatgctgctaaactgaggggagaaattaataatttttgctagaatgatggagaatctctatatgaggcttgggagcgatttaaggaactgttgagaaaatatccaagccattgcattgagaagtggatgttaatttaaaatttttataatagtttgtgtcccacaagtagaactattaattattgatgttgcttctggaggcacattcatgagtaagagcgcaactggagcctatgaacttttagaagatatgtctatgaataatcatcagtggtctgatgagagagcatctgggaagaagaaaataactgaaatgtatgaattagatgtgattttcgctttgactgctcaggttgctactctcacttaaaaagttgcgcaaacaaccgtagctattaacgctatccaagctcaaactggttgtgaaatgagttgaggtcctcatacttttgataaatgcacatcaactaataatattcttatgaatcctactcaagttcaagccatagcctatttttagaggcaattcaacaatgaatggataaataatcaggggcagtagcctcaatttcagaatcaaaactaagcttctacttcttagcaacaaaatccagaagctccgcctgctccaacaattgatctactatgtgctttgcttattttcaccaaacttagtttatgactgagacaagagcatccatcagaaattttgatacacaaatagggaaattgactaatatgcttcataagagacctcaaggaaatttatcaaggaatacagaggtaaatcctaaagaaaattgcagtgcaatcactctaaatagtggtaaagagttaaaagagcctataaagaaacctattcttgtaccaaagattgaggttcagaatgatagtttagtggaagacaaggttactgagaaccttgagaaaaaatagccatagattagttgtgagtaccacatcaagattccatatcctcaacgactttaaaagaagacacttgacaagcagtttttaaagtttcttgatatttttttgaaagcttcgcattaacatatcttttgccaaggcaattgaacaaatgctaagttatgtg

SEQ ID NO: 185194 - DNA, 4004 bp, Cannabis indica
aaaggtttggttcgtcatttttttacgactatgctaacaccaccaccagtggtaaaatacaagtgattggttgtacattataaattaaaaaaaaaaaaaaaaagttttttttagcaaaaacataagagaagaatctattttaattgtatcaactaattcaacagagagttatacaacaccgaaaaaattgggcacaattgggagggatcaatggttctgggcaccaaaaaaaaagactatttatcctttttaaaaagatatttttaaggaattctctagaatcatgggatccgtgagtacaaaatctagatgttcattccatcagattacatcaacctaaacattttcaaagcacattcgccctaaaatcccatttagatgtaaataccaaaacaaagtccccatctggctaaatcatccaaagtgttgttactgcataaagatgaatatcagtgtctgaataaataccgttacacagctttaataccagacccaatgatataagacataaccaggctaaattgaatgtagtcccaaaacttccatttctgtagctggatgaaaaaactctttatacttaagaaatttaatcatgtagagaggccattaatgctttgaattcctgaacagctctccttaaacaatattaaatattcaaacatagtattgtttttttatgctttttctgttcctttgctttttgaagaaaagacaccagtcaaaaggtttgttagtaaaaacaagacattataaattaaaaaaagaaaaacacacacattttgtcaagatacaacctttgatgatattgttatgttagctactaactggttcttcgtactttagtaagactaactcatgaatgcctccaatttacaaagcctaaacagaagctaaaagacaatttgttcaatacagactaaatgaccttttggctagatatcattcttaacggtggctattcaagcacacaccatcgaacctgccacattaccgatatctactgcaagctgcttgctcttattccaatcacaatctatagccatttggatgccaattacgacaataaggctaactataaattcctattaacatattttgaaacaataatactaactaaaaatattgtgtttcaatcaacaagtaaagaaaatcaagttctcctcctacagtattctgatgatgataaataagtaactccctgagtgtgagtgcttactctaagaaaggagagctcatattccaacattaataaagactgtagaaactgcacaaagcgttctactacctacattcatctgtcagactgtcaggctctactgtcattggacactcaaaacaaattaaaaatatgagttaatattgatgaaaattgtaaaaaccgcaactaacgaaccatgataagaccctcctgacattattgttaaatcaagtaaaatagaaactaaagcaccaaacctgacatatttctcccaagtcttcccagttgaaactctgaaaaggcctaaaggccacaacacaacttagaaagcatgtaggtttaccgcatataatggtgaagaaaatagatgtgtcgtaacacttaactaagtatttagtggcaattcaaggattcaaaatagatcatgatttctaaccagggatttctacataaagttaacagctcttattggcaaggtcgtgaatgaataatataattccaacataaaatattatgaaaccaaaaacttaaaagtatgtcataacgtagtgtattattactctttcattgtattgaatttctataccaccatatctattcacatacgaatatttagtcctctacattagcacatgcaccataaagatacgaaccatagtcaaaagagaagcagttcaactctccggtgctcaaaactatatgcccatatctaactattgaaaccaagagtcttgcaaagcaacacgagacacatgtaaaacttaacaaaataaagaaagcaaaatcccaacatacataactcgtaaaaacagagacctaagaccttgtaaccatactgcaagaacgacccaagcggactgtaaggctacctccttggacgatggcctccgcctctgccttcacaggagcacagtcgtaaggcttccggcatccaggacagcgtctatcagcctcaagaatcttattatgacagaagaggcagagcctaaaaccacacaaacaaggcaaaaaacttgtgtccgtcaaatccaaatcttcacagcaaattggacagttggatggcggaatggtgttgtgggtccaagggacaactccaaagccataatgctgcctgtttgaattaggcaggctaagctgcttggataaattaggcaaacactgaggacgaaatgcgtcatccggcctccatgctcgggtactccctgaaccttttgggactgccgttgtcaaatcagatttagtgctttcaacatctaaacctgacccattagtttcttgacaagaggaaaccaattggggaactacttcacaatccggaggagattctgtacacggggtttctgacttgtcattggccgccaaagcatcagccacggcctcccagtcatccaagcatccatcatcttcctcctcctcggtaatactccctgagcaacagccaccactgctactgctggaactactgctactgcttgacccagtaaagtttgtccccgaaccatggcttcccagaacactactagtcaaactagtaggactgtttgaaggtgaatctgaatcgctatcattatggtggttggatccgtcgttttctccccctctcggtaacgtctctaaattccctaaaggacggtttctctccttggctggttgaacaccatccatttcctccttgcaacacttgttcttgacagcaactaattccaataaatccaaataaatcaaagtaaattacagaaccataaccaaagaatccaacgagtaatcatgcagactccaaatatgcacgcggatatgtaactacacaaacataaccagacaaacccatttacaaaatacaacagagagatcataaacataccttgcgaaagccattgctcacgacgaacatcaagcttgcactgcttcaatttggccgtcctagcctaaagaaaggaaacaaaaaaaatccaaccagaacagttgaataaagataacataaatattattaataacaacaagaatttcagaaacctaacaaataaggggggaaaaaacaaatctttaaaagaaaattgaaatctcttaccctcttcttcttccccaaatccttagagttgtgctgaaccgaaggaattgaagcgttagcgaccgaatctgaaaccatggctgctgtcaacaattggattcgaagatttgccccaaaaacccctaaagaaaatttttgaagagagagaaaattgaatggataacggaaactcctctgctccgctcgcccttgttattattttctttttctaatttttttcaaactctggatgaactttcgagggtggtagatatataaagccgtcaagttacgaaaatacccttatttttggcttaattttctgaaactaacctatgagatattctgggattctggataagatgaaggggagatatatgaaacgccagggttatctttgtaaagttgcaatggatagcaaatacggcgtcgtttttaaaattggtgaaatttatagccacgttgttggaaaggagggcaccgtcattattttttttttttttgtacaaaattatgtttaattttttttttgaaacagtctaattaatcatccaaaatttctttaaaatttaaacatggatttaaactcgtgacagcagggattaacaatataaataatgttattatattttctcaaaaaaaaatgtatatgtacagtattagtttcttcttcatttttgtatactggtaatcttctcaaaatataactattttaattttcctagaaaaaagaaaacacccacaaatggtcgcaccact

SEQ ID NO: 185195 - DNA, 3893 bp, Cannabis indica
atggggcatgagaacaatatgcagggtagaggtggaaacgactacgtgtttagtggtaacaaggaaccaccaaatgttggacctcagcaacccaagcttgcttccattccagggcccagatttcagcaggtatcttttcatcgtacttggtttttatttattggtttgactttcctagaagctaatgatgtttgcttgtttcttgcaggacatgaggaacagcggagctccatatccaaatgttgctccaaaccaggttcctcccattaataatggggcaggacatccgatgcataatcatgcaacaggtggtccaccattgccaagtaatgctacgatgaagcctcctttctttggaaatactgaagttacgaacttttcgcccgcagaaatttatcgtcagcaacatgaagttactgcatcggtatgtatttgtgctagcttaggtgttaaatagtgttctcctacgatgtaagaagttgatttttctttagtggtgtttaaataggataaaccaagtgtagatcctggcattttctaactatatttttgcttgctttggtatcctagccatcatctcatttgttgtgagatgtttagtggtgattgaatttattatggaatgagagcaagataaagtctgtatttttgccttcttggaagtttaaattgtacgagttattatcatatataactactcataacttgaatgtttatattggaatttttagggagacaatgttcctgcaccatttgcaacatttgaggctactggctttcctccggagatattgagagatgtaagtttgttttgtaccatggtttgatgttatgattcttcaaatcctatcaaggaaaatcgcataagctagaatgagatcccagtcccttccttttacatatactgttgttattttacgtttcatctgaacttattagttctcacttgtcgcaggtgcgatatctgctccggagggggagcatatgtcgtacgctgcaatgctgttggcacacttacacgtgcaacaacaactattctgattttttggaggctgcaaaatgaactgttggagcctttcttgtgcatcttctagaagggtagttggccctttgtccaaatcacacctgatgtgactgggatattgcttctaggctcaacctcttatgtctttatttccctcttttgttgcctcgagttgcttctgtaagcaaccaatacctatgggcttttcattttggatttttcttgtcttgtagtttatttgttttgttttgtttgtctctgtttttgtttctttctatgtttgtctctgttttagttctttcttccgttccttccaaatatttagcaaatttgtaggtcatcattctagaattgtgttatttttcagatttattctgcgggattttcgactcccaccccaattcaggcacaaacatggccaatcgctcttcaaagcagggacattgttgcaattgctaaaactggttctggaaaaacattgggatatttaatgcctgcttttatgcttctgagacaacggcataacaatgcccaaaatggcccgacagtgttggttctggctccaacacgggagcttgcaacacaaatacaggatgaggtcatcaaatttggtcgatcctcaagagtttcttgcacggtgtgtacatgttaccttattatttgcgacatcagctgactttcccatcttgtttatattttttattgtgttttgatctcgtgattcagtgcctatatggtggagctcccaagggtcctcagctaaaggaattagatcgtggtgcagatatagtcgttgcaactcctggtcgtcttaatgatatactggaaatgaagaagattgattttgggcagatctcacttcttgtgcttgacgaggccgatcgaatgcttgacatgggttttgaacctcaaattcgaaaaattgtaaatgaaattcccccacgcagacaaactctcatgtacacagcaacatggcctaaagaagtaagaaaaatagcgggtgatcttcttgtcaatcctgtccaggttaacataggacgtgttgatgagctcgctgcaaacaaagctatcacacaggtgagaatttgaataaaatatagattttttttactgcattgccaaattgcaataaagaggacttttcggtgattttggtacgtaatttgcaacttcacaaaatgatttttctttctttcttcacctttccaatctcacagtatgtggaagttgtgccacaaatggagaaacaacgacgtttagagcaaatccttagatctcaggaacgaggttctaagattattgttttctgttcaacaaagaggttgtgtgatcagcttgctcgtactattggacgaaatttcggtgctgctgcaattcatggagacaagtctcaaggtgagagagactgggttttaagtcagttcaagagtggaaaatcaccaatattagtggccacagatgttgctgccagggggcttgacatcaaggatataaggtgagcttgcggctttcagattcttttttcttacaatacgaacctgttcaacatttattaatgtattgtttcaaaggtatatagtatcattatcaatttattttgtttgttgttgtgttacagggtggttgttaactatgatttcccaactggggttgaggactatgttcaccgcattggaagaaccgggagagccggcgcaactggaatggcttacacttttttctccgagcatgactggaaatatgcagcagatttgattaaagttctggagggagctaaccaacacgtacccccagaagtgagggagatcgccatgcgcggtgggcctggctttggcaaagacaggcgttttgattctggtggaggtggtcgtggtggcatgagagatggtggtggctttggaggtcgtggaggaggcatgagggatggcaacttcggtaataaccatggtggtatgagggatagtggtttcggtggccgtggtggccctagagatggccctatgagcggctttgggggtaggggtgatttctttggtggccgtggcaataggggacggggatttggaagcccgggcggtggtggtaatgttggttttggtaggaatgaacgtggtgggaacgatcgatacaataatatggatgtgcgaggacgtggtggccgtggacgaggacggttcgataatagaagagatgttgctgctggtggtaggagcagcagaggcagaagttacagccgtagccccgaaagagttagaacatggggttatagcagaagcccaagccgtagccgcagtcgcagttatagcaggagtagaagtagaagctacagcagaagccgcagtcgtagcagaagccgatctcgcggccgtggtcgaagtaagagccgcagcccaagacgaagcagaagccgaagccgcagccgtaatcgtggccatagcccaagctacgacaaatacgaaaatactcgggaacgtccctccgatcaaaaggatcccgcacctccagtggcggacctcacgactcctaccgagacaaaaacttcatctatgtctcctggtacacaaggcactgcatttccagaagaaaccgaggccgagaagaataccgagccggagaagccaacggtaggagaaaacccggaaccacaagaggtacaacaaccacaaccatccccatcaattgatcactaaacagtttaagaactaatgagatatctgatgatgacaattgtttataagaactaagttggggatgatttttggtgggcagcaattggagtaaagatcttttcatgttttcaagttccaaccattaattctttttgtcttttttcataagtagttgggagattgtaatgtttttttttttt

SEQ ID NO: 185196 - DNA, 5382 bp, Cannabis indica
aaaatctctatctactttgattgtttcgaaagaagctgaaatcccaacgacgaatcaaaccatccatgacattgcttgcaggatttcgttcaacagttaatgtggcttttgtatttgctgacaaatcagtttctggtgcgctttgggtgcttgatgaggcaactttttgagtaggctgtcccgagcttccggattctttggcaggagttttatgcttgggatcagaaacatgaatcttggttactgaagttgaagtagattctgctttcaaagactcgtgttggtgtacagaagtggaaatagattctgtctttaacgagtcattattctctgccaaagaaacagcacccggtttgacatctttctgtaaatcttttgaagaatctgatccaacaatagacggtgattcgtctccatatggttgaggatgtctcatatccaaatctttcaatgacaacagcattgcttccatgatcatctaaagatgttggaagacagattattttcaaatacaagcagcacatcagaggactaagttaaaagatactataactcaacagtgtacttaccttttcttcctcttcgacatcagttggaaaacctgccaagtcgtcgagttcatattctacgtattgatcatcatccatggttgtcggaacatggggtccacagggatcaccattggtgaactcaaaactaatcattttggaagatgaagaacaaagatcgtcatcacatttttgatcctgtagaatcaagttacaagacttggttcagttttcattgtagtcctattttaggttttgccataaaacttgtcccctataaccccattcctacccctttttctctaacctacaagtactaaaaaagtcagaacagaaaaaacttacagctgtcagacatatcagtttacatttctagtcaaacccattcctacccctttttctctaacctacaagtactaaaaaagtcagaacagaaaaaaggtttgttttttttttgttgtacaaccatccaaataacatgtgatgtttaaaattaaaaacaaataaataccatcatgcacaacaccagcctagacttcaaaaattcacgaacagttgctcagacaagtactgtaccttatttttggattgattttcgtcagaaggaatatccgaaggaacctaggaaggagcaaaaacgaaaataatgagtatatcttcactgcatgaagtcaagtggtatgctttccaaacctttttcatctgtcacattttgacatctgagctatcccaaactaagtaattactactaacctctgtccgactcataggtcttcttgaacgaagtttctcaatggcgtcttctgtgctgccagttgttggttctgcatgcaatgaacaaattgaaggttaataatgaagttccaattgaagatagtaataatatttgcaggcaatcagtagaagagacagcaagtttttatgtccatgcctgatgatggacttgaaaatttgaggtcatggccatggtctactggaggtgtcattctccaaccaacctgaaattgcaacaattaactaccctctgtctaaataatattatattataatatggaagtcaaaacagatattaaatgttgttttatttaccttaccaaagtaatcctgcatggagtcaaaaaatgcttcccccacctcatcatcaggaggttgcaagacattatggaaaaatatatttatagagtcaaagtaaaactgaggtcttggagagttgtgatctccctcaaatttgataatatttttgtctccctgcaaaaatattcatagaatgacaagccaaacaacatccaatgccaaaccaaaaatgtccaaaatcataaccgacagtgggcatcaacaaacagaagtctactaattttattgctgacaatcaaaatatgtatgctcagagacgaccaaaatgcaaatttgctagtttctttgacttgatacacaaggtcattggtagaaaattttgagatttcaggtttgtttggtttagaagaattaggctagaaaattgcaagatatgaaaggcatgcaaaagaaagtatactttgatttttctatgcatattattttatacttttcttactatcaagaaaaaaacttacaacataagcatcaaatatacgatctgaatggtggggccgaatgaaatcatcatctgtagcatgcccaaacagaactggaacaaagcatgtttttgctacctacatagtatgaaaacgaatcaagtcattttcataagaataaaaacgaaaaaagaaaaagaaaaattaacaattttcactattcttttattacatgttttgaataattgagtgagcaaaaaaacatgcatctgggttcatttatttttcccttggacgcatctcaaagtaatcaagaagaaattccatcctaatagataaataaattattaagaggttaataccttgattgtgttcagaccagttatgtcaaattttgcctttttctgaatagctcttcgcatatattgtattgcaaacttgacctacaaaaagcagaggaaagaaattaaaattgaggaaacctttcacaaaagatgcacaattgaaagtttacacaagtatatacttacagtgaactttggtaaacggactttgtacgtatccaccagctccatcatcaagtcaaccaaatcagaaaatggactatcaagaaccattccagcaatcgaaggatcctcagctccatacataaggctgtgcagaatagcagaagttgttagtagaaatggcctaaactattgaaggttgcctaagttaacgaggaaaaagaaatggtaccacatttaactgtattttataaatcttgttaacttagtatgattactcaattgctttgctaagtacacagatagctcctaaaaaaccacatgttccatatatgagaaatgtttatgaaaaaaggaaagaaaagtaaatcaatcctatatgttaggtgaataatgcatgacatgtaatcaaacatttaagattttgtctacgattttccaaggctttcaattgttaatctacggtaataatgatttaaaaaactagctattggcaccaaaaaaaaaagaagaagaagaagaagaagccaaattgatcttcattcaataaaagatctttgttaatcttcaatgcaattatggaaagatgatttttaattttacaagaacatttgatatttttaattgtttgcatcttatattatgcaagcttacaggaaaacactaagtgaatgaatgaaactgaaacctagtgactgcacccattgaccggccccacaagcctatcatagagacatttccatctgctcgcaaataatcgaccacagctcttaaatcatccttctgcaaagaagaaacaagaagaaagaaagaactggattgtcatatatctgcattttatgataatagaatacatcatggaacacaccaacatgcaaaatggcaatccactgctaaaggatcctacacttatgaaaagagtgatgaaataccttacgtaaatttaagttgattaaactacatctcttgcttcaattcatgttagacacaattttatggggctcatatattgaataaacaaataaacacgaaaaagtatgtacaaaattgcattataaagacttataattatacttttggaagcatctgatatgatcagcatgctgctacataaaaattcagatgtaacaaaaaatatactttcaaattttgaactattgttgttatttaagtaaagacaacatcatagacggcattcgttctgtaaaaatggagaaaattggagacctaaatgatcagttatgacacttgatgaatgtaatatggctttaattttaaataatttctctgtacttacttcattccacccaagagtaacgtgatctcctccagatataccagacccagagaaatcaagggtgaaaactgtaatgtttgaaggcagcaaaataatagctgcttcactggcatcagccctgcacccactgtgaatatagtgtatcagttagtaaagaaatgaagataattttttcatattaacaaggcagctcattaataagttaagcataaacaatgaaatgttgactacataagtgattttgttttttttaaaaaaaaaagaaaagaaaattcatttttcactggtctcataaatcatgacatctgtgtagatactgtgaagtgttgtgataaggttgcaagtcaaagtcaattgggtatgcacagtaattacataccacaaaagcatgtgtttaattctggcagtacaagtaaacttaaaaaagggattcagctgtagtcactttgcaaacaatgtcatgaccagtaatcacagatccacaatgaggcacaagggagtgcagcattaattttccattacttacgagtaagtataacccaaattgtaagaaagcaaaacgatttttgtttcctcagttatgatagggttagtactagagacaaaatactcggaggtttgtccattattatatcagtcatgaatgatcaaaaccttaaatcaaggaattacctgtttccatggcagtatattacacagggcagaggcttcccttcaggacttacaatgggcacataatgactacactgaagcaaatctcctcgacaattcttaatctgcaaaatattcaaaatactttctaatgaaaaggaagtgatcattaaaaaaaataaataaaaacaaatcctgtattatactttgtttatatgcccaagtaagataaaatccctttcagtaccaaagcacgtaacacaaatacaaaactcgttaatgatttcccctaatactgtatatgaaagaaaccccatattctaatatggattaccatactctttctacaggcaatttctgaaagtaacagctgattttctatagcatctgacttacacacaacatgggaagcaaccatgaaaatataaatcttgaataagtaatgaaatactacacataacacttaaactcacctccaaatcttttctttgataccattttcccctcagcataaactcttgttccaatagatcgtgttttggatcatactcagccctgcaacccaacaatatttttagtcagcacattaagcaattgctatagttttctgatccccaaatattgtaaagttcagcaggtattctagttaaaaaacaggttttaattccaagtagaaaaaaaatcaacaaagtgataagttatatcaaatttgagcaaattaacccttcatatagaatatgttacacaagaatacattaaacaaaaacacgattaaatcaaagcagactacgtagatctcaacttttccacaaagggggagaaaaatg

SEQ ID NO: 185197 - DNA, 4457 bp, Cannabis indica
cgaccaaagttatcgaaatcatgatgtggcaaaattgttagatatttcgccgtgaactgtctgttgtgccgtacatgtcagacaattttaacgcttcttatttttctattgctgaaatggtttagggatcattaaataaataaacaaatcaaaaagtaattttttttttttttcctgtttctgaagagttgatatttcaaacgtgtcgtttaataaccttttccctggaagttaaaaaaaaaaagataaactagacatatatacatgggctatgctaagtctccattaaactctttattataaattttcattattgttgatttaaaaccactaccagacaaaactaaaatcatttcatacagacccagattctgcttaaatagtggtctgagtctctctactctcctctccactccattttcatctctcttctatctctctctctctcttactattttaataaacccaaaaaagtttctccatgtggacattcacggcgagctggttgacacccagctcactcttcctcttcctcaacctcatgatcggaaccttatttctcatgtctcgttttgggacccggaaaactcctacccacgaccaactccgaccacacggctcgccccaacttgttcgatcaggctcactattggaacgtgtcaaatccttcaacctctccctctacaaattcgagtcatcgcctgccgtcgaaaccgtgtatcaccaccatcctacagacccagataattacccgacccacccgactcaactgggccgctctccttcgtttttggagcgcttgagatccgtcgatttgtcttacgtctacaaattcgaccatcaacaaacccaccctgaacccgaacctgaaacagttcggcatgaagagaaaactccggttcagaatcacatggagcaggatcattacccggttcggtttcagaacccgatccagccgcctcaacttgtccgtactccttcgtttttagagcgtctgagatctatcgacttatcttacgcctacagattcgaccatcaacaaaccaatccggcaccggaatcaaagactgctcgggatccgaacccgctcgaggaccactctcacgaacccgcacacgtgacgagaagcaagtcggagtcggagtctcacggcgcccacgccgagaagaagagccagacagaaatgatgacgaaatcggccagcgaaaaaatggggcaaggtgtcagaaacagttctaataaagacaaaaaagacaacgacgaagaagaagaggaggaggtcgtcgaggcagttgagcggcggaggccggcgacaacgagggtggagagaaggagttgtaataatggtggcgaaacgacgtcggttaatgaatttgatgacggagttgacgctaaggctgacgactttatcaatagatttaaacagcaactgaagttgcagagactcgaatcgtttaaacggttcagtgaaatgttatcagggaagtagctagtttacaatggagaatctatcatttaaagctttttgcattttttattttcttttttattacttttttatccagttttaggctgttaaatctatagaatgggttatatgggtaatttggtaattttccctagtcgatgaggttgacttgactgtgttgaatactgctatgggttaattcatggtgactgatgagtagcgattaaagcatagtggagtatagggaagaaaggaggatcgaatatcgaggtgaggatttgtgttgggtcagataccgaagaagaggatgaaaaagtgtaacagctacactgtgaaatgaccgttatggtgttaacggcttttgttaaataatattgaactccattctgtccttttctttgttaaaactcgttgtttgctgtgattgtattgtaaccttatggtttaatttttgaaattttatctttataatgattttagaatgtaatcacctccacaccctgagtaaatattagagttggattaatagatcttgtaccatgcagattttattttacgaaaataatttaaaataagaatatttctgtatatatatatatatacacaattcatattcctaatactatttccaaaataaaacaaaacttataacaccatataagtatattatgatttagcactatctatatagttttgtagtttggatcattcatctaattgtaaaaactaaaatggtccaatcaacccaatatatatttaattaagatttttgtcctaaaatctttatgtactcccagcttctattaataaaattagacaaaaattattaagtccaacaattttaaaagttaagtcactaacgctagtttttttttttttttttttttgtaagtagaaattatcaatttattaactgcaatcatataagattacattttagaactcagaagaaacatcataacttctgatgacacgatcagcaacagaataggaagctttagccaagaaatgagcaacactattcgcagaccgtttaacaaaaagaaccgaaacaccacttaactcttctaacagagttttacaatcagaaataacactcccaaaataagaaaccatttcaagagggctctgaattgcttgcacaacaatgagactatcagtttcaacaattacactttgccaaagtttctttttatccaacttaacgcctctctaactcccatcacctcagccatttctggtgcatctaaaccaggccggcaacaagaaatagcctccaccaaagtccctgtcgagtcacgggccacacagacaaagctatgcacattaggagttgcaaagagggctgcatcaacattaactttcaaaaaaacctgttgctggtttgtgccaaatttcagcagcatctgcatcagtcagaaaagcagcccgaggaacaagttgtttatcttgtgccttctcccattgctctagacaatattgagctaaaattgaaacccctgccaccataggaactttgttattccaaactatatcattccttatccctcaacaaagcccaacatgtcataaccaacactttcttctgctccgtctagccatctaggaaatgtaaccacctgcatatcgatagtatcaatgtcggtctgcaaccacacagtttggcaaactgacaatcaactaaacaatggaaagaagtctcttggtctaatttgcacaatgggcagcaatcactcacattaacatgttttgtccttaattgtgttgtagtaggcagacagttggttgatgcacgccatataaaatccttcactttcgggggtacccaaattttccacagtttgttccagaaaccagaagagagagcctgcaattcaccctttcgatcttgttgcagaaacctgtaggagcttttaacagaatgaaaacccgagttttccatcctctaaaaccacgcatcactttgtctacttgggtttaatgggatactaagaataattgcagcatcccgagcactcatcacatcatttatcaactcaacatcccattcataatgtctagtcaccattaatgcttgaactctttgatcaacaagagcaggatgtgtggaaattatactcggattatcctcatcaggcagccacggatcatctaagattctagtctttgctccattcccaattcgaacccttgcccatgcctttactagatctttagcctcaaagatgctacgccatacgaaactcggattatgacccaattcagcagataagaaatcacctctggagtagtatcgtgctttgaataaccgagccacaagtcaggccgagaaagaagcctccaaccttgtttactaagtagacttacattgaaatctcgcaggtttctaaactccatgcctcctttcgatttatgtaaagtcagacggtcccatctcttccaatgaattcctttgctatccttagatgaagatttccaccaaaagttgcacatcatctgttccatttcattacaaattttcttagttagcaagaaaacattcattgcataactagggagagattgagcaacagttttaataaggagttccttacccgctttggataagaaacgaccctcccatccttgaatcttcttccttaatctttccttaagaaatcccaacaaagtcgtcttatttctccccacaatattaggcagccccaagtaagtactattatcccctgcttcagaaatccccattcttgagcacacccttgttcgatcctcagctctagtattagagctaaaaaatatagaagatttaagcacattaacctgctgccttgaagcttgctgaaaataactcaataattccataacattacatgcagcctcctcatttgctttgcaaaaaacataagtgtcatccgcaaagaacatgtgtgaaattataggagctccccttgctaccttacaaccacgaaccttccccaacctctcataatct

SEQ ID NO: 185198 - DNA, 3374 bp, Cannabis indica
gtttttttttaggtttttttttgcagaccgtatcggaatcaatggcgaattcgacttgccaaagcggcgaatcagatatctgtagagacgaatcagccgctttaggactcaaactcatagccatagcttcgattctcattgccggtgtgggaggaatcgccattcccttaatcggaaaacaccgcagattgctcagaaccgacggaagcctcttcgtggcggcgaaagcattcgccgccggcgtgattctctcgactgggttcgttcacatgttatcgggcgggtcggaggctttatcgaatccttgcttgcccaaattcccttggtcgaaattcccattctgtggattcttcgccatggttgctgctttgctaacccttctcgtcgatttcgtcggaactcagtattacgagcggaaacaggggaagaaaaccaggccaaacggagaagaacagagtcgggtcgggtcgggcgaggatgaggcgggtattgttcgggtcgggtcgaaggagtggaatgggaaagtgtttggggaagaagaaggtggtggtatgcatattgtgggtatgcatgcgcacgcggctcaccatagacatagtcatggtcaggagcagggggcatgtgatgggcacgtgactgaggtcgggcacgggcacgggcatggacacgggcatgggcatgggtttggtgatggggatgaggaaggtggtgttagacacgtcgtcgtttcacaggtaaagaaaaagacctttttccttttttttatgtcgttttctatattattaacttaaattatttgcttaaaaatgcattattttgattttgaggtctaaagaaaagaaaatgaatgaatatgacaagtgggtttggagtggggtgtggaaagttgttatctttttgtgatgagattggatagttttggagtttattgagggtaagagctatttggaatttcgtgtggtgttcttaaaagttaaaacacttgttttgctaagcatttggtgatttggtgtagttgtaggaatgcctttggtcgggtttcgaaaccccactaagtttgatttggtgtagttgtagggatgcttttacttatcgcccccactttgttgggtcgagatttgaaacccccaagctcgatttagtgtagtggtagggatgtcttttcttgtcaaactcactcaattgggtcgggttttgaaaccccgaagcccctgcctccggtttgggggtctatatgggtctatagagcgggctattagtatccgagattgcttaaaaaactgaaaattaaggtatggggatagaataagcactctccttttcatggccatcgttaactatggccccgccccccaactgggtaagatgcattagtggttttcgatgtgattttgagagtgacgtgagtttaaaatctaaaaaatgaacaaaacaagtggccatgggagaggtggggctttcaaagtttttatctttttgtgatagaaagtggattgtgctgttccatagtcaataagcttgaaacctttttcagctttaggctaaaatctcctgtggtgtgtggtgtccttaaaaacctcaattttggtagttgatataggtaatatgttgtgtttgttaatctaaagatttttctttttctaaccagacttgtataaagattcaaactttggtactcatttgccaaacccaattagttacttgtatggaatttgtgtttgccttaacattgaaaagtggacactcttgttgtcaaaacaaattatgttggtgaacccaaaaagcttgacttacgtttcattgttgactttattgttgtcatatatgacatttattgtttctgtcatacttatcttaaatgttagctgaagtcataaatgttagctgtgtaatttcaggccttggtatttgttttgattcatgaaacatgaaatgcttgtgttgtgttttgttttgttagtacttaggtaaatgcttctagaatctgtaaaattaccactgcagtaattagaaaatggtctatttttacaggttttggaacttgggatagtatcacattcagttataataggtctatcacttggagtttcacaaagtccttgtacaataagacccttgatcgccgcgttatcgttccatcaattcttcgagggattcgcgctcgggggctgcatctctcaagcacaatttaagaccctttcaaccacaatcatggcttgtttctttgccattacaactccaatggggatcgggataggtatcgccattgcctcgttctacaacccacacagtacgggagcgttggtcaccgaagggatattggattctttgtcagccgggattcttgtgtacatggctttggtggacctcattgcagctgatttcttaagcaagagaatgagctgtaattttaggctacaagtagtctcatattttatgctttttcttggtgctggtttaatgtctttacttgcaatttgggcttaatttttagtttagtttgactttttttttaattagtatttttcatttttcaattatatattgggaaattctttgtacttggttgcttgactctttcaaaagaatagagctcactcacaccaccacaaaaattaccatgtttgatttgtaaattattattgttatttttagagggaaaaaattatgtaagagtttattactaattacattagtgttggaattgttttgcttggaacttgttagaaagaactataattacccaatttgccaaattgaatagttgttggtttattttatttttattgttttttatttttgtagcaaattttttgtatgactttgatgctatgcacatgggagcttaaaattactactaaaacgacaattataatggctgcaaaacgacatcatcccaaataatagtaataatagaattgtgttgcttattgtaatttgtcaataattacattagtttagaaatagtaaattaagaaagtggcagagaaaaagcataataaattaaattatgattacccatttgctaaattgatgctctgcatatgggagttcacattcccaaaacgacaactaaaaaacagcatcaaagaaaataataagaaaccgacaacgcaaacaaaaagctatgatgagttaataatgcctgaaaacgacatgtcgtatagttttatgaagttggtatctttgttttagctttacatttctaatgatttaaataatagaattatgatccacctagtggcggagctaaaatataaagtgaagggggcgttatttttttagtaagtgagggaaacagaaataaacttaaaaaaaaatgtttttggtgggattaaaactcttgtcttttaacctatatactaagtagctta

SEQ ID NO: 185199 - DNA, 2311 bp, Cannabis indica
tctctctctctctctcgctatatttctggttcgttgacctatgattctgtaatcggcgaagccagaatctcgattccacactctagatctattcgtctccggtcccaatttcacgaatctaaggtcgaatcgctttactttctttctttctttctgtcttgatattataatcactttggtctttctagtgttccgactacgaactcagtagtctattattcttagtcgtgtctgcctaatgattcgtttcgttgattttgtttcagatctagtggaatctagctcgacaaagacttttgtttcgagttaatctgcgagtatacagttcaggttgtgaagttcttgttgactgttttttctttacgtatctgtattttttgttgttcgtttgagctctgtaatagatcttgggagagaggcggtgtcgttttctttttttttttggtgtttcgttcttttctttggttgagattctgggcgcttagggtttctgttttcagatcttgggtttgggagtgctgatcgttttcttgcttaaaattgatttgattggaaatgtcgattctatcgaaaggtgattctattcacatcagagaagtatggaatgataatcttgacgaagagtttgcattaattcgtgatattgttgatcggttcaattatattgctatggacactgagtttcccagtgttgtacttcgccctgtgggaaatttcaagaacattaatgactataattaccagactctgaaagacaatgttgatatgttgaaattgattcaattgggtctcacattctctgacgaggatgggaaccttccaacttgcggaactgataagttttgcatttggcaatttaattttcgtgagttcaacataagcgaagatgtctttgctagtgattcgattgagttgttgcgtcagtgtgggattgatttcaagaagaacaacgagaagggtattgatgtgaatcgctttggtgagcttttgatgtcatctgggattgtgttaaacgatggtgttaattgggtgacatttcacagcgggtacgattttgggtacttgctcaagctattgacctgtagaagtttacccgattcacaagcagatttctttgatttgatcaatatctacttcccaatggtgtatgacatcaagcatttgatgaagttttgcaacagcctccatggtgggttgaataagcttgctgagttgttggatgtggaaagagttggtgtgtgccatcaagccggttctgatagtttgctcacagcttgcacattcaggaaattgagggaaacatttttcagtggctccactgagaaatatgcaggtgtgctatatggtcttggtgttgagaatggacagagtactaattgaaagataatacaaaaatcttatggctaaaagattgatatgaatatttgtagactattctgagtgtgagagattcagtcttcttctttgtacactttggtaaaacaaacccttgtgttagttcttaacatttcttctttcctcgtttgtaactgaaaccttaactggttcttgtagctttgagtttttgtacatctatattagtgtttcaataaaagaaaaagtttaattgagtttcctattactgactctgaccctaatacagaaaatattatccgtgcaagttttttcttttctttctttctatactctaattacagtgaaagatatgcttgtttgtgatttctgaataacccattttgctctatgagctaagcttgtgtctctttgtaccaacatacacgtaaattatattctaaagcttgttgaagtaattaaagcttagtactttgaatctttgatcaatctttttggatccaggatagatgagtaatattataacttgcagagatctgtaaaaacttgtctgtactcagtactgacctgaccacacaccacacacattgaatattacatctgaacttgttgatgtatgtactataataatatattgccatattatttgattcagctctctaatacatatttttagtttactgagtttacactcattaacataaaccttttttttgtttagtactaagctactagccatgaagtagaggtactcatttatgtgaagaaagaattgcttcttgagctaaaatttcaataaagaaagtagaaacccaagccaagctgctcccttttgttcttttgtataataaatttctctaaataagataataacagatgagtgacaagatactaaatttaaaaaaaaaaaaaaaataaaggaattaatagtcatttataaatgtatcaaagatactgt

SEQ ID NO: 185200 - DNA, 4843 bp, Cannabis indica
cctatccccagggccgggcctgttgtagatacaatttagagagctagaaatgacaagatttgtaataataatctgtttagattactatattaattttattacttattgttattcaaattatggttactctcttgtgtctacccctctacttgtggactgggtaaaaattaattgtgatgtgatagtggggagtaggtctatgtgtcttgctatagttgccaaggactcttcaaggatgatttggtgggcttgtaccgagcaacaatcgattgacaagcctctcatcagagatagggtcaaccctaagctaaggcggactaagtctgcgcttaagtctcactcatttcaggggcccaaatgaaagaaaaaaaacttttaataaatatataatgttttttcataatttttaaaaatgtaatttattcttataaaaatggctaaaaaaagaagaaattatactgtatactcacttttcattttctattttaacttttatctttcttttatatttataatcagttttataagtcatatctccattatgtatattagggactctaactttgataatttatgtgaaattatatttggtactctaattataaaagaaggtatttatcaattataattattttgtaataatatttagttaatgtgtactaaaaaatagtaattctcaatttatctcgaaaaaaaattatttttctaatcgagagttgttagtcactaagcagcgaagtttgttatctttgagagtaattttaaagtggttatcaaaggagaaatttgtaggtgggatattggtagctacattcaacagggcaactctcacctttcgtaatctttttgggttgcaatttttttagaaattttaattttattgctcaaaatattactaaaaggagttatgctctaaataatttttatctatgaaatgtttctacttcaaaaaatgttcaaaaaccatgtattagtgtatagttttattaggctcttcttcctaaaaatacagttttagaccgtttgggatttataaaaagcttaattagaatttttaccccctaaactttgacatgtataaaatcatatcccctgaacttttcagaccgttaaaaaattcccttaaacataaatttaagaacatttgtccaatttcatttaattttactaatatgacggttgttcatatagtaaatcatgcccctcgaactttgatatcgcccccaatctttcaaaagtataaaattgtgccccctaaattttcatccacatcagactttgtttagtaaaattgaacaaaagtccttaatccaacaatctcaataatttagaaggaatttttaacgacctgaaaaatttaaaaggtataatttaatacatatcaaagttcagggagcaaaaatctaagttagccattataaaataaccacttataataaatttttttaattttacagtgacttaattcatataaaaagaatattaacgagaactttttatgtgattaaattatcaaattgtatattaaaaaaaaatacactactgaggctacagctccttctctgatgggatccataaaggagagaagagaagagaagggaagagaggattcctttgcaccatcacttaaagattttatcaacaaaaaaaagaattaattattaaattatttttaatttctgaagaaaaaaattgtaataaaaataaaattttcaacacactgatacaataaaaaaaattatgttgatctaataaaacaaaacaagttatcttatcaagctcattgaccaaaaagcagaaatttggtgaaaaataaagactaaaaatgagagggtcaagttaaataaatagtattctcccaaagaaaaaggcagaggaaattgttgttctcccacaacaaaccaatgtcaccaaaaatacaatgaaatgatttatcagcttcttgagacaaaattccataagtgttttgtatacaaaaccatgtgtagagaagagacattcctcatccacattgaataaattatcttgatcactcactccccccctggtgtcccaaaatctgtcatcatcatgcttcgactgactgacgactatattattcatgcagacattttctttctttacctctaatctcaaagacctatcacctatgataagtgtttggtaacatacctctcagactccgggaatggggaactgggttgtcaaagcttcaactcttgtttgaagatctaacaccctattcgataatgggaaatctggtgaagtaacaaacttcataaaatcttggagctttgtacccgaagctagctttttcgcatctcgggttatctccacaccctcgtgaatgaaatctgcaattgctacgaagtctttctccttgaatcctcttgttgtcattgcaggtgatccaattcgaataccccctggcactagtgcgctcttatcgcctttttcattcaaacatttgtagtgtaagattgacatagaaattaccataaactaagaaaagggaagagtatgaggaatggataacaaagatatacttaccgggtactgagttcttgttgagagtgatggacgccatgtccaaaattttctccacacgagctccatccattccctgaagaagttgatttatatttgcaatcaaaaaattataaagtacaaactaagatttcatatatctaaaggccaaagatcaaatacagattattgattaaccagcaagaatacaaaaagaaacttactaatggcctaagatcaacaagaactaaatggttatcgcttccaccagaaacaagtttgtaccccaattctgtcaatcgactcgcaagagctctacaattagagaccacctacaagacagagaagccatattaataaaggcatgtctagaatgatcaagataaaataaaacttgaaaaaaatatgcagtacattcttctggtaagccttaaaggctggtgattgtgcatatttcaagcacacggcgagccccccaatagtgtggttatgaggaccaccctgcataaagaacgaaaccaaatttttactaatgactcgcttaacaaaataatcaaaactgttatgacaagtcagcaaaaaatacagacctgtagacctggaaatacagcattgttgattgcagattctaaatcaacaccaagaatggggtccttcctgaagaaaatcatgccacctcttgggcctctcagagactgaatagagaaaatccaactttgtcagaacaaatgaacagaaagcatacattttactattataaaaaaggtttacaatataaattggaaataattttttggacgcaaataactatcacaagaaactgttttccgaagtttccattaacatcaaaagacactaatccttagaccttaaacaaagcacaaaatttcttgccaaaacaaaggatggttggaatagattaccttgtgtgttgttgtagtcacaatgtcacagtattcaaaaggatctgcaaccacagaagctgctacaagtccacttatgtgagccatatccatcatgaggaatgcaccaacagagtccgcaatcttccaaggcacaacaaatgcaatcagtagtttttctttgatgaatgaaataagtttgttgaaatgaagaaacagattatttagtacaaatatgtgcaacttgataacaaactctaacctttctcatcctaggatagtcaaaatctcgaggataagcactggcaccagcaataatgagtttcggtcgaaagagagttgctgttttctcaagcatatcataatcaacaatccctgatttaaatttggagcaaaattaacactcaccatcaaaacaagtgatcaacaacacaagtatactccgagttgaaattatcaaataacaaacaaacctgtaacttcatcaagtctgtaaggcatggactcaaaataaattgatgttcctgagactcttcgtttagctgtcatgaatccatgtgataagtgccctccatgaggcaagtccaatccctaagttaaatgcaaaaatattagataactcaagagttgttcaaaatttcaatgaccaacaaaagttaacaagactaaaaaatcataccatgattcgatcatgagggctaagaattgcagtgtaaacctcaaaattagcaggagaaccagacaagggttgaacattaacaccccacttttttgcatccaagtgaaaagcatctaaagctctcttttggcaaagaatctcaagctcatcaataaactcattgcccccatagtatctaaacatatataacaaataaaaataagagctaaaactcaccattaaaaattgtaagcttagagggaactaaactaaaagcctttaccttttcccaggtaacccttcagagtacttgtttgttagacaagacccaactgtctccataactgccctgtaagtaaagttctcggaagcaataagctcaaggcttttgaactgacgttgcttctccttatcaacaatttgacgaacctcaggatcagcctcacttaggctatagtcaataaagctactcccatcatcctctgtatcaaaacacattatagaataataaataaacatttatcagggtgagatagctcccaaaaggatgttcaaaaaatcacatggttaccagtaacatccggagcagtaacggagacagaggagggagaggaagagggtctccctgaaaccaagcttccttcgacatgggaaagtttgcaaggcttgaaagagttgaactttatttggtgtgggaattcattgataggaaagaaacccttttggggaaaagctgctcctttgccccaaagaggtt

SEQ ID NO: 185201 - DNA, 2367 bp, Cannabis indica
aaaaaaaaaagaagagactaaagtaagtatagtttgacttctcttcacgtgagtaatgatcacattaatatagtaaagtttttctttctttctataatattaatatctatttattttggcttttcacctgaaagttgatacttatatcataacgaaatgaccaggtagtttccttataaaaattgtttaattattcatttttatttagtatattagaatcaaagttaattaggggatttgttagaatttgggaataaagtgaatgtgattacatctcaaaattaattggcaatgggaagagtagctcattcatcttatatatcacaatttatttccacacattagtaatgtgaggctaactctaatacaccctcctcacgtttgagtctggaaagtgtgagtataacgaacgacccttaagaaaccacagactcgaacgtgacatttgaaagaatcccactaggccaaatatcgggaaatttgtgggtgtacacgtcgagaaatttgtagattttaaaacaagtcaaagaccccaacacttgaaattggcacataacactttgacttacaacggatcacaaacgactttttggaccggtggtaatttaggctcacaacggatcacaggtggctctgataccatgttagaatttgagaataaggtgaatgtggttccatctcaaaaccaattggcaatgggaggagtagcccattcatcttatatatcacaatttatttccacacattaacaatgtgggactaactctaatagaattataatgcaaattaacatggcaaaaagaatttttttccctttcggtgctttgctagggctcgacctttagtttctctgtggctatgacgggtctgggtagaccaaagaagggtgtcgttcagggggtgaaacgaagtaggaccaatctttcttcccctttaatttttcatttagagaacattagacaaaatttgagctctaaatttggagaatcaaaatcatgagaaactaaaaaaggccctggaattaaaatagatatagctgatgttacaaaagagattcaatattgggattcaacacttgtttgttatgtattgggtgttaatccttcatttagcctttttttgctaatatgatatgaaaagataaagggttacacaatgtgggattactggctaaaggtacccacattgtgcgttttacttttctggcagagagggatgcaattcaaaattgagggttcttgttctttgataggaagtctattattatgaaggcttgggatacctacacagacttctctagggaagacgtgcggtctgtgactgtgtggattcaaatatcgggattggatatagaagtgttgggggggggggggggaaataaactcttttcaaactcacaaatcagttggggacaccaattatgttagatgagctgacgaagaacaaggatagacttagctttccaagagttatgattgaggtatgattgaatcaagagtttccagatgaaatttcttttactaatgagctaaatcaatacataatcttacccgtgtaatatgaatggctactgattacttgggaacactatcatggaatggggcataataaagaaaatataataaacgaatagagatgaagcaagaatgggtagtgaagaaggcagtagaagatgtgaaagaaaaggcagtggaggaaaaagatagtaaaggtttttaacaagttaagcaaatggtaaaattggttcggcaagaaggtcaggacacaagggctctaaaactcaaattttgttcaaacacaacagaaagcaacaaatcaaccctaaatcaacttaaataatcacaaaataacctttgaaatcatagccaacataattttaaacttacagaactctaacctcaaaattgcatggatacttaatcttataatcataaaaaaaaaaatcaaagaaaagagggagggaccttgattaccttgaattggttctaaaagatcctaccaacaccagctacaacacccagaaattgagttaaaaacccaagttttctgctgggtttcttgagaggtcgagagagggggagttggagagagagagggtataattttgtctatttttgtaaaatgaataaatccaatatcaaatattatacaataagggatcgtttggtacaccgtattgtaatgtattgtattgtattatgttggattgtattgtattgtattagtattagtattatttaatacaatacaatatttggtattgacttgtataaattaattgtgtaaagttataatatatttttaatacattcgatcccaacaccaattacgggtctgggtcttgggtaccaggtctgggtctgggtc

SEQ ID NO: 185202 - DNA, 2104 bp, Cannabis indica
ccgtacttaacccctgtttgttgaattatgtataacttctacaggcctgatgtttcttggagctcttgccatgacttagttggaagtttgggattcacctctttaaccttcctgtactgttgtgaactttgcagaaactcggggtgaaaaagtgcaagttgagacaacatattatgttggagaagcaattttaaaccacatattattgattatatatttttgtttgatttctttgttggacttattaattttgtcatgttttagactcacagtttcttatgcttataccttatgatgtgtctgtctggtccctaatgttttcctgaactttctattgtctggtttactgacactctcttgttgtgacactaactttttgtgggttgctcaattgattttgtttgttccttctttaatcttaagtctctaaatatgatgttatcataatcccaatttttactgtttgagggttctaagatttcccagccgcatggtgctgaagctgtgtcgcggctgcggatgcttttcccatgctgcttggaaagaaaggcaaatttggtaggtaggttaagaagacacatttaacttgtacctttcttctaaagttgattatgttctctatttttctcataatacattttattttgatgtgtccttttgagctgttttggttggcaggtatagaactcgttcatttatttggtagtcaatgatctgaaggggtctatctctctctctttggttggccttcattataagtttaatctacattttaattggaaattcaagaactcatcatagtttttatatatcacctatatattgtcactgtaatgggagtttataaaacaaaaatctatcataactctactttttgtcttaattttccctttaacatctctaatggtttttccctatgcttttctcctccttaaggtagagggtagtactagatgatttgctattgttattattataataattattattattggattttgcagggaaggaaattaatgctaggacacttcaaattccacacaaattatctggtattgaattttgaccactcttctgataaaattcaaagtggaatgagaatgttattgctgaattttgagtgtcctagtattactaataaaatgaccaacatagacttggtccataaactattagaaaagtcttattttagttaccttttttactaaatccttatttgaagttgtctagtgtttagtttagcctagaggaatgaatttggttgatgtctcaaattataggagaaaaatagtaatatcatgattctaacatggtctctagacttgttttctgagttttacattgggagagtgatattccaacatgaaaatttctcgaggctagtttaacttgtgattatttagaaacccccctcctttttattttcattcatatagttaatttttcagggcataaatgaatttcaaattaagttttcgattaaacctaaacaaaatgttaataccaacatcttcctctgtcattcttttgctctcacggataaaacctagtcctcttgtcggtacaccaaaaatatgaaccaccaagaagcattaatggaccatcgttttacgcagacccttcttttaattgtttagtgcttagtttctttattgatttggtattatatttttttgtattttgtttattttctcaaatctatttttagggttgcttgtgtgagttttgagtttctgaaatggagtgtttggcattgattattatagttgtgttgtgtattttgaaatgttggtattttttcatacctaaccacatgcctatacattcctatttggttggattcctcagttcatgttatgctctggacgcagcacgctctttccctaatagcagaaaggaggatagaattagtgcgctaccttctcccccaaggcctcctcggtcttccccttttttcggcctataaaacccaatttgatttccactccctaacttacaattttgttagcaattctgtagtgaataaataataaatttgacttgtgaaaatcaatcaaatcaaagtaattgatatgccaaaggtgcaaaatttcaagtgagaagt

SEQ ID NO: 185203 - DNA, 6931 bp, Cannabis indica
ttttttcatttaacaaaataaaactgaaaatctaataagtaacttttgcaaaacacaagctaaaatagtattcttaaaaaataataattaaaaaaaaaacatctcatatttctagatcaattaaataaaaatcaatattagtgaatatccagttataaataataatctataaaatatgattgagatttgagaaagtatatatgatactatactatatatatctctacttcatttactatttcagaagctttggttgttagtttacctaccaaattatcttctattaaaaaatggtctctgacacaaaagtgtcattttaaatgtaacactcccatatttgtgctaatatttaataataatattattaatagatattcaccaaataataataataataataataataataataataataataataaatataatttgcgatcaaacttcttaaatttttaattttaacacaatcaaacttcgattctgttttggtctccactttggcatctactatggtctgttaaatattaatgtggactgccactgtgtccagaaatgtacacgtggtaaattttaattgatacctaaaaattcaatactgagaattaatcgtgccaaacttaaaggtttagggagtttgactgcaaattatcctaataataataatttgtaataagtttaacatgaatgagagaccaaatttagtgtctagaacaaaaaggcagccataatcgcaaatgcctcctttaattcatgtctgtcaacaggctcacctacgttaactttcttgtattagtccacgacacgtctttttaatactatatcacaaactaaaattggacataacatttgcctccaaaaaacaaaggcaattgtcgcacaatgttcaaattgcacgaagttttatatgtcacaccatcaaaacaatacaaataccgttaataatagagtaaagatataggcacacaaaatatacatcaaaacagttctcactctcttagtaataacactgttttttaaaatagttagagcactcccaacaacttctctactctacactttaaaatacatcaccaaaacttcacttattttacctcaaacttttatattacaccatacatcaacttctctatattttctttacatcaacttttatattaaacaataaagatatcagtcggaactattctaaaccactggtcatagacataacttagtaatatctcaatatctctcacaaagagaaggtttcaaattcgaatcctccctccctctctaatatttcaaaaccaataataataataattataaaaaaacagtaaatcctatctcaactaaatataacatataacttttggtacataatttgtattcacatatcattagtcaaaataataatagaggagtttttggcatgtgtttagtagggatggaataggaagaggaataagatagaagtagaagagagttgatcccacaaataatagatgaagggttttatagaagagaggttgcacatgcagccattaagaggggtgtcttgtagtggccttagccagccacccttagatttacaaagattaaaattaaagacccacgtacgtatggttttaagcaacaaaacaaacacacacagccttatcatttccttgtctctttctatgtttcatattatatacaaacataacatatatatatatgtataatgtatgtatgcatgtatggacagatggtgacatcccaccttacactatcaattgtttttttctttttgacattttattgcattaagtatgcaaatctcatattattaagttttggatttagcaacaaatttaaaagaataatcttgttagttgttaagtaaacaatatagtatttaacaattttcccccatataaaattatgtactaagttttgcttgttattagccaaactaatataatcatcacttaagtgttttccacattttttaattatggaattataggaaatttacggcaaaaattcctatgcagttcactttgttgcacttaaatctctatgtaaatttttttgtggcaaaaatctttatgtaattcgttttcgggagcaaaaatcccaacatcagtccctgagatggtaacaacaaagggactaacattgtaacaaaatgattacatattagagattttgacgcgaatttttttacttaaggatgtaaatgcaacaaagagaactgtacaagtatttacaccgtaaatatccccataaaataccctaatatatttgaagattactaatacatgcaccaaaatattacctatttgaagtaaatgtaattggttgaaacaaactgttacatcattgtgtggaatattttggtgtacatattgtatttgaatgtgacctatgttgaacaacatcattataaatagcaagcaaggtgttggtgttcattaatgattttgcactagaatttgaatttaaacattgatgtaaattggaaccaaatccatcaacaaggccaattagttcaaacaagttcatatttgaattggaggcaagaagttaactcgagtggggccaaaatgaaaaaaaatattttttgcagggggccaattacaaaaattttcacaagacagctagaattttatttacatcttcttcagcaaatctaattttgatctatcaatatgtctacagataaatatatttataatcagatattacctcacacagaagcagtgaaattctcttcattttggattcaacttgttcttgaagtggtttccttcttaccgcgctagctgtatttgatcaaagaaacgatatagatgtttcactgaaaaaggaaataccaaaaggtttaatcttttgtaatccatgtcaagtagttggtatgcttattttggtttcaatacaaaaaagcaaaatgatatgtaaagccaaaacaaaccaaattgttgtgtttgaccaggaggtttcatgtcattggttaaaaaaaataccatacaaaataggaaattaatctggaagagccacatcacagaatgtttgtaaaaataattaacaagcatatagtttagatttgctaaaaaaaccattgagagtagaaaaatgtgcaaactctctcttgcaacacaatccaaaggctctattttgtgtagtaacacatccttttttaccttgagtctttatgaccaatattacatgaattgcaggaaagtagtttataggaaaattcttaagcgagagtatcacttttgctcctacggtaaatacatttcttattttcggtatatagagaattgtaaaccgctttttttagatgatagcatgcattataatcatagtaggtatcttgtccgttttgggaaaattctgagtaatttatggtgccaaaaatatgattcaaatagtcaattgtatgcacgccttttttattttatatgcgtccaactaattattttaaactttatttttaatgtcgtaaattattcagaaattctcgaaaacaaacatgatgcctactattatacctgtcgtataaaaaaaaatagaatataatttccctagataccaaaaacagaaaacgctattacggtaagggcaaaagtgatgcccccatgtaaaacgctccctatatgtatattttttttttctaatctgattactattgcacagcacaaaattcaacctgttttccctttctaccattaagtcttatgtgattcaatatttcaggaattgcaggaaatttagttacctctttctcaattatgaatacaagacaccgttcatttcctcgatgcagtggaataatctctaaccatcaagatctcactacataactttcggggcacttgttctagtgcttttccttcttgccatgcttgcccgatagacactcctggtcccaggtgacgaacgtatacaacaacttgatcattgaaaggatagggatgtttagctgaaacaaaatgtagcaaaattcatgtttagtagctaaatacagttagtacttaagtcaatatcattgaaaggaacaatacacttgtcttctttaaataaacttagtactcatggagattttagtaactagagactctcacctggtctaggaaagccttgtgggtactcatggatatcaaattgcccatccccgaattcgtaagcaaaatcacaaggttgctcagtggacattacttccttataattcctcaatacgaaatacagtggactccagttacttgcaagttgttccaaaactgatccacctgagttgttcaatagcaacacgagaagacttgataccgaagaaaaacaattctgatatgctagttcataaaacccttgaaagaccgaactaaagacctactaagccatattgtaaaattttgaaattttgtaaatgcattttaaaagagctcctattcataccaataacagcaaatacacaagctatctatattaacttaaaagtttaatgcataatatggatttattaacatttagcatgaggcctctaatatgattggagggttgaactgacattataggtcaacagcaaattttacaacacagggaagcccaagtgagttagagaaacattaattaaagcatatttcctaaattaagtgcctcatgttgttaatttctcaagtttctggcgggtaaagattaaacaaacttaccaataaatcttccatagatattcccatctttacaagaaaataatgcctgaattcattagaaaattaagttgcttcagcaaggcattaaaaatgtaattattagacaacaaaaataaaacatgaaccccataaacatagtatttaccttcttaaaggaatttatccaagcaatgggcattggtcctattcaacaaagttcaatataaaaagcatcagtttccatttcctgtaacttcatagtggctgaatacaaaagaaaacccgaaaaacataacaagtgcccatttctcatgcaaggcacacccactcacaccacagaagagaaaaatcaccacataaaagtgtcataacatatgccactacttgcaagcaaatgcatatattctcagaaatgaaaaaccatgttgctatgaatatgcatattcaagtacacaatctgcagaccacaatatgtgtctgcttgagcatctgtaatttttccctgacaacaacgattggactcacctccggttgttcgacaatgataacattcaagtgacattccaccatcttcaccagagaacaagttgaactcacttctcttagctaacttgggatcctcatatcgcgtgccagctatctgccatgctcttgaaatgtgactgcatcgtatttacccgatcgttttcaaattaactatacagaattacaagatcatatgcaaatataaagtttcttttcctagtaaatgaagaaataaatgaatacatttgccctagtagaaatgtaaaatgaaatcaaagtaacccaactttttaagactttaacatattataagactaacagaggggttagcaagtgcagcaatcgatgacgcctttcttcaggaatatcttcaatctttttcctgagattcaaaataataaacaacagagtgaatgtgtgaagaagagcatcttcattataaacattgtcatttcacatttcacttcgaaacaatgttaatatgagaaaagaaaaaaaaaactagaaataggtctgagctggtggccacactaaaaataaagcaacaactgaaactgtaaaacatcaagattaaacataatttttgctaatatcaaaatcttctaatctatgttttttatctgcagctgaccatcacctttaaattttcaaaagctaaagagaaacaaacacaattgaatacttaagatgaacaatgcaacataagcaaagaactaacaattctaaactaacatgaaaaatcaccaaaatgttgaatcaattatgtgatgtgtatccaaacactaagagcaagccctttccaaagaacaatgaaataaacaattagaattattaatggcagagaagagaacactgaccatatatagacagctgggttatatgaagcagggtccaaaggaattaactcctttggaggatcaagaaaagtcacaatgtcttgctcatctaagaaaacccttttcccatttggaagaatttcatatggtttctcatcccaaggagacccataagcactcactccaccattaatggagctaactgaaccacgagtagtactactactgctactactacttatcttacattgtttatacaactcaaagcctgcaaaacccaaacaaatgaccaaaatcaactcaaatgattaattctttatcaaaccaataggtattttactaatagaatcatgcccctgaattattagcgatgttaaatattctccctcaactaaatatatttaacaaaaatcttgtatttcactaacattcaaagctgaaaaatgaaatatttaacattgataacaatttttctaccaaaatccatgagacaaaataactataattatccattttagctcaaacactaaaaccaaaatatttgaacaaaaggtctttatagcaagaaaacaattgattatctcagtctacaagctcaatttttgaacggataaaagaaaaactagacctgtttggtaagcgagaaaatgatggaaaacactactagactgtaaagagtaaactaatagataagagtaccttgagaaatacgatatggaaagttgagtttgccggagaatggagagtggtgagaagcggagaggagtggaagaggatgacggaaggttggcgttgatgattttgccgccattgaaattcagccaagaaacgaagaaagagaagagagtttcattttcgtaattcattgatgagttcttcattattatcgtttttacaagttttatgtcgttttat

SEQ ID NO: 185204 - DNA, 5693 bp, Cannabis indica
aataaaataaaatattgcatgttgtatttctattggtcgactcattttccctaccgtgcaccttccttcattataaattccattatttgccatctattctttctgatgtcgaaggaaaaagctcagacctagaaaccatccatattcgatctccgcactcttccccaacctcatctctcccatattcactcatctttttcccttactctaaccctaatatccacactccatcaccagatctgctccctacttactccccacactgtttactttcttctcttttgtattctgcgaaggtccgcatctcactctaggtaccattgttcgttcgatttaccttttttgtatttttttgccctccccaacggagaattgtggttcgtgtttggctttgtttttcactgtaatcagggatttatgtacgcggaatatgaatttccttgatggttgagacttcggttgtagtaagaaatagtttaaatgctctcatttctatattactcggttgtaatcagggatttatggggcggggtttataggaaatgttagatttagggtttattaacttcgccattttgattaatcgaatttatgattgtttgataccaataccagtagtctagtttctgatttgacgtcacatttcagctttgcgtagattgaaatcagctgtgctcttttgttattgaaaatacttgtattttatacattcatggtgtttgtatcgactttgccaagcttcatttcttttaagaagagtggtttgttatgcttatgcgttttttttttaatttatttgcttgtaaattatatgaattctgttttgtcactcgaaaagccataacgtttgaatatcttctctgcaactccatcctctatataaatatttatagccagaaactgcccagtaagttcccttttatgtgcattcaattgatgcgatacaatgtactttctgcatagttgaatcttagagtttatacagttataaatctaagcgtgaatatatgtttctgtatttcggaatgaatatacatcgcatactcattcattgtcttcaagtactgaatttatatagttattgaatatcttgcagaatttgggtatattattcttaaacagacgctttttttacttctgttttttatattttatttagctgtttctcttacaattatggtgtcttttcttttattatgtttataggttgaaaattttatagattgaagtttcaaatcgttctctgacttttttgactctcaatacagagcaaggactgttcatgacattttaatgctcatgcaatgtcgggtctactaaatgtaatattcgttgtctctgtatttatttaatttaacaagttttgctcatggctagtcattgcttctgacatgtcatgaaaaattgacaatatattgcattacatgtcaaatgtcaatgaatggtcatatgcatttgttttggactttctatgtgttgatgagtgagtttctgttcacagtcctctttgaatggatcaacaacaaatcttcaagatagcactggacgatcttttgcaacatctttctcgagtcagtctggtgctggatcccctggttttcatcacactggtgggtataagctgcttgagttcaacgttttgtccgttcaaaatttatgaagttcaatgtttttttcttggcaggaaatatgccggggctacataacatccatggcagctttaatgttcctaccatgccaggtgcactaacatcaagaaattcaacaatgaataatgttccttctggtggggttcaacaacctactggaagtctctctagtggacgatttacatcaaatagtcttcctggtggtatccctcaggtacctgtttcttcatttaatgtaattgcagatttttgctattatctttatttatttattaaaatattatcagcattgacattcttcgtttttttcttctgtttttcgtgcttgtgtacttgaccttaatattttgccctttgttcccccagttacaacacggtagctctcatggtcattcaggggtctcaaataggggaggtataagtgttgtaaaccctggattcagtagtagcacaaatggagttggtggttctattccgggcattctcccgacctctgctgcaattggtaatcggaatgctgttcaacaattgggtgtatcaccaattttaggaaatgcaggatctcggatttctagttctatggggaacatggttggtgggggaaacattggaagaagtattagctctggtggagggatatcggttcctggtcttgcttctcgacttaatctaggtgctaatagtggatctggaagtctaagtgtacaagggcaaagtagattgatgagcggtgttcttccacaaggtatgttgctttgaattgctagccatgatgtactgaagtgttaagtgagatctctcatgctggtagaacttgctataccgtgctgttttcattttctcatgtcacagaaatatgaatgtcagtgtttaagaccatttatgtcactatgcttcctgtatatgttttgtcaattgatgacttataaatgcgatgtctgttcttcctataatttctccttgcatttgctctttatgcaactactttgaaagaattagcgaaggtcaaaattgtataactattctgtttgcatttactatcatttggaagagttattgtggtgactgacagtacttttgtattgtaatggttcttcctttcccttgaattgattataatttctttcccgcaattcctattttacttggtttagatatctgtagttgcagttctgtgagaaattggataatagcatttttcattccagtggttgtatactatgaaaatttgtgtatagggtaactatgttattttgtattttgttaatttatgtagtttctaagttcgaaatagattttttttttaaaaaagtaaataaaatcaaattgatttgaatttttatgatgaggatgaggtgagcattaatgtgtcactgttttttcccctatggccatagtgtgttatgggtcttaacaaagaaggcaccttattcgcaagtcatgtagttaacaatagatttatcataatcactttaactagatgccatttttattccttaacatggattttatgcagtaagtaaatagatttgtaaaaaatgagtgataagtgccaaatttgactgtcttaataattttaggtatgctattttactatatttcattcaagctgttttgttcctcaatttattccttggttaggacattgttggtaggtactgccagcatgaatctagttttcttatcttgatgtatgcccaccagaggctgatctgattaatatttgtttgattcttttggtgtctctttattttctggtatatgagtaatctttgctgtctgctagaagtgctatctttcactcggtagctgactgtttctaggttcaggatctccccaggtgatttctatgctaggaaattcttatccaagtgctggaggcccactttcacaaagtcatgtccaagtaaataatctaagctcaatggggatgttgaatgatgtcaattcaaatgacagttcaccttttgacttaaatgactttccccagttgacaagtcgtcctagttctgcaggaggaccgcaaggacagctgggtaacttcattatttacttctttttttaatgacacgacaatgtttgtcttccaatcaggaagatcataatttgagcgaaaatttcaggttcattacgaaaacaaggtcttggtgttagtcctattgttcaacaaaatcaagagttcagcatccaaaatgaagatttccctgctttaccaggatttaaaggtatgacaattgtttatctgtttcatgtatttactatgtatacatctctgctctaattgaccacagtcatagtttaattacatcaccattctattattttacatgctgtataaatccagtgtgttgaaagctgtccttttaaatttatatctttggctattattaccttataacatgtagtatatctacgacggcagccttgtaatatgttcatcactgatatattacctgcctttttgtattattgtctatgtcctgccctagtaccagacatgtttagttatgtgattttaaggtcgcttgtgcattttttcacatatgccttcccagatatttcgtttcttccttacctctctcacctgcttttttattaatgaatgaaaacttttattgatcttaatgaaacaaaatcaacaaaaagtagcaccaggagatagcccagcttaaacttattaaataatttcttttaaaaaatatattatcaaagaaaaataaacaattcttaaatgtttcctgttggatttgtagtttttttttccactcatgaggatgccttatttttctcttcttcgtgtttgagtatgtgatcactgccttgtttcttagttttttcaatatatcagcttaggtgattctgctttctacccgagtttgcataattgtcgttttctatgatatgattttattttatttttgacatggggagggggattcaaacttgagacttctcagaagagagttgtagtatcattaggctatgcatacaaccattggtttgctgtgatcagactgcatgctttgaaagctagagtagaaatagtggcatttacagagacctaattttttgttgacacaagttagagatgttccattgtactaaattttatttgttttattttctttcgggagaagtttgagtttgtaagatttttggaggtaagatacgcatcggagcttggggttataatttgtggtttgatttttgcagtacgcatttgtttttgtagactgtctgcactttttttgaagtgtgttttaaaatggaaatgtggatatttattgagaaatgttaaagagtaccattggtgcccaacaccttatactgctattggggcaaatgaatatcgggtccttgtataaatcaatttaaattgagatatgtgggatattctactaaattacaccaatgaagatatgccatgtcctaggagaaaattattagttctattgtcgaaggggaaattgttccgatgtaactaaatttgtttagctattagtacaatgttttaatgattattgacttggtagtacagattttaagcatttacataaattacttccataggtggtagtgctgattatccaatggagatgcaccagaaagaccaacttcacgacaacccaatgtccatgatgcaatctcagcattttcctgtgcgtctcaaatagagatttcgtttgctctctttagttgccgtgcttgacatgtaatggggttttcttatgctttgtcttttaattcacagatggggaggtcttctggattcaatcttggcggaacgtattcatctcatcgtcctcagcagcaacagcaacacgctccatcagttagtagtagtggtgtctccttcacacctggaaacaatcaggatcttttgcatctacacggctcggatatgtttccttcacattcaacctatcattcccaggtagtcaaatattataatttgtgattagatggttagcaacatgaacattggactgaaaagactattttattttgttataaatctttacataattaagtaaacggaaagag

SEQ ID NO: 185205 - DNA, 13544 bp, Cannabis indica
attccagtagtcttactcacctttgtcaaaagcaaaactgcaataattacgagtagcgaaataccataaacctgcatgccccacacaagaatcatattagtaacttattggtactgcttcatgttgattgtacagcagatatttgagtaggaaaagaaagtgcaggaaagcaaaagcaattaagaaaaacataaaaaaaatataccagaaaacttttggttttctttgtgatgctcaaatgatacacaagaccatattgataaacgaaaaagcggagcgctaacagtatctcagcaatggcaccgcgcatcccagagtgtcgaagatgctgttgttctttttgccaccaagattcccaactcttatcaggagagacgccaatgccaccttgattgcttatccacttattccagtcattccagtcatcgactatcttttgccactcaaatcctgatgggttgaagagaaaaggagcaaaaagccatgttcctaccataaaccacattgatacagtgatgaggacatatgcaactacacccgtatatgaataaccaaaaatgtgataaactagaagcagaatcattagttcaatgcccttgacaaaatgactccttgaatagaatctatagttttcagcaaattttgcatggaacactacaaatccacggcctgttcctctatattcagcccctccatggagcagagttcttccataatagtgcgtctttgttccaagcgaaaatgtgaaaaatacaggtgctagttgtaattgcattaatatgaaatcagttagtgcattccggaaccccctttctaaaccaatttccatcaccataggcagagccatcaaaagtccaatttggacaaaagactgagaagcaagagctacttgaagagacttattatctcgaatagctggctgagttcgcagcccctcctcaagtccactaagaacaagataaagacggccatagagaaacacatagactgtgagcacactcagctgccagaaaagagccaaagagttaaaaaaaactacccaaaagagagagaaaggttgatcatacaaaaatttacttgaataacctaccaaggtgctgaagtagaagccaactgtggtaaagtaacatgacaacatccggaaaaaatcaaatctatgcccaagcctatatatatcacgacttatagtctgctcgccgttcccattagctatctttgcctcaaacactgagatctggttgagtccaacatcccttcctttaccaacttgaatatactcatgatgagttacatttccttcacgcagtgtagaattaaatcctgcatataataaagttgttgtgtaattatgacagaaatcgaatattgatcaagggagagaaatgaatatctgcagaaaaaatatattgcctgcaaatatgtcctcgcttaagttgatgatttttgaagctttgctaacacctcctcttgtcaggtggaacagcctatcaaagacatcaggatgaccgtagtggaagcgaactctgaatgaagatgaaattagtataatgtgacacaaaacaggtaatctctaatgtttgcaaaacctaaacaagtgggctccaatatttgaaaatgtgaaaaagtgagagagacacataggtaatgacaagtgtgctaagaattcattgtctcaaacttttagtactttccataaattctacatcaatttaatgctagagcattagtttccctttgtatgttaatctttagaatcttagttgcaaagccaatatccttcatctcaaactctgacttgaccattccttttaccttgtccactttttatcacttttttaaacaaacattgttatttcaagcataagtgtgtgaagtgaagcaagggacattacccgatgacaataaatatgtgtcgagtaactaatcggaaatcccactccaaagtgatttcaagtgaatcacttaaaagggactcacctgtaatcatagcacccgtacttcatagcattttctttcctttaaaatgacactgtttcttaaaatgtataaacatgtgtgtttgtgcataataatcagaaacaacatacaattccttgtctgtgtgtgatataacttataaatcatagcacaatcagggttgttagagctgtttaatagcccccaaatcagaatattttcaaaagcaacaagatattatgattagactttattgtcaacatcaaaatgttttcagcttcatagtctatgatactttgagctattctgttttatttagctagcatttcatggttcagacaagaaatcattcctccaaaatatggaaattcatttggaggtagaaaaaatacatttatgctattataaaacaatcttatgactgtaccaagagaaattcttactttagagggttagccagcaatctctgcccaatggtaacaaaactattctcctgatttgacataaaccaggccagagatgagacactgcaaaagttcacaaaagacatgattagcaatacaaactcccacgcattaattctttgttaaccagaccagcaaggtggcgaaatcacaattgagattaacaacggtaaataccttccagtgaatatatgctcccttagtcccagtattgttggtgttctcacatcaccatgtttttcaaggagttcttgcaacaaatttctcattttgaaggcttcttctaaatagttatcctgtgggatacatatatatctcaatctgattagcatatgctgtttcaaatgctacgactataactagataatgcaccaaaacatataatttattgtaaaatagtacttggttcatatctatagtttgcaatgcttcaccacgtgtgaatataatggcatgattttgattctccggtttcccctcacccaacattgcaggtcctggtagctttatctgatatattaactgcacaagattcataaaatcagcctcaaagtactaattagagtaagaaatgcttgttctgtaagaaatgcttgttccggacaaaggctaagagaacttgcacattatttctaattcaattataataataagagattctaagctttttaacttgagacttaacctgatctagattttgcactagctcagaagaatcacttcgcttagctggcaccttcacaagttttgagtaatagactttctgaacttctggtttgaattttattttactagctccaatggattttttcttacttgcctctaccgatttgtcttcactaactggttcttcaacctcatcaatgtaagctactcgaagtgatggataccttccacaaaataaaagaaaacagatataaccatgaatatcttataaagtttgaaatacacgaagataaattattattttttgaaaaaagaggagaggtcgttgtcttagactgaccaccctctagtatagattaaaaatcttacttttggcggaggaaaactgctttaaacagagtaaaagagagtgaaaaaacgaaaacaacaaagaaaaatacagagaaaacaaaagatattacaatccagaacctaaattacaacaggactctccattctctactcaaatctagaaaagataagtcttggaaatgcttggttctgaagacccatgttgctgtccagaacttgattttatcccaaaccacttccgctgagttctctatatcttcaaaaattctggtatttctctccaaccaaatagcccaaaattcatatcagctactacttgacattactttgtgtggatggctagcagttatagtttcctttttttttttgaaagcagctagcagttatagttatttacttggttcttaggaaagttgttggagaggaaaagtggcaagtttatatatgttagtagttagcataagaaatgagatagatggtaatataattagtgtttgggactgagtggaagcaaggaaaattggtgagaaaattgtagagagctagaagcactcataggaaactctaggccacttgaaatgcctactatctgtatttggtgtatttctatgatcaacaatatattgaaccaaagtatttctaagataaactacagataacatacgttctcataagtttcaaaatgtcattagcacgacgttcccctgctcgtttgtcaatgccatattgctggcatgacacaacatatgcaaacttcatatcagctactgcttgacattgtaccattaatgacctttcacctagctctgcattgtccgattcagcagccttgtagcctttcatgagatctgcatagagaagcaaataaaatttagtgaagtgatcatatatggagcaaaaagagacaatgtacatgtactttatacagcaaattcgagtaccagaatccttagccatgtccaagaaggcctgaagttccattgcttttcggtagtacatcatgcctcgaacttaaaatgtaagagtggcatgacaagtaagaaaaagtactaacaatataatataccagtttacagtaagtaacaatagtacctaatataatcaaacacacatgcgtaagtataacaagatctacaaggcagaattaaattaaaacatagatatagaaagagaatatgcgaacctgtttttgtcaatgtctgacccctgtatgaggcccatagacaaagtttttcttgtagttccacagtgctcatgagttcttcttcacttaaacaattaacacgttcaagaaagtttgtccattcatctgtaaaatagtaaattcaacatgtaatttaccaagactaagtacacttgtacacaatataaagagttggaaacatataaaaacctggaaatattttttgcaagtaaaagagaatagaaactccatcttcattttgttcttccaattgagaaacagaaaatgttacttcctctgtgtagtatggtgttagaactctgccaaaacgtatatagttgattactttctatttaaatccttcaattaagtgctgttgtcttaatttaacataaattatatgcaattacaatatggaactttttaagataaaatgaacttacgagaaggaaatcatatttcgaactttgggagcaggaggcatttccataaacaatgaattggagaagaaagaaatgcgccttctagcttccaaattagatggtacatccatagcagactccttctctgtgagcaagagatgaatccttctaatctgtagactcaaatttgatcaaaattttagccatataactaattttattcaaactgggagatgagatgcatggtatacaaaataaaatagggtggtgataaactgtgtataggagaattcatgcattatataagaatagaatgatagtaagcttttcaatgatcattcattcatgacaccctttcagcaatactaactttttctttccaagcatcggtttctgaggtcacaggaaacctaagttcactgaaaaacttgtattgttgatcaagcggcatcatgccctcatccttttcataaaggccaccaccatggctagactctagcaagctgcatgaaagaacaagaaatacaaaccaataagactctcaaacacatgtattactaacaacactttttccaaatcatttaccttggcgattcatcctccagtatgtctcttgtaacaatctctagcatatttagcaagatgattgaaacctcatctttgtcttctgctttgttatctaactgcagtagccataccaatatcattcaagctatcatcttgaaatagagaccggtagggaaaataaaatcttgacaagaaaagttaccaaatattttatcagaataacaaattgttcatagaggtcaggcagagcactcatgttcagttctgatatcaaatcttcttttttaatatgctcatcaattgaggagaaaatattgtctataaccctggagagacaaaaagtgattagggaaataatgacaagaatgtcattcaaccatatttatgtagtccagttccagacaatagacagggaacttacgttgtttcacggtgtcctaaaaccagaaaacgaatgatactttgaaatgatgagtaacactcttcaacagcacaaagcatatactcgtccttatttattctctttttgagctcattgtcttgtgacctttgtccactgctatcttttgccatgtccaatgctattggtatctgcaaagaaagtactaagtaaagtaagtaatttttctttttttggtatcaggatcccttcccagaaacagaaaaacaaaaagctaatggccaaccttgcttgcaagtaagaagggaggccattggataagcttcaaatctggatcagccatgtatggaacaagtaataagtccatctccctggaatacaaatttattatcttgttggataagatatcaaattcattatgttaaacacaaatgacactacctattacttatagactaaaatgggatattggcttgtttcctgatgcagcattcaaattttacctgttacttataagatcttcctctctgaaactattgactatttcattccacaactgggcaaattttgttgcctcccgcgttttagatagaacctaaaacaaccaccagcttggttatgactaaaacaatgtccttttaagtaattatatatgtccaaatgccaaattgtgtaaaaagtatcaattagaatatctggcaatgcaaagcagtaacaaaacctctttgtctttgcgaaagaaagcagcctttatccccttcttcttcgtatgctcacttttgtcctttggaattaaaagatcattaaaagcacctggaatggatctgaatcgagaccttagcatgaccagagtccgaatctgagcaaacaaaaaaagaaaattatcagtttgatactttatattcaccatctcaaaatcaataaaaggaaatgacaattaaagagataacattctactttctaaacaagaagaaagcttgatgtgaagaactgtttaaataaaggaagattaagataccacttagctaagtgataatatacaattagtcaattcaagacaaaacctttacaaaccacacacttgattgtgcaacacataacttagaacattagttttttaatgtatctgaaacataaaaagtgcatgcagcacatgaaagtttattatagtaaataactaatagatagtgattaaaatctgtgaaatctaaacaaaatagcaacttgcatttagtgaacggtaaacccaactgctatagtgtcaaatatactttacttggttgacacatcataaatttagagaaaattttccttgtaaaatctaggtctaactaacacatgattagcatgaagcttttgaagtatttccacaagatgaaacaattttagggaagtcaaagatccaccaacctcaccaagacgcctaaatgcaccatatatacctccaaatattgtggagaaaatagcataccaaatttgagtatccatgaagtagacctacagtgatccaataataagtttaataagctcgaaagtaagaaatctacgaaaaatattataccaagataaacagacacatacaaggagaataggagcccaaagtgcaatcaccactccaatgttattattggctgcaagtaaaatataataatattttagttttaatttacaacataaataataatgtatacagacatgctgttaccatgggggaagaactcatgccattgataggttgaaatatgaatttccataatggcttttgttggacctacaagaggcttaatctgcacatacaaccaaaagagcgagagagagagagaatttggtatcaatgccaaatagaataaacttgacattaattaaaccaggttcaatatatatacagaaatttcaatttaatggagaagtaggaaacaatatgtggtatctagatcaaagatttacctcaagatagtagctgaatgctaattttgatacaagcaagagaacccaaaacatggtgtacctacaaaaaaaaaaagcaattgtacaaacttatttataaatttcttgctctagccattcccaaaaaaaaaatataaaattgacttaaattcacatgtttacttgaaaagtgaaaataagctctcatgcattccccttccaacatagagccgaggctgcaagacaaccaaaattaaactatgagaaaagaaataatgtttaacaaaaataacaattcctggaaaggatataggtaagtatatgataaaaaatttaatcaacaaagaactttattaatatttaaaaaaatcttctacaacttctctatgcatacctgagaccaccacatcatgactgtcaaaattgtatagttggatctttcaagaggtcggcgaatgaatgggaatagaaacaacaataaggacagcatatttggagataagtaaattacaacagccataatgaacacagaagatgagcctggaccatttccaaaccagttcttcatcgtctgtgcaaacccagaaggatttttcaacccatatgcataagtcacaggtaagataacaacccacgctgcagctgatataacctttaagatatatcttagctggacataagaggacatgctcttccgagctttccagctcaaaattacatcaagagtggctgcaagataaagacatatatataagtataactcacatttgatagtacaacattttgaatttgattaataaaatttgacaatcaatgacaatttagcatcttctaattgtagagcaaatttattagaatcccatatcgactgtggaattggtttgggttgtgggtaatttataaatttctaggatcctacttagactaagtatgggattagttggtggttataactacttgagcatgctcctttcataagtcattcttttgggagtgagttctacctaagtacccagtattcttgagtagaaccctggaaaagccctactgggtattttgactaataagttgtgtgaggataatataagatgatcttatgaacgatatattactttatgcataccttgtcctagcttcaatatggcagcagtaataaagatactcagaactttattgaaaacatccgcctcaaatatggagcttaattctccggacccattccatgcaactatgatcatggccttaattcagtttagaagagcatacaaagaactcattaggccaatatatgcagcataatatgagagagggatacatgttaataaacaaaagagaaacaaacctgtaaactcaaaatataaaagctccacattctatcaaagctcctaaatatatggtaaaatgagcgaatctcaacaaagttcgattttccaatccatcgatccacattaggagcactcctttcctaaaagtgatgaatttccatcagtcagaacaaaactatcaaatcataatcaagttagggcctaactagagcatctaaactctacaaaggtaaggaattgttgattcactacaatgtactaatgtaactactatttcacaacctttcatcggttcctcttaactgaaataattaataccctacatgtgctttcccattaaggggagaggtttctataatcgatttctggaacaacaatgaaagaaagctagctgtgagaggttttgttcgaggaaattgtcaaagtatgatatttgaattgtattgggttaataattcaataagctaatgcatatatttatgttcaacatttagattcaatgtttgtgtaagttctattaatgtagtcgataagtaattattagaggaaatggtggttgatggttcttgagtcacagataacatgattcaatagttaaggtaatgtgtgtttcaataagttctgagaagaagattacccacatttgtgtgaaagttaccttgtaggtagcttgttgattgataatggaaagctaccacataaatcttgttctactgatattctgattcattagttattttgatttactagtttaggtcattgaatgtatcagtgtttgtttttgtttacttgcagatttaattggtggtactgatctttaaaattaattaatagaaagagtcaatcctaataattcagctataccaatatacatgaaatgaataaagtatatatgtaaaatatttatataattataagcaggactgtagtttttttgcttattattgtttaggactgtatttcaatcaggattttaatatttcagatttcttagttatgctagccttcaacccttcactttgagttgcaattaaatttattttcgtagtcatgttaagtttctttacttgttataatccaaattcttataataggcatcctttaaaacaaaattcgtatccaaattacaatatcatcacataccttgtctctatcatgagtatcaactttgttatcattaggacagcaaaagaaagaagaagtagcacgcataggccaacctagcttaaaacagtcgacagtcctacaagaaacatagtattatgatattggatctcataattaccaaagcaagtaatttaagaaacaatggacatgataataccaaaagtattcattcaggtcatcatagtttctccactgagaatgctttgattttcctttgctttttcgagattcctatgcaagtaaattaataaatttgttagaatatgtgtgacaggatgaaaaggaaatacatgcatgaagccaaaatatattattacaatcctctacctgtgcaatgatattatatattggagttacaacttttttgagaaaagcctccttttcaccaccataggctggctttgtgggttccccagtcattggactcatagttccattcaacaccccatacaattcaaatgccatctatttgttgtgtgtatgaaccaaagatcaataaaaataagaaggcggcaaactacaatgtgataatctagacaaaacaggtaaacagcgataaacaacaataaaagtacaacattgaacagaggccaaatcataatcgagcaaatagcatgataatagttatgatcaagatttgaggaaacaaagaaacacatataagaacaaaacccttataagattccagatatcacttccatatccctttaaatttcttcatcatgctcttcctatttcatttaaggaagctcaaattcaatgtttcacatcaagcaaaatcagtctatattttttttccgaacaagttcaagatttcagatacacataagcaaaagacactaggaaaatgtattttcagaagagtatacatcaatcaaacattagtagaagggaaaaacaaaaaataaaaattaaaaaatagaagaaacaaatctgagactaacattctacgatatctactgcatacatgatggtatatatagcaaaggcattctggcatgaatctcagattagcagcttctccccatattagaagatataaacccatgtatagtaattttctctgctgaacatcctgttgaatactcggcaacctgcgtgggatgggaacagccaaaatatggttaaaggtaacaaagtgatttgaattttgaagtatattctgtgatgattactaagacgagtgaaggaaagctaaaatgtatttaacactacattttcaatgattaagaatgaataaactaatgtccttgaatctaagtatacagcctcaccataggctacttttgcgatccaagtatttgcaccacttcttgtagtttttgaaaagtttcttcattacttctgtcagagcacgatcatctatctgaaaaaaagttgaatatattagtctatgccaacagttaaaaatatggcttactataaaaaaaaaacgaaacataggatgacaagattgaaaaccttgtattgttcaggctttggccattgtcgcatgtgcacattagcaagcaacaaaatcaaatgctccctttgatttcctacattatccccctacatattaagaaatggaatataacacatcaagaaaaactcgaaaaaacccaagtaatgaataagaactagttctatgtgaacttacctgaaaaccaaacatgagcatgagccagtctagaatgtcttcatcatctttctttttgtgctcccttggccatggcaaacctctagtattacgaagagccgaagcagctgctttgatctataaaatgcataagcaagaaacatattagaactataagataaatacagaaaactaaatcaccagattttggtacaaacctcaggataattcatgatagcatgattttgaccttcagcatcaagtggaagaatattgtaaggtacatataactgtgatttttcttcaaccttggtgtgagcctccaaaatctgttgtcataatccatacattatcaggttcccaaagaaatgtaatctttgcaagaagtagtacagcatagtgttgttaaatcatggaggagttacaagaatgtccttttacctcttcagggacggcctctgtctgattgacagctctcaaaacttcgaacagcaccttagcagtttgatatgctcttgtcagtcgggtgctgattagaaaatataatcaatctcactatctaaacttctcagacaaagtaagtaaaagaaacttaacaaataagtactaaccgatcagcattgtcaacttgttgcagagcttgaatatattccttataatatttcctataaaagctttgcatttcacgagcatcactttttacctttccttctaatgttgtcttgtcttcctgaaaatacttaaaattctcaagatttgtgcctaatttcaaacagacacaatatgtaatacagtaaaagagcaaaacagacaaagcaaaaacatctgctaaaaattataagaagctcctcctgttcaataaaaatgtccaaaaccgatcgttatcaatcttcatttgcatactagaaaaatgtccatcctcaaaattctccttatatgctataaagattactccagataaaaagtcaataaaatggcatggactgaccatcacagtatgattaggttttctattcaaactacaataattccaacaattgaatgacaataaaccaaataaaattgcctccccatcttttttctgacacaaacacaaaggaaacaaagccactgcctcctttctgcaacacatcataaggtcaaggcctccatctgtcatggcttgtgatcaaagtcatactagagagcatgtaggaatggaaaaatatgaatgatcatcaccatccatgtagttcgttaatggtatgcggttataatttgactataatgacccaataaaactgcatgcaacaagtgaaatcataaccaaagcttaccttttctaaacgctgaagaagtgcagttttaaattgacgaacaccacggccactagatttgggatctagtctatgagctttctcaaaggcatagaaccgacctgatttcaacatgccattatggactgatttaaaattccttcgaagtaaatttagtaatgaataacacattagaaccatcaa

SEQ ID NO: 185206 - DNA, 3894 bp, Cannabis indica
aaaaaaataaaaaatgtgttgtcaactcaagaatgcccaatagctaaggttagctgaagtaactaagttggaggcccattggacccctaagttttaaagcccagaagtattcgactggatcaatcaagattgtagggccggcctagtaagaagttgggaaccacagaataagagcagaggaggtggagattgtagagccagccactgccagccgagccgggtttcctttgcaacttatctggtacacaaaactaaaccttattaattcatccatccatggctggtgatgatgaataatatgcaatctcccatggcttccatacccaaaccacccccaatagctgacctttacagacattctttctcttctctccactgtctcgtcactttatcatttccttttcgctcaactacgtatcttcctcaccatcgtttatgcgccattcagactggcgcagacggtggtcgtagcagaatcgaaaggcaacaagtgttcggcccagatttactgaggaagccggccgtgtctccgataaaggacttgtcggaggaggaggaggaggaagaggaaaatgagcggaagagggtttatgaggacgacgaagatgaggaaaagtgggtggattgggaggacaagattttggaggacactgttcctctggttggatttgttaggatgcttattcattctggaaggtactgacagttttttccaatttaaaattgaatcatttcattgctaatgtaaattgagttgttctatttggctttggtatttgattgaatcgattgtaattgctctccgacataatttaagcaatggttgtccatgtaaaaaaaaagaagctatttttctatgcattaagatttatatatgcaattcattgaaaaaaaaaattagatgtgcaattgggtctatggaacacattttgggtatagatactttggcgggaatggctgggtatcctcttattcgtctgttgtttgtgaagtaacttgttacttttacttaggaactaaggttggggattttagttctaaatataccaactccccgaattggtgctttctttttttgtttttataaatcttactacacaaagcatttatccaattaccaaaacagaattaaagtgtgtaatataagcaccatatattactctcacacatgagcaatgaggcatgtggaataaatacacagaggtttcttttttttaataaaattacaccaaagagaacatttatttcattaccaaaacgctattataggattaaaacttggtagctactaactgtaatataaataccaaaaattacttacacaaattatcaaaactttatcatggagttaaagcttggttgctactaagtgtaatataaacaccacaaagtactcgaattgttgcttatttatgctaagattgtttctcttgactttggaaaaaggtagtaatttttctatgagataataactggtggccctgttgaatggggatatctgttaattagttgctttcacacagtgggataggcaactaaagtttgaactagagctgcagtaacttctgcctgattattttgctgtattacttactgaaaatatctagtattttttcatgttttgttatacatttataaaattatattgtgtcttattgtgtcatgtgcaaatttgtaatattatctgcagatatcaaagcggagataggttaagtcctgagcacgagaaaatcgttattgagaagttgcttcccttccatccagagtgtgagaagaagattggatgtggaatcgattatattacggtaattctctgcatatgatatgcctagattttgttttcccctgggaaaaatattagagttgtgtgaatttaattgttttgtatctttatctgaaaacatttttgtaggatgatgtattcatgcatcttcattttgttctctgaatgagattttggtatctgctatctagaatgtgcaatcaagatgttctaattggggtgattaattattgagtaattatataattttatcatattctaatgtaatcttgtgtgtccctttgaattgttaggttggttatcatcctgattttgaaagatcacgatgtttgttcatagttcaaaaggacggaagcttggttgacttttcatattggaaatgtatcaagggcctgattaggaagaactatcctttatacgccgatagcttcattctcagacatttccgacaacggcataagcgtggattatgaagttcaaataatcatcgtccctgttaattatgcatgcactcttgaatgagaaaaggtaaaaggaaaagaaaaaaaaatagaaaaattcttcctgctatatctcattcttttagcgcatggaattagaaagtagactctacttatatatatatatatatttattcattagaagttttgttgacatggttattctcttcaatagatattacaatttcgtgctattcttcccattatgaatatatgattgtttgccagaatgtttggctctccaaatttcagttattttttacggtgtgctgttttatattcacagtattttggtcactatcaagtatcaacaagtacttgcgttgtgacctaacattttggcataatgcacttctaaaaactttagaggtttaagggttgtctgacattgtttctgttttttatttttataattgtggtttcagtaatgagaacagatgagatgacagtatgggtagttttcaaaattggttaaatgttttcaaaaattgttttagattttttttgtaaagaaaaaaaaaaaaccttcaatattccacaccttgacaagacccaacctcgaccctggtatggactctggacgttggctctatcttaatcctggacctaagggtgttcatccaaaccacgctacaccacactgcactaaaatatgcagtttaggacctccgtggtgtggttgccatttgaaattttaccaaactgcgcagtgtggtgcggtttttgttttgagatttcataaatgttgtttaaaccataccgcaccgctcttagaaaaatactgatatttttcaatataatttatatttatatttaacttataattttatttaatcttattagtgttagtttgtttaagcattacatttattaattatgtacacataagtttgtatttatttaatgaaaaatgtgagcatgttttacaaattaatcaatattctatgttagtatgaaagtatttttttaaaatatataatgtgtactatagtttatactatattatttattgagttaatttagcattttgtatcatagttttatgtcatcttcattgttttgtttgaatatttttagttatgaattttttgcattataaacctttgttttgcattgtttaattcttaaattagttagtgattattgcaaattgctaacactacactgcaccacatttttgttgtgcaattttgaggtctatatagtgcgatgcagtttagaaaattgttcaaaccacatgtatggttcgataaaaaaaaaataggctaaaaatgcaccactcacactgcaaacactcctacttagacccaacttgggcacggatctcaccaggcacataccctaacttggaggaccccgaaccccagtgccagacctcggcctcgatcctggatatcgacctcgatctcaggtctcggtcccaaatctcagcctcagtctctctgatccttacccctaccctagactcgaggcccaacctcgagccctggatcccgatcttggccctgacccccaaatctgtacctcgatgtaggcctagttaaaaaaaaattatgagaaaaagagaggtatgtgaaagaaaatgtaaaaaaaaaaataaaaaaaataaaa

SEQ ID NO: 185207 - DNA, 5518 bp, Cannabis indica
tctattggaggcttcccatcttttgttgaagaaatgaaggtaaaatgtgaagcacatacatacattgatagatatagtgaaacataatccataattttcgtagtttggtcttttttttcttcttgaacacaggtcttctataaagaaaggcttaatgggtattatggtgtttcagtgttcatcttagccaactttatctcttcattcccctttttggttgctattactcttgttactgggactattactttctacactgtgaagttcagaccagaattttctcattatgtattcttctgtctcaacattttcacctccatatctgttatagagagcctcatgatggttgtagcttcattagtccccaattttctcatgggaattatagttggagccggcattatggtaagaaatactttcctctcttactcctaaatgcttgttcttcttgttattggcatcttaatcaagattacctcttttaaaaatgaagggtattctgatgatgacatctggattcttccgcttgctccctgatctgcccaagattttttggcgctacccggtctcattcctcagctatggctcatggggaattcaggtaacttcttttgattcattaggttaacatgaaaaattaggaacattgtcatttcaaaacaacatactgcaagtgaaatggtcatatatagcactccattttatgattctttacatagtagtttttctgaaaacttgacaccgtgtctggaaggctactatgcaatgaattatcaaaaggattattaagtcaagtcttagcctaaaaagtgttatgaacaaagaagagtattatcttgtctctctaattactgaaaaatgtgcttcttcttgttgttgttactcagggtggcatcaagaacgatttgcttgggcttgaattcgagccactatttccggggccgaaattgacaggagagtatgtcatcacaaagatgtatggtatttcagtaggtcattccaagtggtgggatttagttgctattgtggccatcctcatactttaccgcagtctattcttcatcattctcaagttcaaggagagagcttccccattgtttcaatcactttatgccaaaagagctctacaccatcttgacaaaaggccttccttcaggaaaattccctctttcccttccaaacgccacaaccctctctactcgctgtcttctcaagagggtcttggctctccactcccttaatacattcttcagcaaaaattattaatataagttgagctgcagtacaagacactaccactgaaataaaccagattctgcagttttgagtagttagtcactatcacattcttacaaaaaaacataacaacattcagtgtgtttatgtttcatacatgaattattgtctatttttaaatatttttactgtcacacttgggaattttcccatctacttgtatagctcaaatatacattatttatatgccgtctatctcattgtgaaccatctaaggtgtcaatattcaagtgctcatagcattgggcgcataagccgaaatatcattatatatatatgtctgtgtgtatatagagaatcagagattatgcttctgagccaaagttgaatagttaaaaagaaaaacactagaaagaaatacacagtgaaagaggcaaaaacagaagcaaacaatttcaataaattcccctttacaaagggcagcttctttatcttttgtacctatactaatggggattctctagaatatggaaactcttcagcctgcactctgcaacactgctatcctgattggagtacagaactgagatctcctgctaaaaaaaatgttattattttgtcaactaccaaggttgaatttcccacctaataaaagcccctctacacgctatgaattcctagttataaaaaatagaaaaatgaaagatagataaagtggcattctgatatctaatctgacatggtattggtatcgcccgttactaataatgccagcatttattatttgagtatggacacatgggtgacgaaaatagagatgataaattaaattcaattagtccaaaaagaggaataatttgtgtacatatctgcctatgtacacgtatatgtgaagtattacatgaacggtacatgaggtatatcattatttcagattatgatggattggttgagcacatttttacttgtatatcaaggtccccaatacccttttattctagctgtattagcctgaaatctgttatcctcagcctgatcgatttcacacttttatagcaccttaattttatgtagaaatttaactacttacctatatctcacattttaaagctaaaaatactagtgagcaacaattacatatggccataatattgtctcttataaacaataattccttgctttataatgattagttcatgtgtatgtttatgactatatttacacacaaacagacagttactttaatgtggtttagttctttttggttatttgaaagaagaaacttaccatgtttgaactaagaccatttacaactacaaataatcaatttcatatttagctagagagtatgaagtggtgccatctgtgatttcttaccacttttccaatacaagcaatcagttctgtaaacatggatgagagaggtggcatatcttgaaaaatagtgatacattatacactatgataaagtgcattttgaggtttgatttttattgagactcactatcagtgagatattattatatataaaaaacttaagtactaatattactcaaaatggtcatgggttagaagctcctttagagtttttccatctggtagtcaaagccatctcaattgtcagcctgatcttggtggtcttcttagacagtattcagtttgttggaagtagaagtaaggtgcttaactattgctcatagaccgtttaatctaggagaccaacattgttagcatttctctcacacccggtgaggaagcgtaattgtttttagtgcatagaatgaagcactagactcgatttgagttaagtttgattattttaattatatatatagttgtattcttttcctcctcactactttaaaaataagaacaatatttctaatagcacatactagtacaataaactatagtcaaagagaaaacaaaaatcatatttttatacgtcatcatgaagagagaagagattctgctttgaacaagtgtatagatagatgataacagtaacatgatgagtttggtgagcataattattgcacttctcacacagtcacacttattaccagtactaacctttttatttttttacctgccttattaattaccactaagtcactgatgatatagtagccattccaacttgtcctgtgtatatatatgagacattataacagcatatatttcaagccatttacagcaaaagtagtcaatctataaggaggacatttattcaagtgaaccgttagacactctacatattttcccgctatgattcctctctataaaacaaggtacatgttgttgaaaatattaactatcctagtaatttctcaactgtgagtattaaaaatgctagtatgtattgtatatatcagtgaagtacttctctatgtgttgctagcttagccatactgcagaaaatttgatgagatgaatcaaatggaaatagagaactttgctggcgccaccagcggtgcaggtgaggatgatttggatttaccaagttggggaagagacaattttcaacatttagccatgtatttggtgtgggaagatctaagtgttgttcttccaaactttggaagtggacatagtaggaggctgcttgatgggctaagtggttttgctgagcctggaagaatcatggctatcatgggcccttctggctctggcaaatcaactcttcttgatacattagcaggttataacctgcatggcttagttggtcaccttgttaagtattactttgattttagtcatcaattgattttttatcttttgttgtaggaagactatcaggaaatgttgtcatgactggaaatgttcttcttaatgggaagagaagaaggctagactatggtgttgctgtaagaagtactctctttaatgatattagctggttttttcttctcctttttagaattaaaatcttgtgtaatatttttgatgtaacaggcttatgtgacacaagaggatttgctactgggaactctttcagtgagggaaaccataacttactcagctatgttaaggctaccaagaactctatcaaaacatgagatgaatgagactgttgaggcaaccattatggaaatgggactccaagattgtgcagatgggcttgttggaaactggcatataagaggtattagcggtggggagaagaagagactgagtattgctcttgaaatccttactaggcctcgtctcttgtttctagatgaaccaaccagtggccttgacagtgcctcagctttctttgttattcaaactcttaggaacatttctcttgatggcagaactgttatctcttcaatccatcaaccgagctctgaagtttttgcactctttgatgatctgttcttgctttctggtggtcaaacagtgtattttggaccagcaaagatggctgttgaggtaaaaaagaagaaaaaagcactgtgaaccttaactatattcattatatgtactgattgaagcttctgaagaactaaacattaaagaaaatgtttgtgatacaatggtgcagttctttgccaaagcaggatttccatgtccaagtagaagaaatccctctgatcacttccttagatgtattaattcgggtttcgaccaggtgacaaacactttgatgggcactcgcaaaattcatgtatggtgctagcttcacattttgattagtcaatacttcttgatttctttatctaatatgtctgattctgcaggactcggatcctttaacgaatatacctattggaaagataaaaacagctctagttgaaaattacaagaactcggagtacacaacaagagctaaagctaggatgagagaaatctcatccattgtaagtatatatgatcattttctattatattaaactaaattttcttacatataggaacttatattaactattagtattgcaggaaggacttgtaatagaaagcagacgtgggagccaagcgaaatggtggaagcaactctcagttttgacttgtagatctttcaaaaacatgtcaagagatgttgggtactactgggtaagaatcatagtgtatataatactgtctctttgtgttggctccatattcttcaacgttggcacaagcttcactgctatcttggcacgcggagcttgtgggggtttcatagctggttttatgaccttcatgtctattggaggcttcccatctttccttgaagaaatgaaggtaaatttagtttccacagaccaaaacaatgaagaactattcagcatatcgatcttccaatactcttgcg

SEQ ID NO: 185208 - DNA, 4189 bp, Cannabis indica
ttttttttttttttggttattgcgttgctgtctacggtgattcctgtcagcttatttgttgtgaatctgaaataatactattctttcatggggttccattttaaaaataaacttttctctttgctcagaaacaagtttggccaacatgaaatatgaacaagaacaatttgtatttatgcaggtgcaaatagaaataaatgcaatggaatttgttgaattggttgcttattgtgccaataaatgtcaagcaaaaagccctgatttgcaatgccattggagtccatcaaacaaaatagcagatgatttcaatcaggtagcttgttattatgcttctagtgttggtgatatgttcaattacaaattcatgacataaattattattattattattattattaatttttatttttatttttctggggtaggtgaagacacccttttgtttgattctaagggtttatgctaaggggttactctttatgcatttcaaattgaagtcaagatgtaatgatcgtacatcatctggaggtgtaataaaattcttatgtgattcagcggatatactgaagaatttatcgtgtttactttgttctttaggaagttactttcatgttgggtgccaaaatagttgtgcatcctcgagtgacgattttaaggatgccatttgtctgctatgttcaccatgtatttctcacaatgaggcccgtacaaggtggaatcataaagatggaaaggcttaccttatgtcatacttaactgcattgaagtacatatgcctgccgcttgcagaattagtaaattcagaaaaaaaagagataataattggaagcgaggctgctgctgtttctagccaactttctgacatacaggtggtgcttgatcagttttgtgatgttttcacttttagtaaaaggtaatctcacagtagtatttcagtttacttgattcaaccctttggaacatattacatttgcaaggaattttactatctgaattctatgtgttttcattttctgatttgtttctatttatatatttttatgtgtggatattatcgtgaaaattgcatgttgttttcctcgattacaaatttggattttcttttttcttcttggagaatagctgtactgtgttttcttttgttagaaacttccccttatttgaacatttttttcactttctattgccaagttgtctgtattagtgaagcctttgatagattattctcatgagattagtttggtgcagcctatctcaatgattgttactgaaaaagaacacattttccctttctaaactatgtcttttatgagactctaatatgctgttctctaggtgtaaatgtacttatgaaggagagagagatggatgtgatgaaagcagcattctaagtatagccgtagcattgtttattgtctccatcagacaagtctaatcacaggttggtaacttggtatgtaaaattttgtatgaaatcttcaaacttttgtacgacactaacattttatggttcactgatttgaattcttcttatttcagaagagtgtgcacgtacttaaagatgtgatttctagtgaatggattcaatctcaaagggttaaaatatctctatggttctctttacaaatactggtgtaattctctacaggaacaagcaacttaaagaggtaggtcattgatataatttagaattatttatgattcaagctgtgtaaggtttaacttagttttttttttcacgtgcttaactgattctaatgcttttgctaactgcaagttcaagtattgtttattacgtatgattctatagtgcttgaccaccttttttttttgttttcaaagatactatttaatgtacgatttgcaagaccttattgtttggctgtcctcgtttattatttgtttacataaagttatgtttttgctacattgcacactgcgatgctcttgcctttatctggatcacagtgaagacagttctgcaaatataatgatgggcatatctttagaaactttgttttcctttatgcccccattttcgtcctttgggtgtatcttactctttttggaatattatcagtttctgctatgcaaatctggttctcttggtcaagccattctatttaactaaggataggttctatagttaagataatggtggtggtgtgaatgagtgattaattctgtgtaatttacattttggtaactctattggtactttaacagtacactgtttgataaggactctacactattcatctactgtgcagccaaagaattattattattctttttaatgatagttttgtactcaatgtgcattctaattattttttttccatttacatctgtaggcttcaaaggcattgaagttaagttctacatcatcatggacttgtgctttacatctttgtgacacagctttacggaaaccagaggagtccaattcttcagaagattctattatcaattttgttaatgattcatgtgcaaaaactgcttttcttttggaggttctccatcaatgtgacagtgataagacgaaaaggataattgcagacagcctagaaaattggtcagttgctgcaaacctattcagcaagcttccaggtcccatgcctttggtgaaacaatgggtgaaggtaatttatattaaaaaattgatgggttttttatgattttcttgttcttgttcatgtcagctcattgctattatcattccagaatgaatgcaaaagacataaaaatgatgatgttgaagatgctgcatcaaccttgtaccatgttttgtcatcttcaaaaaaagtgtcaaagagagcaatgggagtcatcttggagcaggttagttttgtatgttatatattttgatactctctctttctctgtcttattttttttaattatttttctcattttttttatgaaatcatgtttagtgtatttcaatgtttctatattattttgttcttataatcaagagggttagttcaagtagttaggcttgtggtgtgctattataaagtttgagattcaagtccccattgggaacctatgttgtaattactataatttcattctcctcaattattgtaacatccaaattttgggctcaataagcgagtttggggagtttctctatacttcttttttgaaactaggatccccgcctaaccctacaatatttggaggcctaaaactatagcaattactatgcaattactatggaggtacccaacagggagatgaacctcaaaccttgtggcaccacatgcctgaccatttaaactgagggggggtagtttccctgtgtgaaaaataaattgttatgatcccttagacattgactgataccgatatcattttcctctctaaatattaggaatttcttgcctatgaacaagtgactgctctccatcctgagctgtgtcagagaatgcaaaagaaaattacagcttatctcttggaagaattgtgtgttacttcagaaaattggttacaaagatcaaggattttaatgataaagggaagatcattacggctcaatggaatccaatgtttgaaggattgtattcaatgcttgtcagaagcaatatcattgcttgtaagataactacctttcaccctggctgtgattcaattggcttatctgaccaactttaacatggtaaataaattttcttttgtaagttcgattttttgactgacatgaattactactgaagcagaaaatggatgtctggtgaaaaaagtagctatggaattgaaccttaccatcaattagctgtggcacattgccttcgggcgttctgcactcaggaggcagaaccaaattcaaaggtgtgaatgcaagaaagccagattccaagaattgagtttttttctctcttatgtaataagatttttgagagtaggaattatgttatactaaatgtttgcttcgttttttcttataagcagcaagtcctggaagatatcagaatggcaattaatttatggttgaacattattactccagattgtttctctgctgaagaaaagtgctttagagcttctgaaaatattattattttcctgtatagtattcttgatttgttatcagttaaggttagttggttgattgttttgattatatgtgtgtgttttaattttctcctttactttttggaacatagaataatatgtttatctt

SEQ ID NO: 185209 - DNA, 1044 bp, Cannabis indica
ttcgaaagaaaattatcctagcaacatggaaggaactcaacctctatctacaaaacagaatcactcccaaccagaactacgctagaacccatagaggggtcgacgtgcttccattgaaacatgaagaatgaagcaagcagcacttgggagaaaaagatggaaaccctagcatggagagaatatgtggttggttaattataagatacatatttgtctagtatagtttttatctttcataatttgttatgattttaaaatgtgggacccatagtcatcctaactcttaccaacttaatttcattacaccacatccacacacacacaaatagacagagaccgactcctttcaaaaaagggtgttttacgtttgattatttttcaggctctacgacggatgacatgataggttgggttgggtggtctccacttcgtacatacatgatacatctcttttatcacaaattaggataagaagttagaagcttcctttatttcatcatttattgtttcacgttattatcttattattatttgtttcctaaaaattaaccagagatttttaaaatccaccaaaagtatgtcctcaagtaatttaattttattccgcctttctttgagtacgttttactttttcctgttgtctttttcagcagtggagcccaactcaacagaatcttactattacttttaagtataacccaagtcatccatcaaattttcttcttttaatttctaaattttaaatttgacaattaagttgaattaatgtgtaattccacttccatttattaatttatcccgggacacaagaaattattttgtttattggttcaaaattcttcatctacaaggtccaaagatattgagaatacattgtcatttaatattaatagcaattgattgatggattaggatttttggcttccaaaatattcttcatctttaggaaaaagtctgaatttcacaatacttcctactactcttttaattatatgtataaataaacacttgaacagacaagaataccaaaagaaaaaaaaaaat

SEQ ID NO: 185210 - DNA, 4625 bp, Cannabis indica
atggagatgaaattattcttctcagagtgattaacgaggtccatttttgggtataacaagcacaacaaatataatttctaagaataaatctaaaattacaacaaagtaaacttagaagatcaaaacacaataacataggcctttgatggtaacctttttccacaagacgagcttttaacttttctacagatccatcagcatttctttttattctgtagacccatttatttcccaccaagttatagtaaggcaatttgggaacaagcatgtaagttttcttggctttaagtgcactcatctcagtttgcattgctcgattccagacctttgacttcaaggcttgctccactcttcttggttcgtcttccattagattctagtctgtgtgtccaacatacacttcaggcttaaatatcccagcctttgaatgggtaatcataggatgtgattgaatttgagcaggttgttgttcctgctgaagttcttgttcaacttcctactgcatatcttcctgttccatatcagtattgctaacagtcttagtgtgttcaacagcttccaaaatgtgatcactaacctcatgtgagtgattggagagtgctggtccaaggggatgcctctgttgcagcagtgttgctggtttttatctggtgttgcaagtgtgttttttgcacaacattttggttgtgtaggttaggcagttgagaccattgggaggtttataataacaacttttttttttctgcagaatagtgtttagaaagccatttttgaaaggaaactctttttcattaaaaatgacattcctagatatgtagactctaccattagaacttaagcatttgtaatctttatgatgatcactatatcctaagttaacacactttaaagagtgaagttgaaacttatgtgtttgatagggcctaatacatggaaaacaagttgaactgaaaattttcaagaaactataatcaagttttcttttaaacagtgcctcaaaaggtgtttttagattcaagataggtgtgggtaacctattcataagatacacagctgtttgaaaagcttcaacttaaaatttcaagggcatattagcttgagcaaggagagttaatctcatttcaactatatgcctatgttttctttcagttctaccatttcaactatatgcctatgtcaattataaatgatatttgatcatgatcttaggtaccatgggtgcctcagcaatattctatatagtgttaagagccaactaagtttgtaagtgccaagacacatgtgagtacattattattcttcatattaaatagaaaaattttatttacacctaaaaagtaaaaagtatttaaaacatcttattttaagaattgcactaaatttttctaatttttttcttccaatttatattcttaaaaaatatacctattaaataaaaaaatattataatttaaatatgataacaaaaaaattaaaataaaaaattatataaaattttctttaagaaaagaaaaatacgtacatgatttaaaaaaaaaattaaataaaataaaaataaatatttaaattaacataaaataatgtgaggaaatttttttaaagagatattatgaataagttttaaaacttatttaagtttatattttcaataataataatgtatacatattattttatagagtagaaataaaaatccttactttatttgttgttcaaaagattttttctatgagatgcttttattaaacagccattacaagagtctaaaaaccagaaaaaacatgtgaaacaaaacaaatttgaacattatgaaaagaagataacaaatctttgcaatcactaattaacaaaccaaaaaagaggacatttggagagaacttgaaagtgcttgaacgaccaccaaattatcaattttaataatcatgtctctctaattttttttctttatccaacttagagtttccttcacacctattgcttcaacaagaacatactatttaattaattagaaagagaacatcaaaataataataaaaatgttagaaattaaaataaattttatcataacattaacagtctaaattagtgagggcaacaaaaacgaaatagtaactaaaggtattatcgctgctataattattttacattagagttatacatgtaacaattataaatgataatagagttttgttgcaaataaaaaaatggtaagtaaaacaaataaaaagtacttgaagtgttagaggcgtgcgtgattcctcgaagctctctcccatagcgaagaaaaagcaggtaattcaaaagccagttcgttttttgcaagaatttgaaatagcatcggatgagaaagatgaagcatgggatgaggtacaaactatgaatggattaactgaaggattggatctaatttcttacgcgttgaacactggagaaacacagtgtgtcgatgaagatcaggttagtgattcgcgaattgatggcaacttggatttagttggtgagctggagcagaatctcctcgaacttggacggataaagtagataaggaggattttcaaactaattctcaacacaaatggaagcagtttactagaggagacgatctctttttgtgaacctaatctaacctatgaaaaacctttgatcaaagaggagatgaagattgctcagatcgatgtggaagaagtgaagattcatgctgcaaattggagtacgacagtaatatgtatggtggttggagctaatctaccattttcagtctatgaaggctttattcgtagaatgtggggcaagttagagattgctcaaattgttaggatgaatgggggctatacaatggtcaagttttaggaagaatcaacacaagaccatgtcctggagcatggtgtgaaccaatttgatcgtaaaccagtaataacaaggccttggactactgatctggatgctcttcgccttcaagtcagttcccttgtggatcagactacctgacctagggctccagtactgggaaaacaagtgcttgagtgctttggttagcacaatagggaaacctatcatggctgacaaagttaccaatgaaatgtccatggtcaagtttgcgcgggtgttggtggaaacagaaatcatggactctccacctaaagtgatacatttttaaatgagcatggaagactgatggagtaagaggtagtctatgaatggcttcctatccaatgtaagaagtgtgatgggtctgggcatggtgcgaactgtaggaagaacgagaaggagcagggggtgaaaaagaaggggtttgacaaaaagcctcaaggagataaaaaagatctaggaagtagcaaggaattgaacaaagtagaatgggtataaataggaagctgagatagggtacggtgaaaacaaagtagggaaagaagctgctacaactaacatggcaggggtgttcgagactatagatgatgagagtcaaagcaagtctggggattggctcacaccaaaaaggactcaaagaaccaagggaaaatagaaggaggatgtggagaaagtggtgtctggcactagctctttaaatctatttgaggtgttacaagggtaggaggtaggagttaaaggaactcattctaactccattatgaaccatgaattgatgtaatatcatgtgctggaatgttagaggcctcaataaaagtaataaacaagaggttgtcttcgatatttgtagattaaagaatgttggtgtgggggctctcttagagactaagatgagaggtagtaagattggggagatgatttccaacaggtttactagttgggagtactactcgagtagagttactgaaggcagaatcttgttgatatggaggaaaggatttgttaaggtcattgtgttggaagaaaataataagtatgtgcactgttttgtcaaaatgttagggcatatagaggctttttgtgtaacttttgtttttgggtttaattctttggaagagagaaagactctttgggttggtcttgaaaggctcaagtttcttgttaagccttggatagtgttgggagacttcaatgctgtttacaggtatggagacaaagtaggaggtaactctatattgactacttaaattattgatttcaataacttactttcccttggtctggtggatgagttgaaaaaggtgggttctaaatttacctggtcaaataaccatggagtgaatgagaatctactcttgcattgatcatactttcaagaatgaggagtggcttgatctctatcctaactcctttgctctgtttcaatggggctgcatctaatcactgtgtgtgtataatggcctttgaggtggttcgagatataggaactaagccttttagatttttcaatctctgggcagagcatgaggacttaaaaaaagttgttcttgctagttggaataaggccattatgggtgaagggctgacttttatatattttaaaaccctgaggcctaaacgtttgcttaagaacttcaataaaaaccaaataggagatttggggataaactaccaggtgtttaaaggtcaatataaagaagctaagaatatggctcaatctaatctaggggcagatgaatggattgagaaagagaaga

SEQ ID NO: 185211 - DNA, 4038 bp, Cannabis indica
ataacatagttccgccactgctaggccttgaactcttttggttagttagccaatattatttttatcatttccttttgtgggattatattatatgtatgttttggtttgtgtcacctattatcctttctcatgaaaaagaaagtgcactcaaatatacatattattattatattacatataaaagagaactgtttggccagcaggaaagagcatcattttcttggaaaccactttctgattcctttttgtcctgtttgatttctcatacacatacccttttctttcatgatctccattctcaacttcctatgttttctttgaactatttcctctcaaatggccactcttttgaagctgttttcaccaccaccgttcaccaaaacttgccaattatttcattcctctactcctcactctactttctcggaaaccaaacagatatattccagaaaggaacgccacagtagactccagagtagtaaatatggaaactttctcgacttacaaccggagtcaaagctcgaatctttggacttcgatcttccgctgtgggatccatctgatcggtctcttacggacgtaattgtcatcggaacaggacccgccggactccgtctcgccgagagagtctctagctatgggattcaggtgtgttgtattgacccttcacctctttcttcttggcctaataactatggtgtttgggttgatgagtttgagagcttgaagctcgatcattgtttggacaaaacatggtgcatggcaagtgtttgtgtaaatgacaataaaaccaagtatttggacagaccttatggccgagtcagtaggaagaaactcaagacagagttaatggagaggtgtattttaaatggtgttaagtttcataaggccaaggtttggacaattgagcaccaagaatttgaatcctctgttgggtttgatgatggaaataagatcagggcaagcttggttgtggatgccagtggctttggtagcacatttattgagtatgataagcctagaaaccctggttatcagattgctcatgggattttggctgaggtggatagtcacccctttgatttggacaagatggttctcatggattggagagattcccatttgggaaatgaaccttatttgagagctagcaattcaaagtttccaacttttctctatgcaatgccttttgactcaaatttgatatttcttgaggagacttctttagtcagtaggcctttgttatcttatatggaggtgaagaaaagaatggctgcaaggctaaggcatttaggaattagagttaagaggatcatagaagatgagaagtgtgtgatcccaatgggtggtccacttcctaagattcctcaaagtgtaatggcaattggtgggaattctggggtggttcatccttcaactggatacatggtggctcgaaccatgagtttagcgtctgagttggccgacgcgattgctgttggtcttggctcaacccggatgatcagagggaagccactgtatcacagagtgtggaatggtttatggcctattgaaaggagatgtgtaagggagttttactcttttgggatggagacccttttgaagcttgatctaaatgggactcgaaacttcttcgatgctttctttgatttgaatccttattactggcatgggtttctatcttcaaggttaacctttggggagctggctttgttgagttgttctctctttggacatgcctcagctccttccaaggttgatattgtaacaaagtgccctgttcccttggttaaaatgatgggtaatttagcacttgaagccatttaatttaattttggatgatgaatatatgtagatttttgttaactgcaatatcaagttctttttcattactaccatcttgaatttgaacatattatgcagttagtgatagagaaacgctaaaaggtaccggtggtgcatagcatcctctttatgtatcaatatcgctattgatccaattaagtatcaggttcatataatttaatataataacttttagggagtatcgctagcttattgcaaaacgacatgtctaaagatgctaggtaccattggtgccgaataacaatacttttagtgataataccgatgtaaattatttttgctgatgtattggtttttcttctttttcttcttcaataatctgctgactagaattgagggtgttaagattagtgtcttggcaaaagactattctgcaagatttgaatcaacaaccacagatttcaactattctattaagatttcatagcaacaatttatgatttatttgcactacagaagttcattacatccatcactataaccgttacaaaaactgataccagtaagaaattattacactaataaagaagacaccagacacagacagtgacagattaagacagagaggtatgtaattacaacccatggagataaacatcaattacacacccctaaagcttcactgactcttattcataaacttaaatggactacaactcttaagttttgataacttggattgatggataataggttggtggatatgtaaaagggacataggtaggtagcttcacaggacgtttgtgtagcagtagaggatctcaatgcaggcacggtaacgagctagatgctgttgttggaagacaaatcgtcggacgagcctcaagtcctcgtgaagaactatgaaaagcatgcgcaaattgttgaggtgaccttgaaagactctgtgaagctgatagtgacggcgatggaacagttcacagttaagacgaggtgatctggcgcgacgtgccaaagggaggactctgtgatattgaatgtattgcagagtaagggaaacatgttcttgaagagaagaaatggaggaacgatatcgatgattagggtgggagtaacgaaggtcctccaaccagttacattggtggagacggcgcaacagcatcgtaaatcgatgaagaggatagtttggtagaggatcaagaggacttgacattattagatatcaaattttggtatggtgaaatgaatgactgaaactcataaagaaaatgagaagtatggattatgaatgctaagattttcttttttaaaggaaattttttattaattttagtaatgaaagtttcaaagaatttatgattgacagataatggtttgtcattcaaacttgaaatctcaggaataatattctttccaaattttatcatgattattttgtggtattctctatacatggctatcgttcttacgatatgtgcttacaagtgttcgatgttattttcactttttactcgtgtatggtcatgttcgttactttgcttaacgttttttcttctacttttgtaacagttgtatacagaagcgaaagtcttgaactgtaatttttaaaattaatgacattaaataaaaagttgaggagtttcaaaatgcaaatttgatataatattaatattttttagcccaactattacaaacaaatgaatcaaaaggtaggagaaaggaggggtcctagtttagcaattagtttagatcatctaagctatatatcaaaaaaaaaagaaaagaaaattcattttcttattttgatttgtataattaattggtgtctagttcttgtttctaatatatagtttagaaacaagagttacgcacgaatcaattaatttaataattactttgtttgttgaacggtttataaacaaagttgctcattgattggtgtgtagtgtgtaactcttgtttcactataaatcatgtttttcaataggtgatttatctcctaaattaggtactattataatagaggacttttgtagttaatgaaagtaacttttaaaaaataataataatatgattccttaattttgttatgggttagatactttttcgatattgtatatgtatgtaatatataagtgattccttaaatatattttcttaattttgtcacacatagtctatatatatataaaggataagtataaagcggtaatgtgtcactctaaatttatt

SEQ ID NO: 185212 - DNA, 3950 bp, Cannabis indica
ctcaagaacctttataaaaaggagttcgtccaactaatgtttttaagtttttaactacaaagaatgttacaattaggtccaatgagacgtaattagggattacccccaaagaatacctgagagagagggaactgtttccttcaaagaagtttgcatactacactagtcgaccctcaaaactttctccatgatcgataggcataggctgccattgcccttctatacgttccgagacttataagaagagactagttcaatatcttaacgtgatgattttggcttctgcagtgttgagagctcagaaaccttgtaaaattattggagaagaagccaaataagcaaaacatgagtcttcagttcctacccttataacacgtcaatacacaagtcttcattgttttgttcgtctggcaccgagttcagatctggcaggaagtagaaactgtcccggtccaagacggcctttgatgcatcagaagaatctgattttggatgatcatgatctgtcaccttattgggcaagttcaaagaaacagctgcaaaagtagaagtgattctttggtgtggctgaggggaaatcgcgctcttgagggggttatctgcatccacatattttgcagaattctcaccaaactcaagctgcacgagaagaagaatgtaaattgtcatacactgacacgttataaacataaacaagtttacaaaagtcaaaggtctaattcttcctttaagggcttgacataatctatgcaacatttatacgctagttgagtgtaaaaaagacatataactacatacacaagactacactacatgtaatccattcctatcttccacaggttaggctaaggaatcttgaatatagatggaaaatatgataataaatgaggccaaaacaaaatggtagcataagaggaagaagaaggctaaaccaccttaatcctcttcaagctttcatttgtagatctctgttccttgattgttgcccttagtttttctaactcctgtttcatacccaaatttaatgaataaaagtgaaaatacaatcaaaaaggagagagagagagagagagagagtaacacaatgatcatacctttctcaaattcaccccttctttgataagtgaactctcctcctcttttagttcagcaaatgtctacacaatgtcaacggttctcaattaaaaacataattaaagtctttattaaatcaaactagtatgtgactaacaaaccatatgcaactacaacagagaatcagaacggaatgatttcatgaataaacaagccttaagtattcaccttcttccgtcttgatcttctgctggaactggtattgcaacccaaatcattatttgtagcaataccctgaacattttcaaaagaaatggaaactgggtcagtaaagactcctcataacaaccaacaaccacgaccatttgaagttttaacaaagcaaatttatcaacaggccatgaatgcaaataacaaaataatataagagaatagaatccaggaacggcttcgtatacaagttcttcataattttagattgattaatcagtaaccagtacaaatttcgtagcctaccaaggtcgcagtttcaagcttacaccttcagacacgtgtaagtgacccaaaatctattctaatcaaaaaactggcacaatgttacatgacaacacaatctattctaatcaaaaatgcattatatagagacacagttgatggtctctatcgaaacacacaacaaaaggaacaaataaaaattaaaattacgaacattggattggagtaaaacaaaaaaaggaagttacacaacccaataattataaaagtaaataaacatattaaatacaataattccaaagcgtccatacttgtacgtcactcctatccaatgaaaacttcccataccaccaccaattgaagtacccaacaatagaccccaattattctattacccttctccaatggatcaatttttcttattaccaatcatctcattcatttgatccactatgcttcatctcacatatcatcatccacgtggcaacatatgatggaatccgaccttttacatataatatcttaaaaaaggaaaaagaaatgtttgttcgttcttttgaaaaacgtactgagggtcacgtgacatgtccacatgccattcatttcattccccttggtaaaaaaatatagtataataatattaatatttataataaaattaaaaacccttggttgcttgcttgctgacaactcgtggaatctattatcaaacaaccccacacacaatttttaacaattgctatcggagccttaatcatgaccagcgtcatcaaccaccggatcttcggatccaaaagcttaaatccacaaatcgacggtccacggtcgcaatagtcatcagagaaaatggaactgggtatggatttgatattttcaggaagcttaatttagaggagaaaaaaaaagtgacaaagaaaatgggacctacagagatgatataaatatcgaaattccacacaaaagtccggtacagacgcgcgcaccgaaccatatctctctcacaagacccaaaaggaagcaactcccacgaactacacaatacacatatcgcaaaacccagccaaatctcctaacatccctctccctccctctctctctccgactcgtagtctactagtcgctccatacggccccactaaactttttcggatatggcccacttcttcgcactcgaatgaaacctttcttttttagtaccggaaatgacctttggtcccgtttgaacttcggacaagggagagaccgagagaagagatcccaaaagagaagagagaagaaaacgcgaatagcttaccaatgcctgatatcacggaaaccaaacaacggaagaagactgggggtatttcggtcccatcaacatttaattaaaccggaattcgcaacatattttatcatcgttggcagaggccggtgacgacggagtctgaaaatctaaaaaaagaggtggcacaaaaagacagatgagcccttgtcgcatctgacgggggttattttttgcatagtacgacaagagggagcctgatctaaaaacggagacacgggtttttcttttttgaaaaaaaaatacagtaaatcaagaaattaagcatggctaaatgctcagatggtcacagaaccacctccctctcgttggtaactggtgaatagaacaacacagaaaaccgctaagcttacaaggtacagctcactgatggccacagcaagtacggttttcgtcaactcagtaacgaatctaacataccgccaccgaaagagactagagaagagtaaagagagaacaaaaccttggatctggagtgagaaggagagcggttagcagaacggctggactcttcaacttcgaagccatcggcggtggcagaaggagaagcggtaccgctccatgaaagcggcgtggtaggactacatctggttgaatcggattgtttcctttgtgaagcggcggtttcgttgttcctgagtgctcttgacctaggaagtctgacactccaagttagaggaaccatagtcgagggcaggtgaagctgagatttgagaggtgacgccgcgtgagactgcttgagacgaaacagaagctccacgacgagagtgtcatcggacatggccgctcgcatccactcatctttcaccatgctctgagagaagaatgaagaagagatagaaagtggggtttttagagagagaaaagagggtggcggatgaatgagagagagaaagggaaagaaaaagaagttgaaaatagagaatgacttcaccaaatcgtggtcttataaatgtgaatgtgagtttttataaaaatatataataaataaaatagagggagagaggtggtgtcttttgtgtggtggtgaagttggagtagattccagtaattcggtttt

SEQ ID NO: 185213 - DNA, 779 bp, Cannabis indica
aaaatatattttgctgaaatcatatgcatgcaggtcaatgttaatatatatgatgggaattatatatgtatgaacatgagaatagtgaatagaaccacttaacactgtgaaagcatgtaaagcatatagaaggaagtcactgaaatataataatttgaaggcgtggccaatagccttgcattcttcttgacgagaggtatttaataaagcaaataaacagagaaaaataaataataatattgtagttcagatgttgactgattttaaatttatttttcaaaaataataataataattcagtgacgtaattggagatcaccaatcagtaagcttatatatggaaatcatgttgtgttaacaaatcaaatgaggtcatgcaagagctagattttaatagtttatatactctagctaggctctttctccttcacatacgtgtcagtagcctacgttattaaaatcgaattcatatcataaaacatgatccacttaataaaagaaaatgattgaaaacaacagcaactaactcaagctccatatataaattaacattgtaatgtttatttttaaaactaccgacacatattattcgaattacaatattgtaagatttaattgaataataactaataataaaaataccttcggaactgattggtttgaggttacaaaacacttttataatttaaaactgtcagagtccacatgaattgattcgagtattttaaaaaacaaaatgtatatatatctaaaactttagcaaaaaatggaaaaaaaaa

SEQ ID NO: 185214 - DNA, 3495 bp, Cannabis indica
ttaattaagagattgtaataaaatattgataatatagcactcttctatacataaatatggaaagaatcttagttaggaacactttttattttcggtaactagagaaattatatcttagttttttatacatataatattgtgtgttgtaatcgaaacaaacatttcacatgtttttgagaaaattctgaataaaactgattaattgaaatctattttcgagacaaaaaattattcagaatattaaaacaacgaataaaatatctattataactataatgcgagttatgaattcatgaaactacgacacaaaatttttcttagctaagtcttgtttgaattgttgtcacacacaattattgagattactaattattaattttttttagataaaatatatctattaattatttttgttaaattttcctttgaatgagcacagtcgaggttaagaatgggaagattgcctccattgttacagaagtggaaaaactttggaaatcagaattattgcaaataatcgattatggagatgctgttgttatgcctggcttaatcgacgtgtaagattttgtattttgttatgttagacgccgaataatggtagtcacaacatagacttttctttttgtgattaactatcattttaatcttaacaaaaaattactcgtaaccaaaaatttgtatttaatttaattttaactataagaacttaaaatattttgattttaatgacaggcattcacatctcgatgatcctggaagggccgagtgggaaggatttccattgggaactaaagcagcagctgctggtacttattaataataccttttaattctaatttactcacaaattataaatataatttctctcttgagaattaattagacaataattatattattattattttatagttttttttttattatttttataattgaaaattttacatttttttcaataggtggtctaactacattagttgacatgcctctaaatagcatgccttcaactgtgtctagagataccttcaaacttaaggtattaacctaattatggagtcaagttaaacctattattgatctctttagttcattaattatttttatctaaatcttttgtgttttttttttctttcaatagcttaaagcagcgcaaaagagaatattcgtcgatgttggtatgtttttgaactcatttttttgtcatattaatgttttcgaaacactagttttatgactaatctttgtgttcaataggtttttggggaggccttgttcccgaaaatgcatttaacccgtttgttcttaaagatcttttgaatgccggtgttcttggtttgaaggtaaacaactatttgcacaagtgaaaaaaaaattagtctatgccataacaaggtgtatttttttttctttctaaaatatgttttcagtaatttcattagtagctcaaatagtcagatatatgattttaatatctctcgaaattgagattcaagtccttttctcgatacttacataataattgttataataatgttcaatttctcaaatagtcagatatgtgattttagagaaatgctaaagggcaccagtggtgctcctcctatgtgtcagtatcgttattggtccaattaagtattgaatccccatagtagttttaataataaaatagtttttaaggagtatcgctaaccaattgcaacgtgacatgtcgagaatgtgctaggtaccactggtgctttatagcaatgcacgtgattttaatatctctcgaaattaaaattcaaatcattttcttgatacttacgtaacaattgttataataatgttcaatttctcaaatactatagaattagacaagtaacctacttatttataaacaaaatatttatagtagtatatatttaccaatttcaatatgagcatttttgggatattaaatcttcatctaatgaaaattattgctctatctttttgtagtcttttatgtgtccttcaggaatcgatgattttccaatgacaaatgctagtcatattaaggtatgttttcataatatattaatgtttacacaataatatcttaattcttctttgtttgtttggttacaattacaaatatcccaattattttttctaggagggattatctatactggcaaaatataaaagacctttacttgtacatgctgagattcaaaaagaactcgaaaacccttcggaccttgatgatggctctaatgatcctcgctcttattcgacttatctcaagactagaccaccttcaatgtaagatattttttcaaccatcttctttgcagaacgattaattacacatgttataaggctaagtgagaagtttaacaccgatttgttatttacttaaaactagggaggaggaagctattagtgagctcttgacggtaactaaggacacaagaattggtggctctgcggaaggagctcatcttcacatagttcacttgtccgattcgagctcttcactaggtcttattaaagtaagtaatgcgttttttttataagaataatgatatgtacactaaaatattacatataataacgtgacatttttaacataatggattaaattaatgtgattcgttttaaaaaaacatgttacatatgtgtagctcgtttgtgaaacatttgtctcgatcgatattcctcttagccttgatatgtactattagtaaatctttcttcatgttgtaaatatttttttctctattttgtagcaagccaaatttagaggtgatagtgtgacggttgagacttgcccgcactacttagctttctcggcagaagagattcctaatggagatactcgcttcaagtgtgctccccccattcgcaatgaagctaataaacaaaaactatgggaagccctaatggtaaagaattattgacacatcatttaaaatttgaaacacgacgatagaaaaaaaaattatgcgaaaatatttggctttctcatactcgaaattcataatgttttgcaggacggacatattgacatgttaagttccgaccattcaccaaccgagccaaaacttaagctccttgaagatggtaactttttgagggcatggggtggaatatcatctttgcaggttggtttttgttctcttttctcatgtaaatatgtggttaaatttgtgtattgtacttgaaaaactaactgattttttttattttttggtcacattttacagtttgtgcttcctataacatggacatatgggcaaaaatatggaattactttagagcaattggcttcatggtggagtgagaggcctgcaaagctagctggacttgaattaaaggtaaattgttatttctatagcatacaattactcacccaattagtatgatataacaagattcgaccctgaactaaggcagattaggctcgtgtttagagcccatccaaaccggcaaaatttttatacaatatacttttgtaaaattttataa

SEQ ID NO: 185215 - DNA, 2020 bp, Cannabis indica
tcaatgttggcgtaattagacatgagcagtgccttcagtgaatttggggtcctcacatctgtaccgtccatcaggtccaattccaaaaccttttggatctgcaaacacattctccagtagctggttacgagctggatagggactttcatctgcaaactcaacagcttcttcaacaagatcatctatcttcttctctatggccttcaactcttgttcatttgctaatttgctctcaattaagtgtttcttcaaggctgcaattggatctctagcagcataacgtgccttctcagctgcaaaatcaggaacccaaaaatgattgtaagcagggaactccaataaactaacacatataattacacatttggtattgggatacaaatagcaatgccaagaatctccttcttacagaacatactctagtaataaacagaagaaaattacgtgaaaaaacaatgtgatcaacatgcaacattgattataaagagaatcaatcatctgaaaaatacaaaataaataataagtgaagtactgaccagggtcacggagctcatctggatcagccaatgaatgtcctctgaatctgtatgtctcacattcaaccaaggttggcccttctcctctcctggcccttccaatggcctccttagcaacctccctgaccttcagaacatccatcccatcaacatgaacacctggcattccaaaagcaggtcctttcttccagatctctggatctgaggtagatctcaaatgggacatcccaattgcccacaaattattctccacaacgaaaatgatgggcaacttccacaaagctgccatattcaagcactcaaagaattgtccattattacaggtaccatctccaaaaaatgcacaagttacgtgatcagagccgggctctttcaaaacctccctcctatacttggaggaaaaggcagcaccagttgccaccggaattccttcaccgatgaaagcaaatcccccaagcaaattgtgctctttggagaacatgtgcatggaacctccttggcctcggcagcatccggtggtcttcccaaagagctcgctcatcacagcacgggctgggacgcccttactcagtgcatgtacgtgatccctgtatgtgctcaccacagagtcttcctttttcagaagtttgatgaacccagttgacacagcctcttggccattgtagaggtgaacgaaaccaaacattttgcccctataatacatctgagcacacatatcctcgaaagatctgcccaatatcatgtcttcatacagctccaagccttcctctttcgtgagcagctggataaaatcgaattaaaaaaaaagttcaatacactaaaatcttaaaaccctgttcgagaatttcttgttgcatgctaaactttatacattaaaaataatccctttacgttttaaggtgtcgaaccaacagtttttggaagataactaactcgaatttcaccatcgaacaacaagaattgatacacaaatcttctgatttgcttagttgaggtgtcaaatcgatgatcaaacagtgttcagctgatcttacttgagtgtcacaatcacacaaatcttaggaaacccaatacggtaaacaagtaattaattagaaacaaaatagcaaaacgctaaggttttcattaaattcccataattcaaaacaaaaacaagaagaaagtgaagctacaacagaaaattgaagcagcaaacaaaagggtttaccagattggtggaagtctgacgctttttctccttaacgacgtcagagacagcaacaacggcggatcgacggtaagaagcggattgatgggatttggtgggaagaggattgaagcgaagcttctgggtagatccaaggaaagagcaagtcttaaagagagatggggtgtcattggatctggggagtggagggcatgggagagggaactggttgagcgaacttagtggcggagaaacgcgaattggcgtgtgtagtgttttggaaaccccaggtgagagg

SEQ ID NO: 185216 - DNA, 1500 bp, Cannabis indica
gttattattgaagttcgataatttttgttattactttttggaatgataatgtatatttattataaaaataatttttgttattaatggtacgtgatacacaatactattataatgtagtattatggtagtaaagattattgtattatagtacgtagtcctatatatataggaggttaggtagtcaataccaattattttaagtaactgtctgtgctgtgggttttgctttagcaagttaatctattgtgttctaataagatcaggagttaaaaacagtagttagagttaaacacaacatagttcaactacacgaatatcaaaatataataaggcttatatataactaagtatacttatctatcccttttttattttctgaatacaaaagagaatctcgtcagggcaaagggccagaaacatatgaattattttgcttaaaaattaaaatatatatatatatcaagtaaataatatagtgaaacaaattttcataaaaaaagttaatctcaaatatgtggtcatagattaggatagccaaataattttatacatctcttaggaggtcccaagtttaaatttgtctcaatattaattattgccaataaattaaaatcaaataatgtaattaccttttacactctcataattggaatgaaatcgtggctgtgactctagcactggtcacattctcattatttcatagtaggctaattagtatttttctttttaaatgtctcttgaatttttttggctgttaaaattctctatgaattattgagattttttttttaaaagctaattattgagattgttatatttaaatatttttgtctaatttcattcaattttactatttcaatgattgtttatatacttaattatgctccctaaactttgatatctaacaaatcatgctcctcgaactttgacatatattaaattatatctcttgaacttttatttatgttagactttttttttactaaaattagacaaaatttttaaatttaacaatcttaatagttcatggaacatttttaacgacattaaaaattcaagagacataatttaatacatgtgaaagttcgaagtaaaaatcttaattaaccttcatagtattattcaaataagataaaatacttataataagaaacaataaattaataaaagaatctaccactattgtacatgagagggaaaacgatttttgctcatatagctacctatcttctattgtaacaaactaaatagaatagtgaaatggtgcataactttgatgaagtcgtacatatgtaaatgtaaacatatatatcttcgattcacaatattaattaatattatagcctaacgaaaagaaagaaaaaaaatgcttcgtttttgactttagtagccaactaaactagtaacgcgtgcaaaatatagtgcaatttccactaaccactcgaccctgctatctaggaataagataacaaatacagattcagttgttttttttttttt

SEQ ID NO: 185217 - DNA, 2986 bp, Cannabis indica
aataataaaaaaaaaatattattattaaataataatacctttttttattctctccccccaaaaaaatatatatttaaaaaaacagtcctccgacctttgccttttcccaaaatggcccctcattcattctccaccgttggatcaaaagactcatcatcatccaacggttaatgtaggatttgagacaagtaaactttgctctgaataagagtcttaccaattttaaacccaggaatgacagtataagcaacattggaatctgattcctgtgaagaacaaaacgacatgtcgttttgtgataaagggaacacttcttcagctatgctttccatgtaaacttctgaaaaacgacaaccttttttgacttgaaagattgaagcttgaggctcaaatgagaatgctagacaatgtagtagccatacccttttcgccatttcgaaaaaggaggctaaaaatgtcgacgaatcgaacattggaaactcgccattgctgttttgaatgagatttctaaaactttgatcaccaaagaatgaaacttccatctttggatgaatgagtttcaagtactttaaacgacaaaaattggcaaaacttgattttggcttcttacaaagaaattcctttgttttcgaagatttaacctccgtaaacctcgaaaaaaatctctccttttgccttgttgttgaagttaaacattgttcctttgacaaaacgaaattagggtaacaaaaaccatcaaacatttccctcgaaacgaaagattcaaaggcgaaaactttatgttcttctctccaatacacaatgtcgggttggattgcataggctgcagcattaaaatcccaattcgcagttttcatctcctcgatcataaccctaacaaagcttcgaattgacctaactgagtggcgcaaaaccgcgatgaaatggctagggtttaaccccgaaaagtgaagattgtcaagaacagataaaacttgtccactttgattcaacttcttctcaaactctttgttttgtttattcacttcatccaacttctcccgaagaaaaatggcctcagaatcctttaacctagcttgattctcgagctttttcgcggtaatctcataagttttcaacaaacttttctgttcttgaatctcagccaataccaaactagtacgaggagaaggatcatcctcaaactgtttcttcaagtaacatcttttcaactcagacaaattcttcaattccgaaacaaccattcgatcagccatttgaatcccatcaacatcataaggagattgacaaaattgtaactgagcataacaacatttcacacaagaaatgctagcaaataacttagctaaaaaagcttccattgccaaactctcttcaccctcttcttcttcatcatttcgatcatccttatcgccttttttcttgatttcgatcccaactttttcgatccccgaatccacaggagcaatcccagttctaaagtgaagaactttagctaaagttcgagctaatttgttctttgaaggcttcattgaatccatttttatctataaaaccaacacaaaaaacaaaaaaaaaacactcttaataagaagtgaaaaagagccgttgaagattcaaagttgaataaaaattcaatctttattgaacaaagaaaaagaaaagtgaaaaagcaacaatctttaaagctcaaagatcgagaaagaaaggtctcattaatggagattgacaataaataatgaaatgtgacttcttttgtttgtttcttcttcttcttacctttttttctcaatagaaagtgtgaacaagattacatatcatcatcattacatatatatatatatatatcatataaatgaaagaagaaaaagaagaagaagaaggtacatagaactattcaagaacacgctcaaaagacgcgttataaggttctctttctttctttctttctatgtatatatatataaaaaatatatgtatatgtcaccttgatatgatgacaagttgatacatgagattattatataaaagatgatatatataataatataaagaagggacataataagtggacaaattattttattcctcccacaccttctcacttctatataaatatatattattggctaagtctatcatacatttttttaaaatggtgtttcgataaattcttatttatttcggcatacagaagaaaattaaattgttttcatgattatgattacgtacattatagttatttaagatcacttgtaaatttttagaatatttcgagtaggttataatgttaaaaatatgattttcatattttgttacatgcacaattatttttctattgtacgtgtagtaagttatgtctaacctaatttttggcacggtaaattgtttggaattttgtgaaaagaaataaatttaaataactacaacgtacactattacgaaaaaaataaaattatactaaaattttctaaatgtcaaaacaaatgaaggtaccataacaaaatgaccctttaggaggtattctataaatttcctatattatattgtataaatattaaatagaggtatgaagaggaactttcatttataatttgttggcatcctaaataatgataataattagaaaaaggaatataagatgaaaaatacaagtggtcctatttttcataataataataagaataataataataaaattattattaggtaagtaaaaaaaaagaataaaaagattctttttttttgtaagacagaatttttttaagtggcaaacaaaacaaaacacccacaaacaagaaaaagctctgtcaaaacaaaacaaaaaacatgggatgatgatttttctcttttttttttttacaaaaaataaaaattaataattattataaatattgtaactatttataaagtgttttttatagtagtgttgaataacactagcatcactagcaatactcaactcattatgattaaaaaatctaac

SEQ ID NO: 185218 - DNA, 6999 bp, Cannabis indica
aaaattttctaaaatatttgtgttcttttttttcactactaaaaaaaaatcgataatataaattgtaattgaagaccacgagtaatacgacgtcgtagtgtagtttaagttccaacttccaaacgactttttggtggtataaaaattaattggcggcaataaataaactgaaagttgaggagagtcgtcgtcatcgtcgtcagccgagcgaaatgggagttcacggtctttgggaattactggcccccgtcggtcgccgcgtctccgtcgaaaccctatccggaaagaagcttgccatcggtaattgaagcctatcatctcctaaccctaaccctaactgcatcgttgctcgattactgaacgaaacttgtttcaatttgattttgttgacagatgccagtatatggatggtgcagttcatgaaggcgatgagggacgaaaagggagagatgataaggaacgctcatttgcttggattcttttcgcaggatttgcaagcttttgtacctacggaccaagcctgtctttgtctttcgatggtgggaactccggcactcaagcgccgaaccgtcattgcgagacgaagaatgcgtgagaatgctcaggctaaactccgaaaaactgccgagaaattgttgcttaaccatgtgagtttcctctcaattcatttccaactttctgtactaatatgattgttattaggagaagtgtgatttggagttcaaatattaattattaagttgggaatttgacgtttagtttcaacagcaatttggttctcaaagaccctttttgtgaatctagagttggcattgggatcattttttcctttcataattgtaattttctgcgtgtgagtgcatcactcattcttttcatgtgtaagagattgattgagaatgcggacacgtgtccctgtccatttaaacatggcatgtcggtcggttcatttccagctatgggacattgaagaacacgtctattatcaacctacgcatttgtttaatggattttgccaagaatttcgttttgctttttggtccaaatgaataagcaatgtgtaaacttggaagtggattttgtactttgttattattggtagatattgttaaggcaaactatttaaaagagcctctgatttaatgccttattattatttttttattattctttgatttgtcttaatagcttaaggcgatgaagctgaaagagatagcagagggcattaagaatcagaggcaaaagaatgatgccaagggtaagaagtttttgagtgatcaggacaacttggtaggcaatgattttgggaaagaggatgtgagctccattaattgcaatcaggaaaagctggatgaaatgtgagcctaatacaaaattatatttgtaacttttgtatttttgtacgtggtctggtcttataattatttttgtatgtaataaataggtaggctggctgcatctattatggaagacgatttagctaacaactcaacgaagtctacttctattccttttgaggagatggttggatgatgaggaaatgatactagtatgtattccattttttgtaaaccatttggtctgttacttaagtttttgttatcatgtttgttaacctaaattttttgttgaatttccagtcaattattacgtgtttccatattccatttagtaagaattgagaaactacattttgagttggaggtctagtggtccaacccatggattgggtacatgagattttagttctggggacctacctactatcaccttcaaaatataatagggttcagtggtagcatgagtaaatataaagttaattgggtaaagtcctttttcaagggttctatctgctcagccagcaaaaggaaaaagcatcctatctgctcggccagcaaaaaaaagaaagaaaaacactcttgtttgcgtaggtgcttattttctttgttataattggtttatgatgcaaatttcactatttctgaccagccagatatgcatggtggagttgatccagctgtattagatgctttaacaccgtctctggaacttgatctgaagcaggtttgcttccatgcaattcttctttgtaactaggaaagtgacagcttagtaactgtgaacgatttttgaaactagaaacagaagcaggataatgttgataagggtaagaagatcatgctagatgaagcagggatcaatgtagggagggacaatgtggtgtcaagcagtctcaaccaggagaagttagatgaaatgtaagctgcatacatacttgtaccagactttcaactaagcaagtgatgggcattgatgattgctctttgagtgatttaggttggcagcatctctcatggaagaagaaagttggagtttttataacaaagcatcaacatctactgctccttatcccgttgaggaggatggtgatatggatgaagatgagaatggtgatgaagagatgatactggtaattagtatccccataatacccaagtgtatataatccattgtcattaaagtcaatgcctctgttatattaattgtttatgttgcatgaataccttaagacttgatgattttctgattggaaatctggaaacaatgttgactttgaagtaagcaaattgcccgccatctgctaactgaagctttcattgtctctacacctgcaaggtttagttgaagttaatacctaaaaacatttggcaattttcttgttggtttttaagttatgaggtgaaattgtttttagaaatggtagtttcatcctgggtgtaattgtgataagttgttttaatttcttttcacgtggttgttttattattttgcagccagcaatggatggtgaagttgatccttccatactagctgctttgcctccatcaatgcaacttgaccttcttgttcaagtaagctacatgtttatgtaattgtgtgtatttatttccagtgaggtctgtaacactgacattatgtctgtctttgtagattagagaaagactgatggctgaaaacaggcagaagtatcaaaaggtcaagaaggtaggtccttaaaggcaattatatcaatgcaactagtgttgctttgttctaaaataaatattgataatatgatactctggttggtacttgcccatacacgttttggatcatctaatatatggtcatttttatctacatttaggaccctgcaaagttttctgagttacagatagaagcatatcttaagactgttgctttccgccgggagatagatcaagtgcaaaaggttgcttctggaagaggagtagatggtgtacagacttcccgaatagcatctgaatctaacagagaatttatcttctcatcatctttcaccggtgataaacagtgagtcattatatccctcttacttatatgctctcatcttgtatgactttgtgatatatagcatgattataatctcagggcactgtctgcgagaactgagaaatatggagataagcaacaggaagaagatccttcaagtgtcatgcatgctcctgcgtctaccattaagtctaacaatgtgaatggatcaaaacccaacaacccgagaagggcttttgatgacaatattgagacatatcatgatgagagagggcgaattcgtctaagtagagtgagagctatgggtattcgcatgacccgtgatttacaaaggaatttggacttgatgaaagagattgaaaatgagaggaccaatgttgagtgtttgataaatgaaagtaatcatgcagttccggaaacttcatctggtaaagaatttttagaaacttcttgtggtggtgctgattctgttacattggattgtacaaatgaagattctgtggttaataatggtgcatctgtggagatttcttttgaagatgatggtgacatcaagtgttttgaaggtgatgatgagatatttgctcgtttagtagaagaaaatcctcttaaactatcgtctgataatatcatgtcatcaaggaacatgtcttgtagttctgattcagactgttcctgggaggaaggtactactgaggcgaaagataaaagtttctcagatgatgttaacctcagaactgaactcccttgtaaaggcaatagcattgatgatagtgaagtggaatgggaggaaggagtgtgtgaatttactgaacatgcttcctctgattcaaaaaaggcaacttccaaaggtaatttagaagaaaatgctgaattgcaggaggcaataaggagaagtctggaggatttagatgctcagaaatctaattttgcaatgcctgaagatgacaaactggaaattgccaatggatattcttgtgaaggtaatgggattattgacacagaagacagggtagaagggccagtttctccagtgaatgattgtacaaaacaaaacagattaacttgtaaaattttggataacgttgaaactctgaatgatgtggatcttgtaagtatctcaaaaacctctgattcttctggtaatcctgataattcgaggatactgattgggtcaccatgggaagtccgcatcagttctatggaacaacccatgcaagatgcaaataaaagtgctaatttgtccaacgaagcacaagcaccacatgcagaatatgttgctcctgtaaaagtaaaagaagtcaatgtggctggggaaggtcttctctgtacttctaataaggttgacgggttctctacctcttttgataagttcgctaaaggtggttctcactcatctgttttgtgtgatgacggtcccgatgatgtggttgaagatcagaaaattgctactgaatctaaaacatcatccaatttggttgaggcaaccggcaaagctgtctgttcatcgaaagcagtgacaaatgatttaatacgtgatgttgagaatgaagataatttagcttcaaagataggtcaggaaaaaattccccaagaaattgagcatagcttggagaattcttcatttaagaacaatgatggtttacgggttgaagttacagaggctagtctagaggaagaaattcaagttttagcccaagaacgtatggatcttggagatgagcagggtaggctggaacgtaatgcagaatctgttagtagtgagatgttcacagaatgtcaggtgggtcataaattgttgatttttggttataatgttgtgatcgtaaggcatggacatagcttacagattcattagttcaattctgctgtactttgttgttttcatttcaagaggaacaattccttaaaacaataacaaagtgttcaagtttggaactttaattttttctattagcacatcagttcttacatatatgttgatacttaaagaacattccacctaaatactatgccaagttatgacatcccatctcctcttggtggattggaaacacttggtgttttttactactagttttttgtgtcttgttctgatcatttttataggtctgttttactatctatgaatcttcttccatcaagttatatttacgttagcatgagttgctaaactttttgacccatgcgactcttttgtaggagctactgcaaatgtttggattaccatatatcattgcaccaatggaggccgaagcacagtgtgcttatatggaactagcaaaccttgttgatggtgttgtgactgatgactccgatgttttcttgtttggagcacgaagtgtttacaagaatatatttgatgatagaaaatatgttgagacatacttcatgaaggtataagggatgaagagtttatgcttagcgtgattttttatatgtccaaatagataattttctgtttctggatgtgcttataattattcttttgatttctatatatcttttctcaaaagaattgattttagtaactattttttttttttaaaattcaattcttcttgttgcttataatggtacatttccaacaggacattgagaaggagcttggtctaacaagagagcagttgattcgcatggcacttcttcttggtagtgattatactgaaggtgtcaggtaattgccagctgcatttaatttctcatgagatcatgccacgttgttatgcattttctatacgcatgggtatcttatactgcagtcctacttatctaggaatcactatcacatatatttaaaaaatccgacaggtttggtattcctatcatctgctttcatacagttacttgattaaagtaattgattttgaatctattagtcttctttctgttatagtggtataggcattgttaatgctattgaggttgtaaatgcgtttcctgaagaagatggcctccaaaaattccgggactggattgaatcaccggatcctactatattggggaagtttgataacgaaaaagattcaattgcaaagaaaaagggttaaaaattggcaataacgtgaaaaattcgaaaagcaaaatggaagaagcatctgcatctcatgaaaacatttctgaggatcaggaacagcagtctgccgatcatactcaggacataaagaaaatatttatggataagcatgtaagagatgattccttaggtgttttctttctttggtgtttttttttttttttgttgtacaaactcatgtcttttcattactgatactttaaaaatttattgtgtagagaaaagtgagcaaaaactggcatatacctccgatatttcctagtgaagctgttatttctgcttacatttgtcctcaagtagataagtcaaccgagcctttcacatggggaaagcctgatcattttgttcttcgcaagtaagttatttctcctttaagtttcataaagtttggcgtttaggatggcagtctttccatccacagtttctttctagtgtcacagacagttaatcctcttatttatggaaattgagtcatgtctttgaaaaacagagagttacaagcatgtcttcattttctagagacagaattcatcactttttcggctatattttcgatctgaccttgtttataa

SEQ ID NO: 185219 - DNA, 3098 bp, Cannabis indica
tttttttttttttgtctgaaaaactctgaaagatctcattcaactaaagaaaataacttggtgagcacatgaggactcacctcccaaaagtcaagaaaaccattacaatccttatcaacactccaccttgcaagaagatgggcagatttattcaaactcctagggatccaatggatcgaggaggggatcgaaagcagagtagacataagattagtaaagcaataccagaggttccattggggagggaccgccgaggagatggcatgcgaaaggatttgacagtcagtgaagataaccgggtttgggactcccaggcggtggcctacttgcactcccaccagcgccgcttgcatctcaccatgaagaactgaatggaaagtgcatttttcagagtataaagcacgaatgcctccactaggatcacgaaccaccacaccaatacttccaacgccctccttattagcaaaatccacatagatattcattcttccaggtcgagggttgatccagttggatagactatccccataattaccctgttgagtctcggccatagtattgatagtcttccaatggctatcgaaatccttggaaattttcttttgcatatcctcaattctccatctcccctgattgtggtagtggaagtttcgaaagaaccagagggaatggtacaggacagccgcataaagagcaaattcggttttagcaaaatgtgggttattgcagacatcaccaggaggattaagaatccagttaacaacctctgcaccggaggacagagggtaattttcaatgttaattccccatttgctagtgcgccagagcgtaaccgtgataggacagtggccaaggaagtgagagaccgtgtctccagcatccaagtcacataagaagcaattccctgcaacattaccaaatatttcccccaatctagagccaaaagggaggcagtttttagcaattttccaaaggaagagtttcaatctttcatggatccgagaattccaaagaagggagcatgtttcatctttagtaaaagttcttttgtggagatccatatacgtagctttgagggtgaaactccctttcggactagacatccagattaagtgatcttccaggggggtttcttggatcctagatgaaagaatgagcttagcagcctccggcctgaaggttcgcaggacaagatcggcatcccaggaacacccatccacagacaaaagattggccactttcatcttgttcaccaacccaggatttagatcttgagggcccaaaacaataccatccacacaagtccaattacagtaccatatcaacacttgagagttgttacccacaacccaagcactattgtcagcgatgaaccttcgagacttccagattcctttggccaccggggaggcgtatttgggcaagtcattagtccaaaaattagagtcatggcaatacttgtcaagtaggagatggacccagagagagtttttccccgtggcaagatgccaaccaagcttggcaatcaggcaagtgttgatatcaagaaaactctgaatgccgatccctccacaccccttaggtttacagagagcctcccagttcagcaaggagagatacttacccccctccaggttcccggtccaccagaaacgacgaattagagcgtctagggccttaatggttttgaccggaagctggaacacggacatggtgtaaatcgggacagacgagaccacatttttgataagcacagttctagctgcctgagatagtaatcttgctctccaaccttccattttgcttcttacattatcaagaataaaatcaaaatccttggacctgttacctttgataaaaagaggatttcccaagaagaattcatcaccattcattatatcaaatccaaggctttcggagatgagcattcccagagcagagttgcaattcctagagagaaggattttcgatttgttactattgatgcattgccctgaccaagagcagtagagttgaatggcttcctgcagatgagatatgccatgaggatcagcttctataaagaaaatggtgtcatcggcatacataaggtgggataccggggggctgtttctcgataattggtatcctctaatcaaccccatctcttctttagctagaaccaatctagagagcacctcagagcagagaataaacagatagggcgaaagcgggtctccttgtcgtaatcccctgtttggagagaaagatttggtaaggcctccattaatcaagacctggaagctgaccgtggtgatgcattgcataattagtctgcaaaaatggtcattaaaaccaagagacttgagcactttctccacaaaaggccattccattttgtcgtaggcttttgacatatcacatttaataccaacaaaggcattctttttttttcttggtaagtgtattttggccacacaacatgccagcataacaagtacattattttctctctctatcttaatattgtaaatgatattattatttttcttaatacatgattttttgtaataaaaatatagctattgtattgacatttttttgactacatattgatccattatgtattgtctctcaaaatagaattaaagatggagagatatgattcttgcagttgtattctttttggtgttgatgtcaaaaaatcaaatcgaaattagttcttagagtttgttcttaatatagagtttgctcgatccaccttctaaacaagtgacaaaaatatatgtaaagaaaattacaaagtcttacttaactgaaattattttttaaagtaaatacgcccttatgctgtgagtcacacatactgtaccaaatatagatttttattatttattttttttgtcgtaaattattattattttttaaactaaaattcccgcctaaccatattaatttagggaataataaactataacaattattatgtaagtacctaaaaaaagagtcgatcgtactaaatatagttcttaataccattaactaagtacatgtaagtataaaggcagggtttattatggattggatagaagagttgtaagaagtatattgtatgtgat

SEQ ID NO: 185220 - DNA, 2271 bp, Cannabis indica
taaaaaattagaaaacaaaagtgctgccaaacggcaccttatgtcaatctaaaatatgtttttaaaaggaggtgaattagaaatgtaagctaattttagtaaattaaaatttttaacacaaaactatacaattaatcaacttaatcaagtaaatgtaaataatatgggaagtaattgtatagaacaaataatcaaacttgtaaggtaaaaagtttattaagagtaagaaatctcgaactctcgatttttacaaagttcggtagaactaagccacctacgtccttagtcttaaaagctatagacctagctttgagttccactatttagccaagttaattaacgggcttgactaacctttacaatcggaaatttttcaccaaggtgtttttaaacctcttacaataattttgcgccgccaagaactatcaacctctttctcagattgttgtagtgacaatctcactctaaccgagttgtttacaataccggtgtcaatctcatttcaatcacgatttgaaaatatgtttaaaattataagcaaactcactctagaagtatgatgaaataatggaaaacctaaagtgattagcaagcacactttaaataattaaacacaaattttggctcagtgtatgaaaagtatttattaaattttaaacttgggagttcattaaactcacttgaataggtttggtatatgaaataaatactcaaccaacttcaatttttgagtaaaaattgagtttatatagtgtttaagcaaaaactaactgtttatagctgttaacacattttcaaaaaaatcataggaacaatagtctctcgttttccaaatggtatatgtcgttttcgtgaaaaatggtctaccgtttagaaaacgctagaccaaaaatagggcaatggcaaaattttatttttttcagctctaaaacgcacataactctttactcgatttttcgattttagaaatttcaattttgttctctttgttaaatgatatgtgattttaaaagtcaatttaaaaattttaaatatcatttggtgaaataacttattgtacaagttagtaggccaaaattcgtacttaaaattttttttaagtatggacttaaaaattactgtacaagacaagaaaatatatataaatatttataaagtcttgtggtgaattccttgaatctttgaatccactttagatcactttaaagaatttagtaaaaataccattttacccttatagttaattttgccaaaaaaaaaataatttctttaattgtttacaagattaacaataaagtaaatatattattaaaatgggaggcactttatttatttatttattttcatttatatctaatctagcagactagatgttaaaaactcaaaatggctagaggctgaagaaagaaagggactattcatgaaaattgaaaatggtgattgagatttgagagatgaaagttcctatataatcgtatgtggtggtctgatctgatctgatttttttttttttttcaaataataatgacagtcttcatagtatttttcacgtgcaaaagagcgggaagaaaattcaatatgttgtagataaaggaggcataaatgtatttattactatttttaattttctttttgtaatttatgcaacttaattctctgattctatttggaccacaccaaaacttttattgctctcattcatttgtgtccatcaaattttaactttttgggtccagactacttctcagcttttgcctccgacactcaacctttattattatttcatttaattttcttagaaggaatatttatttatttatttgataataagaaaatttcccctaaataacagaaaataaaaataaaatcatgggtgggcctataacttatgctggacttttttggcaagaccaactagaggcccacttaacgctaaagactgatggactagattgagtaggatagttgggatgcgtggtgggccaaaattttttgacccacttttagatgatcttagtccacaacgtactgggtcatattttcaggtagacacggtctctgtcccactcaatttattgaaagggcccatttcattatccatgattctctctctaagaagtttttcacttttcaacataatttcctttttacaactggtgcatattggcatatgatgaccatgatgtttttgcggagcaatttcatgctattttattgataggaaatttacacgaaattattaatattgatttttatatttttacggatttt

SEQ ID NO: 185221 - DNA, 6803 bp, Cannabis indica
aaaaaaaaaaatacttaattatttagtgggtttctctaactataaaaaccaccattcattactgaaaacttgaaagagaaaacctttctttaatttcaacaatggcactcacaatcacaagagttcttcctctcatctctagaatttcaccactctactcttctgctctctttcacttgcttcccattcccatacccatgtcttcttcttcttccattgcttcaccttttcttccactccgactagccaccatttccaccgccgtctcagcttcccaaccccaacattcaacaccaacaacagcaccttcttactcaaagatgacgagtcagactcggtggaagcccatgtgtttgtacttcacacaagggaaatgtaccatggtaaacactaaagatgacttttttactcgactaaatatctgaaccactgatcttagcttatgtgaaattgtgttctgtgtagttttctatatgggtttttacttaatttgccttttgattgtaaagattggatttttttttaaactgtatagttcttgtttgttaaaatgtctcaatgaataaatatatggttggtttgagataaatctcaattgaaagttagttactggttactaattaatcttgagtaaaaacttctcttattgttgttcgactgtgattgtactttgaagattgcttcaatgaatacagaaatggaaatggtggtttaaaactggagtaccacgtgttgtgtggtgtagtgatagggatgcctttattgacgtccttccttgcttgggtgaagggtttgaatcccaccacagcccctcatgggaggaattatggttgcccctttgggaggctagtttgttatgactgtgctatccttaatgggatgggaaccctcgaggtacttaccgatgacccaattaagggaagatgaggtataaggctcctatagctgacacgtggtcttcggaattgtctaagctaccgaaggggtggggaagagatctgcaccacgtgatattcttttcatttatcaaaaaaaaaaaacctggagaaggagcaaggcttacatagctttgtctctaaagtctgaaccagtataataattgtgcttgtttcttgcacttattttttgttctttaattgtttgtttaatgttcttttactgctggtttaattgtgttcgttttaagtcttgtagttgcatctagaattgctgcagatcagagggaaattcatacagatgtgttgttagatatgtattttttaatacctttattgaggtataatcgaacttgttataaattcaccgagctagcggtatgcgtgtgaataattatttgcttacatagcactttttttacaaagattgtgggagttcttatcttcttgatcttgtgatccataaggagttttttctagcatcatctacttggagatataggccaaaagcatagctgcaattgtatctagcttcttcattatctgcataaaagtgttatttgaatccttctttaaggtatgaactttgttaatatgtgaattgtgtgtacttgatccacattttggagaatatgagtcgaagcaataacatagaatatttctaatggaacattttccacaatccctatagaaatagttcactaatagactgagggataagtaattcgactcatttacatccatcttgtaaatgtttggaatctatattaaacaagaagatattgcttttgctaattcgaattgaagggtgatataaaactaatctatttcagcattatatcgatagttagcgcatgtttagctccgtagtcacgatatcgcccttaggcttgttatggaggaacttgcatttaatgcatcaagtgtattttctttcaaagataagtttttatagttttcataaacaagaaatcttataatcttctactgaaagaaaaatctcatttttttttttttgttagttggatgatcctatgcatatggagaagttcaaccatgattgctcatgggatcttcaagttgatgattccaacttaaacaaaatgcgtccacagaatttagatttcttccttgtgctggatttggagggtaaggttgaaattctcgagttcccggttgtgatgattgatgccaaaaccatggaagttgttgacttttttcacaggttcattctgctctctcattagcttcatcatcatattttcgccattaacttattagcattagtccatgaatcacttgcagatttgtgaggccctcattaatgagtgaacaaaggataaatgagtacattgaaggcaaatatggaaaatttggagtagatgggtaagccactaaatttcaccatgtactactcaataattggttgatcaaaccaagtttcctatgaaggtcaatgaaaccaaaatcaaataattcatgagttattaatttttcaaacaattttattgaggtggggattcttgtccttctgatatttgtaatgttattaatgtttattcattgtgaaaatttatctgttctcgtttgcaagtgctaaactttttaaattttgaaggctcgagctctcgagtcgaagatactactagagttggagctatcagatggcaaagaatgaattctcgagtcgaagatatttaatgttgagaaataactaatacattctaatatgagaaagtgatatgtttgaaaaatgcagcgtctggcacgatacagctataccgtttacagacgttcttgaacaatttgaagattggttgactcaacatcagttgtggggaaaacattcaggtggttttcttaacaaagctgcatttgtaacatggtaagtttgatcattattcttattataaacttctgttttcgtttccactatatgaagatgataggaacttaagagctacgaaataggccaaatatggaagaaagaatggagctagatagtaatggaccgatttgatattgctattagatgatagaatagtgatatgaacactgaaacccgaggtattcgagagacttcaacactctcaagagccaaaactcaattcccaaacatttttcacacccctctcattcaaactccattcctaactgaagatattctcatacaacaagctattacagcttttgtttttagttgctttgaagttttgaagtgcctcctatagataacacttggcactaatagtttcttctatggtgaattctacaaaggcacaattgataatgaatataaacaatactttgaagtttttgaccctttttcttgttctacttgttttagtggaaattgggatctcaagacaaaggtccctcagcaatgcaaagcatcaaagttgaagcttccctcatatttcatggaatggatcaatctcaaagatgtgtatcttaatttctacaatagaagggttagttcataatcactttggttatgaatgaataatttctatcggttatttatagtccctacaaggatcatggttaatttcaatcggttttttcctgttatgaatcgtgttttgctcggttgtggatgacaggcaacaggaatgatgacaatgatgaaagaactttgtataccttcattaggaagtcaccatctcggttttgatgacacgaagaacatttcgagagtattgcaacgcatgctcaccgatggtgcagtgatatcgattactgctaggaggaagcttgatcgccttgacgaagttgattttcttttcaaaaatagaataaggtagttatttccttctagatttgtacacctttcttgtaatatgaactagaagaaagataagagaaatgaaaattgattcaatctttctcaacccatgaatgaaggtctgcaaattcgattcattttgatctatgcatccattcttgttgtgttgtatttggtcatgaacttttagcattcattgttttaaatttatcaatttacatataaattaaaatcttgaattgtaatcatccagaatttaaaaactaattattttggctgcgtttgataacacttaaataatttttgtttttttaattagcaaagcaaaaatattctaaaaaaaacatgtttaagaattaaacttttgaaaataaaataagttactttcaatttatttgaatagcttttgtaattatagtctattttgtagtctctttcatcatgtgtaaaacaaaatttacaaattgtccaatccaaataaactattcgaaccaaacaaaaaaatctaacaaaaaatacaacttgaataatgaatacatcatttgagaatccaatttccaactcctggtggtgttagtttgctaggttaaggattttaaatcattaaacctaaactcatcacataaaaattttaatcttttcataacgtttaagcttttagtactattaaaatattatatatatatatatatatatgaaaaatatttttgtctttttatagcgaacttgcactaaaagattatcttacgagaacaaaatattatactttttgagagagacatgccatcactttaggatgataaatggtgctaattttttccatagtttgttcgaaaggtaaatggcaatttcagcacagaaaaagtgagaatttatatcgtttcactcttacaaaaataataaagatcaaaaactaactcttatgaatgcaagaaacatctattaaatggcatctcatgtaaagagtatgaactgtgtggctccatgagacaagaaaagatgcctctctattagatattaacattatttatattgtatgtgtttaaacttagtagaaactaatcacatttcttattataaatggtctaaaatgggcaataattgaacacactaccaatgtggtagaaactacaaactctaacaatactttcaactttgaagctcattaagacgagacttcaaccaaaatgtgtgcacatttacatatatggtaaattttgtttaccaattttatcttctatagttgtaatgttattgatggtgtttcagcaatttaatataatctttggaggaaactctttcaaaaaataaattaaaaaaaatattgggtgtgcatccaaagtcttatattgactaaaaatgagaaggatcataggtatataagccactaaggctagcttagtggtgagggaggaatgggaaaaagggagaggtcatgggttcgaacctaggaccttgaagctattaaactattaaatgattgtaaaataccattacgctacacttaaaaaaaagacaatatctcgattgttatgaaactttttgagaaggtgcccaaaaataaatatgtgagggcgtagacccaaagcaaacaatatcataccaatatggagacagatatgtgtccgatatcagtaaagggttagttgggcatgttagaattgagtgttttcttagcatcttcataggcctcgtatacattttggatataacagaaggatacactaagttaggatagagaacgtttattttaaaaggttgttttatcttatttttagtacatcttagttgatactcttttatgttattcagtgcctataaataagaaagaaagattgagcttaaaaataaaagagaatagactcgcaaccctctcgaaaagttgtaattgaagatactaacatctcgaaagctaaattgttcttttatttcatcatcaataaagagattttctttgacggatttcataactctaagaatatcttatcacatcagagagatttggctctcactccttgtagggactatagtctctttttgcatttacaattaataatagctcatctttcattccacaattgttgttgcttaagtaattctatcgtttagagctgtcaaatggcaaagaatggattatatcaatagaaccatatttaatgttgacaaatagctacaagcctacaacatgattgaagagcctctctttgtaagttctaataggagaaagtaatataacatttgaaaatgcaatgtctggcatgatacaaccactattagaaaaggcaaaattcgcgacggtcccaaaaacagttttttttttggaaccgtcgctaaaaaagttatccgagtgttgaaaaccgtcgcctataatatactataggcgacacttaactataattagaagattgattgactcaacatcagttgtgagaaaaacattcaagtggttctccttaatagaattgttaaaaagttacatttataattgttacaaatttgactctaattaaaaaaagtagcggcgataatctcttcggttacaattttattgcaacgatgtttttttggcagttaaatgccacctaagctcattaagtgccaactaggaatatttaactaattgcaacataacatatgattgttagtttttatagtccttatgagagtagaaagcggaagcgagattttataaaaaaatattttagatgaatctaatatgaaccataatcctcaagatctcaacatgattacattaattaaatataaactacgagtaaaagagaattttacctctatcagagtatcctcgattcttttcgtatatattattgagcatccaatccaaaagcaatatgaacacaataaagacttcagaccagggtctttcagatcagcttcaacactcagagtaagagtagttttataggattaagtagatgatgaactttctatcacagtgtgtacttaactcatgagacattgtaaactaatatgagagactcacaccaattttcttagtgagaggaagtggtgtgtgggatacaagtaaggtcagccctgagattgggtgggccttagaaaaa

SEQ ID NO: 185222 - DNA, 2113 bp, Cannabis indica
aagaaaattgcaaatattaagtgtcatcttagtcaaagacaatagttgcaaaagtctcaaactcaaatgaaagatctgagtactcagtaacattgtgaaaataacatccacactcaccaatttcaacaccagtaaggttctataaacgtttttgcttcaaactcagcagaattttccatgaacacttactgttaccgtcggttgatcaacaagaccagtaacatctaatgtcttaagagagtatgaattcgaacttctaggcccgggatgggagcacggcacccaatttcgtcggttattaattctaaggttgttttggacaaaaacaagatcttcaactctctctaccccaaatctattggcagtctctcgatgtggtaaaccattctcttggaagatctcttgacacattgtaacacttgaaacttgacttaaaacttttgttgctagtgtttgcaagtggggtgtttcaaaaccgaaattttcccaccatacaaccgggtccatcttatctctacaatcgacagcatcttcgtctcttaaagagccttctaatcgccagtaagagctgagttgctctctgagaattcgtctgtttgcactatcactctcgtatctttccaccgtagctttccaaccccgcatcacaattttatccttagcttgactttttccgaaatatctaggattcaatatgtaaccagctgcatgaaggggtgaaaacaatgcatcccatctattctctataagttcttccaattgattcaacatgacaccaccgagtcccttactcctaacagcttcaagcgactgaacccgccaattacaaatatcacccaagatgagagtaccgatatcaattgtgccaagtaatctgacgaatggctcaaacaactgcaacaaaaaatgagcactgttccagaaattatcccctaaaactgcagcttcaatatttacaatttcctctgatgtatttagtttccactgtttccactcctcagttacaactacctcttgaagtggttgcttcagctcaaagattctttggattacacaaaagaaaggtgtgaacttcacagcaagcaggtcttgacacccttttaggttttgagtaaacatagatggagaaaaatgctggaatgtaagcatgcattgctctatttccttggcacataagacaacagattttatccaatccaattcagctatttcttcaaacaacatatgaatagactgagatgtgcatggagatataaacacttgtggaaactttgtcaataaaagagagccatataactgattagaattttctaaatgtgagattatctgaagcacatttgcagcaccaatttccataatcacatcaccaagaacactcacaaaatgattattatcttcccctgccccaatagtatcatcatcatctatatctactgctttcatgaacacaagtccccttggacaagacacaaatatattaacataaaaacaaccaagcatactttcataccgaccgagacacaaaattgtgcatccagtgtgaggccaagactccctaattagttcaacatatttttcaattctccccttctctttacttagaaatgaatcagataactcatctatcggcggaggttcataaccggggccactagctccaatagctttcgccatttccctaaagtaaggagaactaacaacattcacatttaagccattggcataaatgaatcttgcaacaatgtcatcaacatcttctttcccaacacaagtactgctactactactactaggccgacgagatgccctaatccgctgcttcccaccgagcttatcgcccccagaaactcgcttcttcttacgggcaattcgctcttcctctaaaatttgaaatgcctctcttaaagacctatctattgcaggacaacttttgacaccaacacctgtaaatccaagcaaatgggctctaactcttgaataagaaccattgtatctcagattacaatgattgcatttccatcttttagtaccacttcccttgtcaaacccaccaaacacactcacatgcttccatccccatttctcacattctggtggcatagttcaagttttt

SEQ ID NO: 185223 - DNA, 3926 bp, Cannabis indica
aaaccatcagtggtatcacagctccgttcgatcatcactgggcgtaatcttttccactcatcaacatgagtttggagtccaatcgctcttctctatcgattccaattttccatggagaaaactatgatttttggtccattaaaatgaggacctactttcgatcacaaaatctacggaaaattgttgaagaaggaaacattcgagcatggaatgccatggagcttgactacatgttttaataaaagcttcagccactgttttggcgaaaaaatgatgccggaaaggaatgaaatggccatacattctcaaacgatctaccccaacgagtatagtatccaccccttcagaacaaggcaatcctttaataaactccatggtcatcccaaacttgctcgggcagcagtaatggctgtaataaaccagctagagacaaattgttttatttagttggcagacctcacaacgcctcacaaaaatccaccacttgctgcttcattctgatccaaaaaacatcaactggtaggcgtcgataagtgcagggctcacccgaatgccccctaatggcagtctcatgatattctttcaagaaaagaggcagcaagaaccaccctgccatgatacccaagtcacccatgctcaagcaataacccgacaacctctttgttttgttccaaatcagctcggatcttagccaagaaagggtcattactgaattcttgttgcgcaccaggtcccaatccaaccaagaagatgtagtaagcacggcatgcacaactggtaaaacacgcgacagtgcatcaacagctctattggctaccccgagatgacattggatctcaaaatcatagcccaacaacttcaccagccatttataatgctccatagagactaaacactgctccaaaagaattttcaaactttgttggtcggttcgaaccaagaactttcgacccaacatgcatggtcgccatttaagaatagcgagcactatggccatgagctccttttcataaatggactattaattgggcgtgaagtttcagcacttgactgaaataggggagggctttgccctcttgcattagaacagccccaagaccataaccaaaggcatccacctctattacgaactacttagaaaagtcaggtagagccaacactgaaacaatgaccatggcatgtttaagagcttcaaaggcaacggtggcttctctattccaacgaagtaggtctttctttaattgctccataagaggttgtgcaatggagtcataccctctcacaaacttatggtagcacctcgtaagacccaagaagcctcaaagagcctttaaacttttgggtagtggccaatccaacattgcttggatcttattagaggtcaaccgacaccccttcagcagaaataatatgacccaagtattcctatttttgttgagcaaaacacactgctttcattggcataaaactaagtttatccaaggcttccaaaaccacttgcaagtgagtgagatgtgcttccatggtcgggctgtaaacctagatgtcatcgaagaagacgaacacaaatctatgtaaataaggcttaaagatctcattcatattggcttgaaacattgttggcatgttagtgagaccaaaggtagtgaccctcatgagttcgaaagttagtctttggaatgtcatcaaaccacactcaaatctgatgatagctcaatttcaaatccaacttagaaaatatttgtgcctcgtgtaactcatcaattagctcgtcgataatgggtatggaaacttgtcggcgatagacactttgttgagggctcgatagtccacacaaaagcgccagctcccatcttttttcttcaccaataacacgaaacttgaaaacgggctcacacttggctggcaaattcccacctttagcatttccaactctaacctttcaatttcatctttctaaacatgcgagtatcgataagggcagatgttaatcagtgctactcccaaacagaggcaaatagcatgatctcaaggccgcggcgttggcagcgtgttaggcatgtcaaaaatgcctcaatactgctgcaacaactcaccaacactcctggaatttctacgtcattctcactggtagaagtatggctcaactccacccacaaccattgagtttagagaaacttccaccatttgagcttaagttaatccatccatctttgtacccaaaaagtcttccatggttgttgatccctctgtttcctcaacttcatcttgtaccaaaataatttgcaattctagtgacttgcatcaatggttccaggaccatggtgcatcacatttaaagtgtttcctcaacttcatcttgtaccaaaataatttgcaattctagtgacttgcatcaatggttccaggaccatggtgcatcacatttaaagcacaccccttggccctcttctcctgaactttagactgtcatctttcgatatgcttttgttgattcaagcaacatagtcgttacgcgattggaatttccctggaaataagggttgttatttccatcaattccagattttgggttgcccttataagtattaaacccaaccatttattgaggcccactaaactagttttcaagaagcccaataagtttaagtgattcacccctgatgatcgagatgggtctgctcctctacctgtcccaacacaataggcccaagtccgcaactgattggcctcagtagtctcagccagctccatcgtcttctccaagtcgactggttcgagaatacgcagggaactctaaatcaccatcgataatcccttcatgaatgttgattcaagcatggattccgccaccgtgcccagcaactctgccaacgtctcaaactgttgtcggtactcctgtaccgtggtagtttgttgtaaacttagaaatcaatcatacacagtgccttcatgaattgggaaaaatcgttagagaagaagaaatttcaactcaccccaactttgaatttcccgacgaagattctcccatctaaaccaacgaagagttggtccctccaaacaaagaatcgcgccttccagtttttgttccactaagaatcgtcgcaaactaaaatagcattcggctctattaagtctaatcgtccgggtccgaacctgtaaacacaggcagttcaatcttccttggattcacactatctaccaccttcaacttctcgactgttactattggacccttgtgcagacccaatcggaggctggccaaccttacctaccggacttcgtggatcgtcgatgaattccatagccatatgtgcttggcccagcagaatcaaatccaatttctctgaaataataacaattccttgatcatgggagtcgactttctctttcattgaatttaattcatttggaattgttgcctgagattcatcttcccccacatattccatctatttctttgaacttctgatattcggcagtcaccacgatcgtagactctaataccaattgatgtgccctgtattcaacactagctaaatgcttaagagctctatatgaacccaatacatgcataaaccccataaatctcactcacctcccttaaaacagcttgcaactattcaacaaattacataagtaccctcactcaagagaaagaccaatccacccctgggcagtagtgctctctcttagccctcctagcataagtgtaacgcacctaggtcctaacaccacaacaataaactaaatactcaattatatatcacaatatgataggatcgtaagcgattaaatatgttcaacacatccttagagatcatatcttatgtcctcaaattcaagtaatttggcaattggataataatctctcttcacaagatattgagaacaatttagtcaccaaatggaaaaaaaaaaaaaaa

SEQ ID NO: 185224 - DNA, 8574 bp, Cannabis indica
ctgcaccaaatgcttctacttcatcttcttcaggtaaaggttgttgcttatgtatcaagaaatctggaactggggaatcatctttggggtctcaaactagtgatcccaatgacccaacttttacttatgatatgctgaaagttttgattgagaggaatgatttttattcgaaagaatgcaatccccatttagatgtttctgaagtttcatgttgcagagaatgagagttaaattcaatatttttctgtattataatttgttgttgatcaaaatttcattggaagtaataacagtatagaatttttctccaggtgtttgaaatagattatactaagtttctacattgagtaaagttttatgatgtatagtatccctttggagatcatggaagacctgtttttgagtcttcactctttgatgatcaattcagggtgagaatgaggaaatgtggatagattttgtcacttgttttgtttcataatggctatgaagaaagtcaaaaagaccaagcttggtcataagctgtttaagtatataaaacctggatgcatcttttgatgatgaaatgatttagatttctaaatctaaagccattatatatatgtgtatgtgtttgtgataatagtgattcagattctaatagatgcagctcaaacggtcatatttgtgagtttaatatgtgtggattcttgtattgtgttgttgctcctgaagaattatttgaaaacatataggatttgatatctactacaatagggctcataagtgcagttcaaccagtgcaattggattatgaaatgattttcttttgttgttgaatgacatgtcatgacatgactaagcttaacttctttcttgttgcaatatgggcaagagtatgagacacccataccacactgttttatggatgaacctatacctatttaatcagatgtgtcccctttaatagggaccactttgtgtttgtggatgatactaaattcttagcagatggatgatattgattaggaattctctattgttttttaaggtatttggactatagggcatactcctttttaatagcaaattaaataaggggacactgttggttatttcagatccatgaagcttatggtagttatcattctactcactgttggtttatggttgattgttcagttgtgtaatactaactgctggtgtttaaattttacctgttagaacttttacaaagggatttcgattacactaatttattacattttcttgatagaatttattgatttatttttaattgcccagttgagcatttaaatggttagaattggagttgagtgaatatatgaggggaagagtttgaattttgaaatcagtgcatctgtgtatgtgtatctgagccaaattagttgatagtttattacttggtgaactaaccaagtaactcctcttttcacaacttgattgtatacacatgttgaagatctacaagtattccaattggtaaacaatttccttgtgatttgagtttgaaaaagaaacatagccatacattttgattttcttctaatatatgttgaaggaaccttcccacaacctcctatcataactaaaacaaaaaaaacacattgtatacaactctaccaaccaacttgtctgcacttgggattaaaagatgacacaagattataccaaaagcataattagatacaagaaagaatgttcctcaattacaaacaaaaactcatgtggttgaaagaatgagaatgatctcacacatagtatagctatatgtactatatctatctagctaactattcctcagtgtcgttttaattaccttaagtgataacctttatctctacctcgtttgacacgatgctaactaatcaaagctttgaaaaagacaattgacaaattcaatgctaacaaattattattagacacaaacaattctataaataaaacatctatatatatatatatatatgataccagtagtacttaacaccatctataagtaatgtcttgtgattggttagcaattattaaattatatgagattaatactaactctacaaataacgatataataatacactgacaattcttgaatcagtgtatttgtatgttgttcggatttgggacaccactactactaccacgatgggggcttactcaaattctgaccttgagcttaacaacttaaagtcccaaccactcgtcacaagtgattaatttacgccgttaaaaattattattgagtatatatttgtaccctgatttgtacatctcataaaaaaagatttgggattttttattgggggctgagataggagacaaggagaagggtgacccatattctacccatgtcattgttgggcaattccttataacatgcacactcatccttttccacatacacttactctttagtgcccagattcgttcagtctcagcaaagataaaagagagataagaatgggaagatagtaaagcatgtaatatggatcctaagtgggccccatattttgttttttccttttgggccttaaagtgggccctacaaataaaggttaaaataaaaaataatatagtaatgatcatatgctaaaattatgggccgaatctgatgttggttgagctgcccacaagaccaagagacagaattatagttgagataatagtataattcgatgaaatctgatccacagttgagttaacacaaacaagatagactgtcgcacgtgactgcctgtaagtgccgtaacgcaatcttttgttggcactcgagtcaatggcatgggctatttctgtatctactctctctctctctctctcaaaaatagtaaccttttgctattaattaaacctttctcctttatttattattatccttttcagacccttctagtaacttattattctaaacccaagttttgagttagtatcgattcaatactacactcaataattaatacaatttttgcttctaaactatgactcttatgaaattgtgttcctgtaatatgatcaacagcagcaacctaaaaatagttcaaatcatgtccattaattctatcatattaaattgcttaatattaattctttagttaaacaaatagtaaaactagagttcaatcaattaatagggcacgtgtgtatttttacttttttttttttttttttgcaacttgcagaaaaaggaaagagtcatgttaataattactgtacagtaacccaatcccgattctcctaaattgttcttttctgttttgaaagaacaaaactcaaattcaatagtaataataataaataaaagggttttttgcattaaagttgcagttttttaaatctggggttcaacatatttaattgaaaattgatcaagtttcaatcttttgtattttatttgtttaattattatatccatatttaccaaaaaagaaaggtctttggagtatatgctatatatgggggtcgtcaaccaacgctgttatccatctttggaaaccaaaccgctcttccgacgtagttttggctttttcactatccataaattgactcactttccgactttggagagtgttgcctactttattattattattctacaatattatattattatacagcgaaaacccaattgagtaggtttatcgtttctctgtgtatctgaattattatatacatcacacaccatataatatatttttatatatatattgtattgcttagcacgggggtttgatggggagagcagtggcgaagtgggaccacagacagcagaagcggtgatcgatattttgtgggttttccaggaaatgggaatttgagattgagagtcttgttgggacggtcgggaatttcatttccaaactatattttcactctgattttgtgctattcaaatatggttgaagctgaagattactgggtctgagttaaagtggggttctttctttttcttcactttgtttttgctttcagctgcttcttgaccaggttagactttcataagacatatttctttttctttctttctttgtctcatattttaattttcctaccttattgatcaactgtttttctttagtttatgagattagttgggtaagtcttagtttgttgttttttgttgcgaatgtctctcttcttgctatgatactggaaattggtattgtttactgtgtaaattagtagctgataccagtttttatagtttgttattatttgaattaatatgattgttttagtttgctggagtacttttagatttgggtgaagtttttggatcaaatcatctggggtgtcaaggtttattataatattatttagctttatagaatctaagttatattattttcaaaatgagcttgctaatggtatggttttgtatgctatatcttgaaactttgttggttttgttatgatacgtttgttcttaatttaaagttaattttccagcttctttgaagatgtcttcttcaagacccagccactcgtccagcaattcggggcgatctaaacacagtgctagaatagttgctcaaacaactgttgatgcaaaactccatgctgagtttgaggagtcaggtagttcatttgactacacaagctcagtacgtgttagcaactcagtttctgctgatgtacaaccaaggtctgacaaagtaaccaccgcttaccttcaccacatacaaaaagggaaactgatccagccatttgggtgtttgctggccttggatgagaaaactttgaaggtcattgcatacagtgagaattcacctgaaatgctgaccatgatcagtcatgcggttccaagtgttggagatcaccctgttctaggcattggaacagatgtgaggactatttttactgctcccagtgcctctgcattgcaaaaggccttgggatttggagatgtttctctattaaatcccatattagttcattgcaagacctctggaaagcccttttatgcaattgttcaccgggtaactggtagcttgatcattgactttgagccagtgaaaccttatgaagtccccatgactgctgctggggccctgcaatcatacaaactagcagctaaagcaattactagattgcaggctctgcctagtgggagcatggaaaggctttgtgacactatggtccaagaggtcttcgaactcacggggtatgacagggtgatggcctataaatttcatgatgatgatcatggggaggtggtgtctgagactacaaagcctggtctggaaccatatctgggtttacattacccagccactgatattcctcaagctgcaagatttttatttatgaaaaataaagttcgtatgattgtggattgttgtgcaaaacatgttaaggtgtttcaggatgagaagcttccgtttgatctaaccttgtgtggttcaactttaagggctcctcacagctgccatttacaatacatggagaacatgaattccattgcttccttggttatggctgtagtagtcaatgatggagacgatgagggtgacagccctgaatctgtgcagccacaaaagagaaagagactctggggtttagttgtgtgccacaatacaactccgagattcgttcctttccctctgaggtatgcctgtgagttcttggttcaagtatttgccatccatgtgaataaggagttagaactagaaaatcagatcgttgagaagaacatcctgaggacccaaacactattgtgtgatatgctgatgcgtgatgcacccttgggtattgtgacacagaacccaaatataatggacctggtgaaatgtgatggggctgctctcttgtacaaaaacaaggtatggaggctaggaatcactccaagtgattctcagcttcatgacatagcctcatggctctctgagtaccatatggattccactggtttgagtacagatagcttgtgtgatgcaggctatcctggggctctctctctaggagatatagtatgtggtatggcagctgtgaggataacatccaaagacgtgattttctggtttcgctcccacactgctgcagaagtccgatggggtggtgccaaacatgaccctggtgagaaggatgatgcaaggaagatgcacccaagatcttcattcaaagcttttcttgaggttgtcaggacaaggagcttcccttggaaggattacgaaatggatgcaatccattctttgcagcttatcctgaggaatgcattcaaagatatggacactttggattcaaacactgtgactgtcaatacaaagctatctgacttaagaattgaagggatgcaagaacttgaagctgtgacaggcgagatggtccgtttaattgaaacagccactgtgcctattttggctgtggatattgatgggctggttaacgggtggaacactaagatttctgacttgactggtcttccggttgagagagcaattgggaagcatttactgactcttgtggaagattcatcaactgatgttgtcaaatcaatgttagacttggcattggaaggtatgtaattgccctttcataatttgctttattttcaatatccctcttactttacctgaaagaccatttgcagacatgtgtttacatatgagcaaacaaagaaccatgtaggcatgttcatgcatttgctaaccagtgcactcagtttagaatggacatgtcttactcactaggactgtttataagcatgtaggaatgaccttttaaatttttatgtatgtgttaaccaggacattggcagtttagaatgagtatgcatattctgcattaccttgtcatgtgtgtacagtaacagttatgtttctttctgggaggaaagggtgttgttcaccagtttttgtaataatcttttttggtatctttttccccttcatggagataatttagtttgactatgtttcttttcaggcaaagaggaaaggaacattcaatttgagatcaaaacttatggttctaggaatgactctggtcccatcagcttggtagtgaatgcttgtgcaagtagggaccttcatggaaatgttgtcggggtgtgttttgtggcccaagatctaactgctcataagactattttggacaagttcactcgaatcgaaggtgattacaaggcaattgtacaaaaccggaacccattgatacccccaatttttggtagtgatgaatttggctggtgttctgagtggaatccagcaatgacaaagataactggttggaaacgagaagaggtcattgataaaatgcttatgggagaggttttcgggataaacatggcatgctgccgtctcaaaaatcaagaggccttcataaatcttggcgttgtgttgaataatgccatgacaggtcaagaatctgaaaagattccttttgggtttttggcccggaatgggaaatacgtagaatgcctgctttgtgtgagtaagaaattagacagggagggttcagtcactggggtcttttgcttcttgcagcttgctagcctagaactgcagcaagcacttcatgtccagcgcttaatggagcaaactgctgtgaagagattgaaagcattagcatatatgaagagacagatccgcaatccattggctggaataatattttcaaggaaattgatggaaagtactgagttgggaggtgaccaaaaacagcttctgaatactagtgctcaatgccagcggcagcttagcaagattcttgatgactctgatcttgacaccatcatagacgggtatgtattctcatgtcgaaaatatatcttctttctcggtatctagcagagaaatcatgcaacttttagcttcttaaactgtacaatgtctgcaacttaggatgatggacggcacagtctctcttgtttgattgctttatttagatacatatattcttttatgcttaaatatatgcaataattctggttcttaatctatcttgttatcttcattccacaacagctattctgatctggaaatggttgagttcactttgggtgaggtattggttgcctctatgagccaagtcatgatgaaaagcaaagcaaagggaatcaccatagaacaaaatgcagcagaagagactatgaatgataccttatatggtgacagtctcagacttcaacaagtcatatcagatttcttactaatagcaattaactttacaccaagcggaggccagattgttatagttgcaaacctcagcaaagatcagctaggagagtctgttcatctcgtgcgtctcgacttgaggtaccccttttcgcctaatttaataattctgtcatcactaaaatttcttctttgttacttagaattggctttacatcatgtttcttcattgggctgctgctcctttttttgggatcagattgattcatacagggatggggataccggaagcattgctgaaccagatgttcggaaacgaaggagatgtatctgaagagggcatcagcctgctgatcagtagaaaattggtgaaactgatgaatggagatgtgcagtatctgaaagaagctggcaaatcaactttcatcatatctgttgagcttgctggagctcatagtaaagc

SEQ ID NO: 185225 - DNA, 3364 bp, Cannabis indica
tttatccaaatattcgctaatttggagcaaggtgatagtgctcaagggttctctttcaagcatgagaagccaatctataaagccaagataattgctaatttagagtaaggtaatagtgttctagtgttctcttttgaccacgagaagcttgtcggccacttctactttgatttctcaatttttaaaggaatatcattgctcacccattggggacactaaggtgacaatcacaaatactagcaactagtaggggatgtgtattgagttgaaataaagaaggtttgtggtagactttgtttagaactgtgcggttaaccaacgaaataaatatacaaccatgccgggatttctcctctctcacccgaaaagttgctctataaaggctggatagttgtcagccacttatactttgattctaagttttttaaggaaatatcattgctctcacgttgggggacaataaggtgagactcacacatactaacgactagcatgggatgtgtattgggtgactcacacatactaacgactagcatgggatgtgtattgggttggaataaaagaggttgtggtagactttgttcataactgtgaggtttgccaacaaaataaatatagaaccatgtctctagctggattcctctagtccctcttgtcccccaagcaagttcaagatgacttaatgtttgcataaataggagggagttgacaccaccttcgaggtggtggactatttgagtaagtataatcatttcattccacttcaacacccattcactgctaaagtggtcaagctccatggagggcctgctctattattttggatcaagaccgggtgtttctcaatcatttttggcaaagttgttccatccccaaggaacaacactcgagcatagaacaacatatcaactgcaaactgattaacagactaggtcgtcaatcgtttcttggaaatttaccttcgttgcttggcttcaaataagccttgagcgtgggttaagttgctttcccgagcagaatattggtacaatatttctctccacacttctctgggttgttctcctttgaaggtgctttatggtcgtgagccccatcctttgtttgttgtactacaaggatcattgttgtagtggttgtggaccaactattggaggatcaagacacttttctcaatgattagaggatgcacttgttgcgagcttggaaaaagatgaaagccaacgctgatccgtctctttgccatgttgattttgagaagttgactcggtttatgtcacgttgcgcccctatcgatagagcacacttgcatgttgaaagaatgagaagttgattgcccatttctaagacacactgatgaattggcaaggcaatgtatagcttagagctgccagctacttcatctgtccatccaatattccatgtttcttaacttcgagcagctcacagcatcacccactcttcctcgacagtgccacctcatctcattgttgaccttgagttgcagatgactcaatagattgttggatgtgagcttccaggcacagttctcaaggcagcctggaggttccaatttagtggcaagacctaccaaccttcgaagctgcatgagaacaatttgagagtatacgaacacaacttccaaaatttcaccttgaggacaaggtgaaggatttgggagggggtggcatactgtaggagggtcaagggtgcttaagtgttacttttgtatgagttgtgacgtgtgttgagtgagggacctttttcgtagttgtgagtggtagaaaagtgttcattatgttagtgtgagagtgtgagtcgtgcatgtatttttatttaattttttgataaggatgagtcatgcatatattgggattgcattccgcgtcaaggtccaaaaggaccactaaccttttctataattgctttcccttttgagaaatacaatgaaaattcatggctaaaatgatttagttttcctactacagctactgttttattgttttttttactactgtttcttgctgaaatctgttctcaggaagatttgcacataacaaaaagttgctgtgacattagaagctgtatacaattgcattcaattgaaacatgcagatagaccgacagattgttcccatgtagggaagaaagaaagcattattcagcaacaccgaaaagcatctaatatgggcattgaattgaaactaagaatacacaaaatcatactaaacaagaacagcatcatcaaaacaataaacaatataatttgacgtgattgaataaaatcattacatttgatcaagctgtttgttgacctcttcaacctcctccagatccgtaagcaactggcgcacaatggcgccataggtcagggtaaatagctccgcattctgcatccattttcaataggtcaaacccagaatgagatctcaagataatgagaaaactcttaggtcattttattcaaataagtaaatcagacaaattcataaacgatagcactgaaaaggggaataaataaaattaacaaagaccgaggaaaggtttatgcttacaacgcgatcaacactagcgaaaatggcatcaccagaacgaggagcgacaggagccatgaaaatctgagctatatatgtaaaattagcaaataattatcaatatataatgaaaaataatcaacatggaaaaatgcagtattttttttttaagaaaatgagacacaaatgacttcactcttcattgaaaatttgctgaaatctgagaagtgaaagacaagaacgaaaggaagagcgattttagcaagcaaatcagtttagtgcagagttttcatgttttctaattccccagaaaatcataaaaatactctcaattcagttcaaagatgattcagaagtaattattgcaaaaacaacattcattcaggttagtgattgttacagaaaaaaaaaaggaaaattaaacatcttgtcattgatgtgaaatcgaatcaaattatccatcttcgtgctaataagagaaaagcaaggcaagatctataccagtgagtgaaggcgcctttatgaggaagtgtgggtgatagatgtattgagcagcaacgtcgccggcaccccagagtaagccggagctgatgaactgggttttctggagcgaactgacttccacagtccttgaaattttgctggaaaatgaaaacccgattcaaaacagagatgagaatggtaaagtgggtctgaactgaatctgaaatcgattttcgatttaggtctgaacaaatttagggattttccaatttgggattcattcatttcaggcgttaattaggacatttacagtctaaaccgggtcggatcaagcccgatccgacataaaa

SEQ ID NO: 185226 - DNA, 2619 bp, Cannabis indica
atttcccacttgttgaataacaagtatagtcttatttccatgttttcagtcatggttgatatctcatttgttccctccataaaatacgaggctttttatcatcaatcaactatgattccttgatatctaagtttgactttgtattatggggtaaatgtgtattaagtttaatatataatcacatatttcttcaggtaaaggaaatgcccaatgttttgatacttcctcgaagtgcagattacagtgaagaagtctggatggagataagggataaagctatctccatattgcagacattcttcttccaggggattgttccaaaaaatgccatttcggatgaagaggaagaggaaacaagtgaaatcactgaaaatgaagcatatgataagaaagatggaagtctattacaagactcacttgttgagcagttaactaatgtcattcaagtaactccagaaagctcccacaacaaaggagctaaagagccaaaagagacaatgcaggcccagggttcaggactgtctcaaaatactgcctctcgatctgatggtaggcgcagtaggtctgggaagaaagccaaaaagaggcacacacgccaaaagtcctggcaaaaattagaggatccttctgccccagaaaaggagagtacctcacatcgagatgatgatactgctatgagtggaacagatcaagctttgagttctagttctaggtttgcatctcctgcggactctagaaataggaaaactacagtggaatcaattcaagaatcaccttccagccagcttgcaaaatcaatcaagaggcttagtggaaaaccagctgaacttttgaaagatgggtatgttgtagccctatatgcaagagatcgtcctgctcttcatgtatccagacaaagagctaaaggtggcggttggttcttagatacaatgtctggtgtaacaaaaagggatcctgcagcgcagtttcttgttgcttcaagaagcaaggttttgctcataataatttccctatcttctaataaaaattgtagccttttgttattttttattatgtagtcagcatagctttgatttgttcactctccagctgcttatctgatatattatacaaatcgcacttgtgtaggatacaattgggctacgatcatttgccgctggtggaaaattattgcaggttattgtaatttgttattgaattggcagttggcttcttattaagaaacactgtcagagtcatatataaatacttatcgttaatctgacaacctgccctggttaattattattttcatgtagtgcgatagctaacacagcttctaatttcacctcacagattaatagaagaatggaatttgtgtttgcaagtcacagctttgatgtttgggaaagttggatgttagaaggttctttggaggagtgcaaactggttaactgtagaaatccactggtaagttgcactatgatagtttatgaacttttaagtatgttgccttctcccaaaatttttgaacctttctttgtgggagtgtcatcggcccatagtttaattccctctttaaccatggagctaaggtcttgaggttttacattcgtgttcatgtgatgcattcaattgtctgatctgtttgttctgccttgaaaactgtttgagtcctggtactcttaaagtgcttgttctgatagttaagtgagcagttccaacttccaaatgggggactcagtttcggatgcctgaaattgaacagttcctcttgaaatcttctcaagtaattataatttaaatttagaactacaccacagcttatgggctttcttgatgcattattttcctcatctggatacattgaactgtttaaaatttgtcttgtttttgattccattttcaattctaaaaagctcagtaatagacagaattacatttattgacccttttcactttcaaactgatgctttacaacaagagacgttacaatgattatgaactttgttggatcatagtgaatcgaagaatcttcttaccctctttactatccttaccgtactatgattaccttctgatttccataatcaatgcaaactgtaggctgttttggatgtcagcatagagattctggcagcagtcggtgatgacgatggagtcactcgctggctcgattagattcaaaaggtgagagaagcctgacatttttgtttaacctttttacatgtggtttgtattagttcaagacagcttgaaagttttaacttgtaaatcattcctttgttttgattttctctttttcatttcctatcttataatttttatcttcatcagttctgtaagacaatattattttcctggtgggttatttggcctcctgatgaagtgaatgtactcgtattattatacaacagatactgacttcccattgtttagtgttcacccttcgtcaatgacattaaatgaaaggaaaggaaaactataaaaatttgaaaattattgtctttgttgaattggttaagactaaattgagtgaatttaaatatttagggtgctattgaaagtaactgaaataattacactgcataattttaaaataaaaaattatttggatgtaagtggtaattaaatgttatt

SEQ ID NO: 185227 - DNA, 4763 bp, Cannabis indica
cgaatgaattactacgtgttattactttacttaaactgagcttaattaattattaagccttatttattattttatagtatataaatgtgatgacctaaaagtgtcgggtgtgatggtagtgattggaagacatgttgaggcattttcttaagatgatcaaatcagatgccaaattttcaaatcatcatgctaattaatgatttttttaattactatatgtattatattatatatctttttttgaaacgttgctgtgtatacatgtttttttttttggacgttatactatacatgtgactaagggccttttaaaccttttcttgattaaatttaaaagaacattcaaatgataacttgaaattatccagactaattgtccatgaaccgactttctatgtatcttccaactctctctctctctctctactaaaatataaaattatttatatggcttttcctatatatccttttcgatctaaaaagtctttattttttgttgaattacgtgattaagtggaccccatttttgtccaacgttttctatttcatgtggggtacttaaatttttgtcggtggttgtatcttttgggattgctatttgctttgatatatttttggagccccttttgtattatttggaccaaacatatatatcccacatatcttttaataacttcaataatatttgttaatattataataacaacaacttggcatggtgtagaagtaaagttataaattgtatacttattattattatttctatttcaatttaaagttgtctacctagttgcttaatttattgtttttagaaagagaaaaaaaataattaacaaaaagaatgacaaattaaatttagcagagaacatatatatgcttatatttgttttttatagtgacaacatagtgcaatgttcacatattcaaatgtctttagtttgtcaagttgctttattatttttctctttcctaaatgaagacaaaaaattagtaatctcatatgaatcgtgtgttatatgtatacatatacttgattttatttttcatatatatatatatatatattttattaatttctaatatgggatacattttgtatgtacatattaacaggctgtaccagtgttcctttctgagattgcacccacaagaattcgtggtggactaaacatattgttccaacttaatgtcaccattggaattctcttcgcaaatcttgtaaattacggcactgccaagtatgtcaaacttactccccatttcaattatatttatattgtgcagcaataatattaagtcagttcgcacagaaaattaatattactattcaaattgtgggactaattaataataatattacaacaaatatgcacacacgtgcccattgttatacctcgttgtgtattacaaaattattattggtcaatatttgttttgaaaatgaattgttgactcttttattaattgtatcatagtccccaaaatcatgcttgattgttgactttttttgtaattataatggatataatattgattccactttggagactgtgctatataagacttagtttggatttaacattaataatgttactaatctaacacctggtgagtggtgactatcaaagtctataatatcatgtaacgttcaagaatcttaactgaaccatgtgcattggaaaaaccaattgcaatcatcatgtgaaaccccccagtttgacctttaaaactaaagttattatacaatttgattgttgaaatttattaacatttgtttttataaatattggttgattactttgctcaccaactgtttgatcatttgtctgaatgaaacagaatcaaaggaggttggggatggagattgtcattgggtttggccggtatccctgcatgtctactaaccattggagccctcttagttgtggacactcccaacagtcttattgaacgtggtcacttagagaaaggtaaagaagtacttagaaagatcagaggcactgacaatgtcgagcccgaattcaacgaactcgtcgaggctagccgaatagctaaggaagtaaaacatccttttagaaatctcctcaagcgcaagaaccgtccccaactcatcatcgctgtagcccttcaggtaagaacaattaatatcaacatgacattcataacataacattaatgtatgtaagttagtatgagatagatatcatatattttacttttgttatttgttcagatcttccaacaattcactggtatcaacgcaatcatgttctacgcgccagtactgttcaacacactaggcttcgccggcgatgcttcactctactcagccgtgataacaggagcagttaatgtcctatccaccgtcgtttccatctactcagtggacaaagttggacgccgtatgctgttgttggaagctggtgttcagatgttcttatcccaagtggtgatagccattatattaggccttaaattgtcagataactctgacaatctagggaaaggttatgcaattctcgtggttgttatggtgtgtactttcgtgtcatcattcgcatggtcttgggggccgcttgggtggctgattcctagtgaaacattcccattggagactcggtctgccggacagagtgtcacagtttgtgtcaacttgctattcaccttcgttatagctcaagctttcctctccatgctctgtcatttcaagttcggaatcttcttgttcttctctggatgggttcttgtcatgtcgttctttgtcttgtttttgttgcctgagactaagaacattcccattgaggaaatgactgagagagtatggaagcaacattggttgtggaagaggtttatggatgatgatgatgatcataataatgttgtcaaagttggtgacaagataaataacggtgcttattgatatggagtagagtataggcctctgcatgccatgtaaatttttttatataatttttttttgggggggatgggagtaaagtttggaagaataactaggaaaatgactaataatatgtagtcaagtacaattttattttgatgtgttgttttatgggggtgttttttgtatacgaggccaaaatataatcaaaggcttcatttgttttttgtttaaaactcttaattttaattgtgcccttaaagatttggatttggatctctttcatttcatgagagaattcttttgcttgaattaatgatatgataacatattcatttcgcaccaagttatttatttatttattttttgtgtggattttcaccaagttaaagctcaataatgttttttattgtatctttttctgcccttcatgtattaatgtaatatatttttgtgttttatcttagatctaagtactgctaatttgaattattcgtgacctcataatgttgtaataggtatctttccaattttcaaaaaattgtggataccttataatgttgaagataaagttgaaaagtttattttatgacatattaataaatatttaaattagatacagtaaactatttaaaaacaaattcataaataaataggatacctagtactatatatttctcagtatgatcacctttcaatttaacattaacggttagatctcgggttctgttaacccctcaagggaaattcgacaaggtgaccttctttcgccctatatattcctcatgtgtgccaaaggctctcttccctcatatctaagcacgaaaagtctcaatctcttcaaggatacaaagtggctagaacgacctcagtaattttgtacatgttcttcactgacgatagtatcttttttaccaaagcctctataaactcacgcaatgccgttaagaaaattcttctcatctatgaaaaggctacgaggcaaccagttaattttcaaaaattctctctctacttctccccaaacacgaccctcaagaacaaaaccttaatctcagattacatgggtatccttgtcatagacacctttgagaaatatctgggtctcccccaatatattgcctgaaccaagaaacaggcattccaataccttaaagacaaaatctagaatcatcttaacaaatggaagaacaaggttttctccaaagggggtaaagagattcttctcaaatcggttatccaagccattccacctacataatggcgtgtttcaggcttcctgtggccacctgtcattccctggagtctattatggcaaacttttggtggggttctaattcaaacaacaaaccctctacctagtggcaaagttggcaaaaactccatcgctccaaacaaaatggtggtttgggatttcgatcattggtctacttaatcaggctatgctcgccaagcagacttgaaaaatcctttagcatccaaactctcttgtggctagaattgtttcaaccaggtattaccctaagtcctctttccttaattgtactcttggccactccccctctttcgtttggcgtagcattcattggggaaatgatttgctgcacaaaggacttataacaaaaattggcaatggtaagaacacatctcctacccatgatcactggataccctcatagaaacttccataagcaacccccatccctgttagtgtagactatttcattaacgataccatgacatgggatcgttctcgtcttaaccaatcttatccctcacattgtcaatgacattctttccatccctctcctacccggaagatttggatttggatctcttatatttcatgagagaattcttttgc

SEQ ID NO: 185228 - DNA, 1146 bp, Cannabis indica
aacaagacgccacgtaaactagtaaacaaaaagtaatattagtacaaaaaatataacatcatgaacctaacaaggaagaagaacatttcactgcagaaaatctcaaatcataatttcctcaatacaacaaacaagcccataattataatgataaacctacaaaaatagatatcatacaaaaccaaatgcttacaagttttttttttaaaaaaaaaccactaaaacaagaacaaatgcaagtgcagcctaataattagtacaaacttcaatcattttgcattcattatacctattttgtggcaacacaagtctataaatggaaaattctaccataatgaaacagtgatctcactgtgtcaccagaaagtgatgagaacattacctgtaaataacataatgatataaaatggaaaaacattatttatcaaatttcacttattttattcacaactttctcggcatccaaaaacacacgttcaaacctaaccgactacatcaaataaccgaattcaatcacaaactggaataatcactacggatctcgcgaatcaacaaaaatcaagaaggagatcaaaacctgtttgtattgaaactcaattgtgtaagagagaagcatggggctaatatcaccagcgtcagggcgagacacgtcaacgatgatggccttgggaagctcatcgaaaattcgagtaggttcgggacggagcgagaaagagaaagacaaagccggctctggttgcatttggaagtagcgagagccactcccggacgtgatcaactgctccgattccatatgatctctagtcgaatttgattgtcttcgtgatcggtggttcgaattcaaaataagaatttaacaataaatgtgagatatataaatatataaatatatatatgtagtggttcgaatgaagaaaagcgttgggttggatcgtgtaacttgaaagaaaggaagaagagaagaagagtgaggaaagccaacattagcaagcaaagacagatatatagaaattggaactgaaatcagaattagaattcgttggtttttatggaaaaaaagaaatatgttgatgtggcgttctgggtggttcttattaatacaatgaccttatttaaagtgtgtttttgttcacttattattttatt

SEQ ID NO: 185229 - DNA, 7470 bp, Cannabis indica
ccctcaaaggtttgcctagcactgttgtcaagtactcgtatactaacaaaaactacaactgcaaatatggcaataaccgcgagtagtaatcctgtcatctttaactgcaaattgacattaaaacattatgatcacaacgatgatgatagttcatatgtcaaaactttgtttggaactcggattttataaaatgaaatttaataaaaaatttcgagttgtatttttgttttttttttttctaaaaaattcaaacttccaaacaaaaccaaaaaatataataaattaagttggatgtaaagaatagtaccttttttgatttttcagcatagagaatgaaaattgttatgtatatgaattgaaaaattgccccaattgaattgacagtagcaaccaatataacaccaggtgtcacaaatggtgatccataccaaagacatatcaaacaatttagaaatgaatatatgtaaggcaatcctgagaattgttctgttgattggtttctcataattctcctaaatgttggtctgaaaatacacaaaaataaatattaattaaattaaataaataatttttaaagaggtaaaaatttggggaattttcatttttatgattttttaaaaaattattttatgggaaatttttttaaaaaaaagttaaagcaaaaggtatatgattatcccattatggtaactggttacctttaaagtatctggttatctttacttgattttttgatatctttcaactttttctttaatttgaaaaaaataatcatatttttacatgcaatgaaaacccataaaatttagaatttcttctaaaattattattaattaagtttaaatgggaatttttattatggtcttaatttggttggaaaacttacattggtgacacaaacaatccaaaagcaaagatattccctgcaattaataaaacaatgtaacaaatcagtaacaaaaaaaaagaacttttgaataatacccctaattaagttgatataaataaatattaaaaaatatatatgtgctataattataatattttcaactgtttttggcatgactaagccaattttcttatttgcaaaaaaaaaaatgttgcattgcattaagaataatagaaaacaaagaacacttatacatatgtgatttttatttttttactaaaatattaaaaaatatatatttataaatattaagaagaagaagaagaagatatatacctgaaattccagctgcataactgcaaaattcatatacagaaaacaaagcaagttgtcattattgtataattaatctcaaaaaaaaacccagcaggagaagctttttctctttctcttaattttgaagtttataaaaaattttggtcaaagtaatttataaaaaagggttctcaatttttctttctttttcttcactttttttttttctttctttttaatatatgtaatatatatatatagagataagaaaaaagacagataagatcttatgtaaagtatcaaatgaaaatatactataattctatcttcatttaaatagtgttggcaaccaatggctcttcttgtcaatttatttattttattttatttttctgatttttcaattaattaatttcgaccccacaattgtgtatttggtccacatgttcatggcaacttgatcctattgattatgtgtacaaaacactttttgatcaatttgagactctttcatcaaattgtgaccaagagaattatatgagaaattttggagaatatattattaataataatattgtagatttccaaccacaaaatgttatttagaaaatttatttattatggacaaaaagattttaatatataaggttttagagatgtgacatataattcataagtcttatcattttaaagatttatattatgtgtcatttgttgttttgatcttacttttgaaaaattaaatatttttgtgagaattttatcttatatattttattttgtttttcatgataagaagaagataatattaagcatcatatataaaaagtacttgataaccaagagagaaaatcattttgaaccaataaatttcacaaaacacatttaaactaagaatttccaagaagttggataatttgtgttacgcctatttttcaagagcattattattaggtagatattttatgattagttagcaatttattataattattattaaagtaaaatgaatgaagtctaatattagattacaccaataacgatataacactttatatacgatactggcagaaatttataatcaaggggctaaaatgtaaaaaaaaaaaattaaggggggcccaatgggactaagtgtacacgcataacatatcaagttccgagaggatcatcgcaatccaacctctcggaacaaatgtctacattgacaatgcagagactatagtgtgcgtgcctatctacttctaatatagtggctctactatcaacccaaattgtgcctggaaaatcgtagaaagaaattcactttcttcctgtcatttctcatgcatggcgaaaccaaaattacttttgatcccgccatgcatggagggtgacaatgaccagtcccacacaatagtttacatgctttggatatgaaaatctatactgatcatcagtggtcactgaaattttttcacactctttttcttgttcaaattgtctagatttttctttattaatggattctttcatctgcatattaatagttttttttatgtgccaagtcaattattgaaactcgaactcgatctcacataccaagaatggctccaagaacaattcgagaacaccaatcacagaactcaagagcacaacttatagtaaaaataaaatgaacttgaattaatgttattagctttatttctcaagtagcttatgattacaatgtgtttgggagtttgcaaagtaaggaattagagatatttatagattaactatgagaaatgctaaaaggtattaatgatatctagcgctcttctatacatgtcaatagacctggctccaaatatatgcaaactgggcttgtgcctagggtacctagtctaaaggcccaattttttttttccttttaaaataatattttttttactaattttgaaaaatactacattttttctaattaagggtccaaaataaatttttttctatcacccactaaattttagggttggccctgtgtgtcaatatcgctaatggtgtaattaagtatcgagacccatataatttaatgtaatcttttagagagtattgctaactaattgtaaagtgacacgtctagaagatgctaggcgccaccggtacccaataacaatactaattaaatacctctgaatctttgataacataagcataatgaccaagacaaatctgttagagtaacagacttaactaccacctaactcctaactaacttatattcttagtaaaaagagatgattgtgaagccaatcacaaagagctatatatgtaacttaaacaccatattgtgatcaaaacttctacacattactaccaatttgaaaaaaaaaatgactatagtttttcttaccaatcaaaactttggatggcttaagagacttttgctaattggttataatgagaattaagactttaaagactgattagatgaaacagggtagtctgatgcagaggaagagccagtccttgtagaaaatgatgaatagctagagaaaagcttataagcttctgaatttgtgtctctcaaatgatccatgtattcactcaaggcttggaatcttgattgatcaccatgaacacttggttgcaagctcaaagtaagaacaggaattcggccttcaagcatgctcaccgcggttgacattgcaggacgaagtgctggtgaggggttagtgcatagaagagcaacttcaatcattctttttgcctcttctttgttgaattttgttcccaattttggatcaacaagttccattagatttcccttttgttgtaagaaaatggcctaaaacaagtatagtaaataaggttacaacaacattaccaatatgaaaatagaaagaagaagaaatgaactaaaacatgttacccaatctagaaggcacacaaagttttcatccgggtgatatcttgtgttcttttttccggctacgatttccattgctacaactccaaaactgtatacatctgctttatcagttaagtaaccccataatgcgtactctggtgccatatatcctctgcaacaaccataattgttcattaaacaatctaggaacaaccagggtcggccctgagttttgttaggctttaggaaaatagattttttcgggtccatactataaagaattactaaaaaaatatttgtattttcaaaaggtttttttttttgggctcttggcgggtgggccttaggcgcaggcctagctggcttagcccagggccgaccctggaaacaagcaatcataatgttgcaacttaaaggaagatataactcacatagttccagcaactctggtgttgatgtgagtgttttcctcttcatttagtttggctagaccgaaatctgatattttcggtgtaagctccctatctagtagtacatttgtagctttgatgtctctatgaataatttttattgttgattcctcatgaaggaaagcaagacctcttgcaatgcctatgcatattctttgccttgtcttccagtctagtttctctctatcttcttcggtacctttttaagcattaaacacaaattaatgaattcatcaaagtagcaaaagtccttatccaaagaaaggtaacaagtttcaacaataaacttaccaaataacaaatttgcaaggctattgttctccatgtattcataaaccaacaacaattgctttccttcgatacaacatccatgcaatttgacaagatttgggtgttgtaatgcagaaatcatgcctatttcgttaacaaattctcgatttccttgcttcgattttgaagaaagttgcttaaccgcaataatagttccatctaatagcacaccctgcaatagaaatatgaagaatgcattcatttgagtgaaatcatagataaagtaaaaagagttttggataccttgtagactgatccgaatccaccttctccgattttgtttgcagcatcaaagttgttagttgcagatttaatttgcttaaaggtaaagaaaccagtttggagatctaatcctcttagaactgtacaaataataagaacaaacattcaatgaaagtttaagacttagggtacgtttggttgggatgaactaatgaaaatacaagaatcagaataagaatagaatcgaataaaatataataatcattccactgtgaaaaagaaatagaatgaaagattcctttccatttcattacctctaaccaaacacaaccttagatacttatattcttggtgattatgtcaaccccatactttaagatcctaatcatgaaaatctaactaaattgataatgacttaagaatatttgttttattggatttggtaaaattgatgaaagtattttcattaccttcatcccttgattcctttcttttcaaatagcatttccaccaaacaatgcctatagttatgaaaacaaggcaaaaagataaaaccactccaataatgatgaacttcatgtcttttttctcttttggaggtttaaaatctacaaaacaaaataaaacaaatctcacttttcaccataaacatgttagtttttttcctaataacatgaacaattaagtaagttacttaccagattcaattgagatagctgatattaaagaaccatacattcctcgctttggaatattcctcgtccctttcccggtccattggaatcgaatctcgagtgttttataactcacaacagccttaactactttgataaactccttatcaacaccattagcttccttttcaatgttgaaatctttcaactccaatttttcctataataacaacataactcaatcaaacataaatttcatgcattagtatgatgaagtaggcgaaaaatcaagactctacctgaacataaacatcaaatattcgccttccaaagctgtaatatgatctgttgtttgttactactatctcagcaaaatgaagtttgacagtgtaatttccatttgctaagcaccgagcatagtaagttagcgaaagaggggagattcgtgctgttgtgtagagctcggaattgttcattcttaatacagagacattgtttactatgtagtctgatgctttgttattaacatcccagaaatcaccagtgttgcttaatccccatgttggcgagtattggacgaatttcgcagctcctactaaatcctcatctccttcatacttgatgcctccaatggtagtttgttttccaccacaatttatatgcaatgaataatgatctacacaccaaacaataaagcaaagaaaatcaagattcaagaacttaactactcaagaccagtttctgttgaaggaaacaatttttattctgttcctttgtttgattgcagtttaaagtattggaatgacaatttcattttgaatagaattttagaccattccattacaagatggagagaaaaattaatgtcattccaatccattctattcctatattcttattctcattctcagtcctatttctatatttttattcctctcaaccaaacgccaccttaaacttagaacaaaagagttagagagtagtgattgtaagagtgaaacagagaaacattgtaatgccattcatggctttgtgagctcgatcgagtgctgagagtttgtttcgatattgtttcaagaggtgtaaactactgacattggagactgtaatcaacttgattacactagagataactcctcgggggagagctggagtaggactcaaattgagatccgaacaaggataaattcctttttgttctcattcattctagttttgatctttcattaattttgttaaattacaacatttaccttttgaacatggagccaaacacttgttcagaattctgtaacaatcatattgaaaacaaacattagtaaagcaaaagatcatcatgaaaactaatgttttttctttcatttcatcgcgatagttttgttaaagcttacgagttgtttttctgtccagatgggctccgaaaatgattgctgatgatcaaaaacacaagtgtattcagtttgacatgattatgatgcaatgaaaatcagaaagaaaagaagaaaaaagagaagctcttacaaagtatcgcgacaactcgatggttcggatgtctcagtaaaattattgtaagaaatatctatttggctgcagaaagaaattacaacagaattaactaactattcttactgaatcttagcatgttttcacattgttatgtctataatgtaatacagttaacttaaacttactagttagtat

SEQ ID NO: 185230 - DNA, 981 bp, Cannabis indica
aataattttaaattcaattttttaagtataattctttagaaaatattattaaaatatgataaatcgataactctaaagaattctaaaaaaaaaaaaatcaatccaacaacttcttatatcaaaagaaagcatactatattttcaaacgtacgctatagtaaaaaaagttaaaaaccaaacaatcatcacacaaaatagagatttaaaaaaatacaataaatatataaaaaactcatcatataatttaaaaaaactgttatcaccgtattttatttgtagtcatcactacatttacagttaatgtcattaccaaatcttaattgtaattattatttatgttgtgtgtactgtatcaatttgtggtttagaatatttgaaatcaatacttattaagaatattatttttccaacacaattgttacttttcatccattgttcaaatatttgtattgattaatcagttaaatcaatacaaaacaaaatataaaagagagaattattgaatactttaccttttattgttttgaatgagttcttgtatttatttgccaataatatattatgcatctcctcctacttatacttcgtacaataaacacattatttatgcttcaaacaaaatgagaataaataatggttgctagaaaaaatattccacaaaattaattattaattgaacatttaacttcataaattaatgaaaaataaaactatataacttatgtatcaaatagatataatgcaattcaatattaaaaacattttaaatatatttatgagttaagagcaataagcatcatcctaaacaaaggacctgacaaactttggtgggataagaatgtgaaagcgttattgtgatttcatatattttgagtcgtcaatatatgaggttagaacttgacatgtatatttgttgattttattggtattaaatcaagtatgcaacgtaacagttcatattatttggttatcattgtacca

SEQ ID NO: 185231 - DNA, 6024 bp, Cannabis indica
taataaattttaaatatatattttgccaaaatttatgcttcagtgtataaggaccttagtatcatgaaagtttctgtgtcttgaactattgcaaaatatcatactagtaaccaattatgctaacatgcttattcagttacctattgtaatttactatttgtcacttagtttcacattctatatgtgcagtgcgaaataactatgatacaagacatcttgcaaagattcttatccatctggcatggtgtttgcaagagtcactttctacttctggtgaaccatctgttgtttatgggaaagctctaaacgcattgtacatttcatctatctttctaaagtacttgatagaaaatgcaaaaactgaaaggattgaagagctgtatctctccctagatgaaagtgaagcaatgcctgcagatgttacgcaaggtaatgtacttatgtaaaagctgttggctgcatgtgatatgtatatacatatatccctcgccgctatcattctagaaatgcattgtagcatgattagcatctactcatcttgttgtcattgatattcttgttttgcaggacaaacaatcgaggactttcttatgaattctgtgcttaggttcattggttcaatagatgtgaggtatgtgctggggtattcagtcgtttatttagtattattattattatagccactatcttcctgactctatgttatatatctgtttcctatcaagtcccaatacttatgtcctccatttggaactgctcaacttcatgctgattgcaatgtcgactcagcttctttctgggccttctcctgggctgaaagatgtgaaccctttcattgatgcagcaatggctcaggttactaaaatttttgtcttagcatttgttcaactttataaatttttttatttatctaatttgcatcttacatcaataatttaacctccaggaaaggtctttagttatgttggtagtgcgtaggctgctactcaattacatcacacgccctcccttgaacaatgcacgttattctctatttccagaggaaagtcagcccggtggtgttctacaaaaagtgggttctgcagctggtatgtagtttctattgctaaatatagtttatgtaatacctataataaaatttagggtgtcatcatactgtaatgtaagactataacagcatttcatgctcactttaatatgtactttctctccatgaaagcaattccagcttttatgttcaaaattacagagacaaaagtgatttcagtggaaaacattatttgggttaatctgaagatgaagccttaatgtatttttcttgttcatctcttctatgatcccaaaagaatctttaaagtttgcaaaattttgaagtttggaaactgatctattttattttatgttttacttgcagcaaatattgtattgctaccattcaattatctggttagttcaagtggggaaggctcgagaagtccactggcagacagcagtcttcatattctactcattctaattcattatcgcaaatgcatagtaggggatgagtttatagttgacaaaagtgatgacactactgcatcagataccaatttgaaacaaaattcatgtttttctgagaatcctttctgcaaagcccttgagaatgcaacagatgttgaatgtatggcttgcatttacgatttatctcaattatctgtttcctcttcattttaataaaataaagattatgaatgatgactttgcttacggtgctgcagttgaccgcttagatacggaagcaaatgttcccaatggaccagttctgaggttaccttttgcttctctttttgatactcttggaatgtaagtttttcttttcctattttataccttgtctgtttgggggatatgaatgaaagttacacttaatgtgaagaatatatgaaactattctgattcttggctgcttctatttatctttgactggattcttggcaatttggcacaaaactttcattgatcttttccttttttaccttaaagagagagacaaaggttacatgttctcgagtgacttcctcccaaatatattgagtcctcgcttatgctgaggaaggctgtgattacaacaaattactgcacaaactttatgcaagaacaaacagagaaaagaaaactgtttaataaagctatatgctacttgttgctaatgacttgtatgtgccatttatgattcccaaaaaaattaccagtcattgattgtaaataatataaatagcaactaaatctaattgtagaacgtaaataagtagaatcatttttagcagtggttggtgtgcaccgttaactgttgtttttttttcttttcacatggaattaatttaagtgatttcagatgattttcttaggttattaaatcacttgctagtgctacttttataactttgtttaattggttctgccttagcaggtgcttggcagatgaggctgctgtactgttgctttactcattacttcaaggcaactctgacttcctggaatatgttttggtgcgaactgatttggatacattggtatgcaacaacaacttatattttccttgggaaaaaaaaaatggaagaatttgacattttctcactgcaaacgtttttaatttatttatttattttgtacttttacactttccattacctaatattttgtacgcatcatagtttaatgcattgagctggttaccctggcttaactgtatcactggctaattctgaaatggaattctgtgatgaaattgacagttgatgcctgttctggaagctttatacaatgctccaaagaggtcctcaaatcaaatttacatgttgctgattatacttctcatgctcagtcaagattcttcttttaattgcaagcattcacaaattggtatgactgcctctgctgatcgtttcctgatgtatgccttttgaaataaggatcatgataataagttttgctcattgacagatacttctgagtgttccctggtataaggaacgcttactccatcagacatctcttggttccttgatggttataatcttgataaggactgtgcagtataacctatcaaagctgcgggtaagacttttctttcatacatagtaggtgctagatttctttaccaggttcaatatcagactgccatgtaacttgagatttaattagcaacaccttttgtagtctgctaaattgatgcatatgggattcatacaagtttatgttgtcatgttatagatatcagtgtatgagagtagacaccgaactgatatcatttagccatgtcaagagtttttggttgaataaaacttacctgattggaagtcacccttgcttccacaagttctaatttttgaagcttacacaatcctggtgaagttttttataggatactaggcatcctcttaaacaaatcaccaggagaaaatcacttcctctgtattcacaaatatttgggctgctcttagaccaaacctcagaattgtacattaaatgaattaattcaagaggcccatttcttccaatgacaactgaaaattccctcactaatccattaatttgcgcacaaaatatgctattttttgtgttagtgacaaatatttgggctgatcttttttttctttggctgatcttagaccaaaactcagaacagtacattaaactagtcagttgaagaggctccttctccccagaacaaccaaaaatttcccccaataactccatttaatttgcgcactaaaatattttatttttgtgtcaatgacaattcgacaaacatacttaatcagttgatatttataatacaatattttcttctggacatattggtgatttgtaagtttataacgtgaaataaacttgtgcttgtgtagatttagacagtaatgtgttgctgagctatttcagttgtgatctgcaacttcccatatcattttttcttcatctttcttatgctgaatgaattgtaacaggatgtttatctccacactacttgtttagcaacattggcaaacatggcacctcatgtacaccgcctgagttcatatgcatcacaaaggctggtcagccttttcgatatgctatcacggaagtatgtgttgctctaaagatgagctttgtattttacaaatcatttagtaggtttgtagtaatcctatatcatattctctgtggtattattttactgaactatgcatcttggcatgatgtctaggtataacaaattggctgaactacgagataatagcgggcatttagtgaaagaagaaaatggccttgctgatgatacggtgatcacttataattgtgaaatttattttcttattacacttgacggcaaaaagatgtttctttgtttgctaagattgatctttctcagcagtcaacagagatgcatatatatacagactttctggagacttgtccttgaaatattgaatgcaattttgacttatgccttgccacgaaatcctgaggtaccacaatatggttttgtagtaaacctaattaatgctcagaagaattcatgtggtcactcgttatgtttttcttagttcctttatttctatgatgcacaggtagtatatgcaataatgcacaggcaagaggttttccagcctttcaaaactcaccctcgcttcaatgagctccttgaaaacatctataccgtatgtctctcgtatattctacacattataatttgtcagttgaaatgctaatttgacatacctgtctaagttctcttttggtgtcataatgataggctatagttcttaccacccttttctatttgtaggtattggactttttcaatagtcgcatggatgcccagtcagtggatggagaattgtcagtagaaaaagtcctccaagttattattgtgaactgtcgatcttggcgtggtgaagggatgaaggtaagaaaggagtgtaccataagtgttctagtctatcttgcaatgcttgctttgctttctattcttttttgttaaaagcttgaccatccgattaatcagatgttcactcaacttcgcttcacgtatgaacaagagagtcgcccagaagagttctttatcccctatgtgtggcagctagttctatctcgcgggtattctttataatccttcttccaaaaatgataattaaaagttatagttgcattaacttttcatcaaaattatattcgcacaaaattttaggtctatagtttcacttttattaatcttattttatctcattgtatgtccttccagtgcactcagttttaatcatgaagtcataaacttgtttctagctgatccacctgaggatgtaagtacctgggaaagacattaaaatcaccaatcatggaagctctcttatttgttaatttcattgatcataactcataaggaagttctaatcacttgcagggacaaagcaactatgggatggctctagacaatgatgtcaacggtgagtcggagcgagccgttttcttagatgcctaggcatctctgtagaataaaagaaagatgtttcatggtgaaacgtgaatatgtatataaatataattaaaaaaaaggaaaaaaaggtagtagaaagttatattcttatcattcttttctgttcatatatgatatgcctctctcaatcttaaagatatatcttgaatgtattaaataagagacgagcgcaaattcccaaattccattgttataatatagtttcttagagagaaatcaagttttgcaacctcaattttcggcactatttgtaagtgcttcagtatctgtgtgttcaaataagtaagcattcgaagaaagcatctacatgctatgagaaagcagcaagagtggcaggttagaagaattcaataaatgtatgcaactttctaaactattgaagggttctgtggacttcattgtatctattttctaaaaggtgaagtgtgttacgtgtgtacttgttttcaattattgtcatagattcccactcgttaggcaagagtattgtaactttctcagtg

SEQ ID NO: 185232 - DNA, 3764 bp, Cannabis indica
caaattcagtcttaaggtgtaagcctttttgttttggtgtttcacacaaaggtgtgcttccaaaatatcttctaaaacattgcataattaatgatcattttattaactgtgcctgtgttgtaagttttttttttcctgttaaataagctttgtttttaggaatatagaaagttataacaggagggagaactaatattgcttgattacaatgatgaaaaattgatattgttatgttactatcaacaccaatattttcagtcatgcttgattagacagaagttacttgaaatccattggtcgttcataaacatcaattactttttcttttccgttgctgttgaatagatcttagtgttaagtgctcaatttctgctctttagaaaacagcatctagttatcattgaattttattctgtaataatgctaatactgcatctctattctaaaaatattgaattctttaacataaagtacttaaaattgaaatgcaatttcggtcagtctacccatagcctactaattatgatttccttgagtcttgatctattttagggttaatgaaaataatcaagtgaaacattaatggtatttcactttattattattttgcagtatttagcaattaagttcttgaaacttctactttcttagcaattaagttcttaataatatgagtcaatttttctctaaaaacaaattataaacagttatgcagactaataattttgttcttctttttctaaaggcatttagatgcttccagatgagagtgcaataaagagtttgtttagtactgtaatagtccatgaactaataacaacaaatattgttaaaaccttttacatagtttctatttctataaatttagaaagaggcatgacatatatttattaggtcaatgctgttaagtatatttatctttatggtttcatgcatgtattgatacattgttgtgttacttgtttttgatattggacccttcaatctttttttgggagataggaaactctagcaaattgttaggtaggtcccgtgtggatctgtatccccattctcatggtactgaaccctgaacctaaaccattcaacctatcctcatgggtatgcatttcatcttaattgtgatcctcaagggtatgcatttcatcttaattgtgataaaaaataatgagaatttgaatatatgtatattgaagtctttatgtactatgagtaatataagcaatatctttcatttagcacaggacatattaacagtctctttttactgtttgtagttgcctggccgcaccgataatgagataaaaaattattggaatacgcgcgttaagagacgtctacgtgcaggcttgcccctgtatcctactgacctctgtcttcaagcacgtcaagaaaatcaagggcaaaatactgctggaattaattgtggggataaagggcagagtgatcacatgaatgctaagaatcatatacctcctgttattttcaatggcttaaatggaaaccctgatggcttgcaatatttttcagaacttcctacaatgtctatgaattctatgcctatgaaaggtatagttcaccctcaatattatagttacatgacacttaaccgcaagaagcgtcttcgagaaacatcagatgatttcccagattccagtgggtgtgtccagaatggatatcctctatttgaccagtgtgaaaatgttaatcctggcaaagatgctaacccatggccaactttccaggaggatcttgatcctaataagatcctgctaccttatgatgtaacacagggtagccatgccctttcaaatggcaactcttctgcttccaatcccatttatgggaatgtgaagttggagctcccttcactccaatatacagaaactgatttaggtgcctgggccacttctgccccgccacctttacttgactcagttgatagttttatgcaatctcccccatcagttaatgtgtttgagccagagtgctctacaccacacaatagtggccttctagaagatttgcttcacgaatcgaagaatttgagcagtggaaagagacatttatctgagaagagtccgaattcatcaagtataactccttgtgatgtggttgataataaccctttaaatttttgtgaaactgaatgggaagactacagggaatcccctttttgtcattctgctacttcacttttgaatgagcccattactaccagtggaagttcgctggacgaaccattacccttaaacagctttcccggtaattttccttctccatggtttagaaaaaggttattgttgtttattaattttattttgcttatgaaatgcttagttcttttgtttttagatttttctagtacaacaactattcatgtgactcaactgccattgttattgttctagggaacactgtgaaaccagaaccatttgatgcagattcagtcgcagcaaaagagatagaaccaataagacaaattaatttcaatcatttcgatcgccctgactcgttacctttgtcagattggttcgatcagaccactgggtacgtggaccagaccttggtaaacaatacccttgcaagtgttctaggtggtgaatcgacaaatgactacaagtacatggctgctagcactgcatcgctaagtcaagacatgatgggctttggtcattattcgtggaatgccatgccatctgtgtgtcaattgtctgagcacctctgatttgataaatctctcaccactttcattcatgttcttgatttgtttgattgaagtggtacttactcaatacctgaatcggcaggattgagcgagacttgataaacgtggttattttgttcattggttatgctctttttagttgcttttttataggcaaaactatggatatatgcaaaggcataactggttaagtgtttagttgcttgcaggatcttcagtggttgcggaataactatgcttttttgaacattgaaccttgaactttctgattgaagtgactctgcttattggtgaattttatttcacttaaattccctcactcattttttgtttttggtttcacacctgtagatctagactctagtgttgtattaattagacgcactatgactatgagtttagaagttttacattttgcttgcctaaacaacaatgaagattaatacccacgctttgttgcgtaggcaaaatgaccataagttgcgtcaataataaaaatgatgaaatacgttggtgttgactgttgagagtgcgacaaaggtcatctgtcttgtagtgagagataagcatcaacatgaggaggcctattttaaagagtactgaaatatatttttacaaaaaagaaaaaatctttcccacatccaatgtaaataaaattatcccattccatggaaaaattataaataaaaatcatagaactactccttttcttatttaatatttatttatgagcataaaacataacaactttaatattacacaaaattcaaaagagactactttgttggaaaatggcccaacttattataatgtcctgcactttctctcatcatgtgagtaaaactctcttatgactaattaatttagttacatgaaacaatgtactattcatctcattactaataatcattattcttctaccatatagcataaatatatacttttggtgatgtgataaatgctatttacttgagtctaccatccaaactggactgctcagacattggggataaacttgatctagatgatgaagtag

SEQ ID NO: 185233 - DNA, 4562 bp, Cannabis indica
ttcaagcttgtgaggttcctggctctatatataaattttttccatttgctcatggctctcatatggagccttggcccatcaagagccgctttgtgtgataaaagtttcttcttatggtcttttcaattttgaattcgatcacacgtgcaactagtcattgcataagttttgtcagcatatctacaaatatgtaattccgatgcttttcattattgttttaatgtttttgattgtttttgttacatttgtactttgtctttgccttttctcttgtacatttagtttctttagtaaaatcctttgtttatcttttctgcagaaccttgtaggggaaagtgttttgcctatgcttgttaaagaaagtttaaaggctttaggtggattgggtctgatttcttttggaggaaaattcattcttaggcgagtttttgaggtgtgcctatttttcaaccgacaaaagtctctctttttacttttcttttctagtcaaaatctaaattattgttttaaggtcaggttgttgctgaagcaaggagcactgaggcttttgttgctctctgcttattgacagttgctgggacatcacttctaacgcagaagttgggtttcagtgacacggttagacatttcttatcacagattgataatatttgagaggattgtatgccatttttattagaaagactcttatatgttatctcattgcagcttggtgcatttttggctggagcattattagcagaaacaaatttcagaacacagattgaagctgatataagaccctttagaggcttactcctcggattattttttgtaactacaggaacttccattgacatgcaggtagtcacataacaagagtttcttactccatgtgtttaagaggaaaattttgtgttttagaaatatgtatcattgtctgtagatctgacatgaacagcttgtaatataccataatctcaaaagcagaacattaaagacgcggtttgtttaacttaattaattttcttttctgtgcagcttctcttccgagagtggccaaatgtactttcactccttgcaggcttgattgtcatcaagacgctgatcataactgcaataggtcctcgtgttgggctcactctacaagaaagtgttagaataggattgcttctatcacaaggaggtgaatttggatttgtagtgttttctcttgcaaacaggtgggtaaaaaaatatcattgcaaagactcgccgaaataaatattaaaagatttcatttctccccctttaaagaagacttgacaactttttctttaatggatgcagtcttggtgtgttgccgctcgagctcaacaagttgctcataatcgttgttgtcttgtcaatggcattaactcctgcccttaatgaagctggaagaagggctgctaaaatcatcgatgacaagttcagtacagaggacgatgtatgtactaattttaacattggatacaattttcataagcattgttagaggtcacaatttggggacttttacagcttgatatagtcataatatgaagccaaaagaccatattttaaagccataatacaaacaagcatgaaacaaaattatgatgccagaatttgtgttttctggttaaatccatggcccttcattcttatatggtattaattggattcctattgagttctggttcttgtgttaatctataaataggtacattattataacattttcttcagtgaaaatatagtgtaccttatcagttggtggtgataataaattcacaggaagctgctgaaatggtgaacttcgaggctagtgaacctattgttatacttggatttggacaaatgggtcaggtacaagtttttccatttcctgcaatatgaattatcaatttagctttactgaagctttaaagttccaatggattgatctctctctcatatgtacaggtccttgccaatttattatccacaccgttggctgcaggcgtagatagcgattcactcggatgtccatatgtagcttttgatctagatccttccgtggtgaaggtcagtgatagcataaacaacatagctctcattttcttagatttgtaggattctatttatggtttgatgcatctacagacatctaggaaacttggttttccaactctttacggggatggatcgaggccatcagttttgcagtcggctggaatctcttctccaaaagctgtcatggtcatgtacacagggaaggcaaagacaattgaggctgttcaacggcttcgagttgcttttcctgcagtaattctctctctctttggatatacatttcgaatataatctatctatcaatatctgtcacttgggtttctttgaaatattaagtctggttcaattatgatcagaatgtacaagttttgagtcttggcttggtttgagattaaaattacacatataatttttgactattttactagaagattttgttagcaaaatggggttatgggagagataaaggaggtggtagcattgtttcttttctttatatgattttggttatgtgatctccggcttcatttgttccttttcttctataatttaactggttaaattgctgataatgtggtgaaaattcatggcagattcccatttatgcccgagctcaggaccttggacacctattagatctgaaaaaatcaggagcaacagatgccattctggaaaatgcagaggtaatacaagaatcttataaacacagcaaaaagttgcgcacttccttgctctaatttgagaccctttgctttgtttgcagacaagtttgcagctaggatcgaagcttttgaaaggactcggtgtcatgtctgatgatgtgagctttcttagtcaacttgttcgcgactccatggaactacaagctcaagattcactcagcaaaagtgatgaacgagaaaccgaaattatgaagccgttacaggtatgtttcttgatgttatccatttcgtatacctaatatcactcccaactgtaaacactatctattcaactaaaatggtttgtttcacaaggtgagagttgctgattttactggttcttcgggctcgaatggatcaacttcacccgaaggaaattcgtcaagggaaaaccagacaaatgagacatcagaagatgatggtgttctatattgtaatctagataaaggaaatggtgttccgaaaaaaccaattggcgataagggaaataaagaaaaaatcatgatagaagagccataatcccaatatggataaaaatgaaacctttacagtttcaattgacaagaatattatttttgttcagcctaacaatatggataggatcccattaaagcttgtgaaaagggaagatagcaaaaaggagggattcttaggctggatttatttaacaccaaagagaccatagttataatttaattaatcataaaatcctcattagtgtaactttttcttcatcatttttaccttaatttttattgcataatgatcctttgtatattccatttttaaagccctattgttgggggactttgtaacattgtaatgttgaaccaaaacttgttctgttttgaatgtcatttaaataattgaacaagtttaaaatgaattcgatgaatattgagaaatatgagattctatcacaaaatcaataagtggagtagtctatgtttgtttggatctcaagtttttgcaccatctggattttatttttgttcaaatctcaagtgtatttgcaccatagacatatggttttgatactatgttgagaaatatagtttctatttcaaaattaattggtgataagtgaagcaacccatattcttatataatatggtttaatatttttacaattcacgtgagataatattctccaattaagattcattttgattaagttatattaaagtagacttattttttttgtttaaagaattttcaatcattcttgaagcaaaaaagtaactagagccaagtttttgttttccccttgtacttttttcttgagatagttaaacagaaatccctcatgatttgcacttaaatttcataaatttactattacaagcaaacatgttaaagttaagaaagcttacacatcttcataatgtctcttttccaaacaaacaaaaaaaagagagagaaaagagaaaaggtcatcttaataatggtggatgagaagctttgattaccaaatttacaatcttcataattgatcaattcttcttgactactattaatcagctttaaactttatcattattaatttgttattggtggggttcatttactaaaaagtaaatataattatttatcttttcagaatagtattatagttttgaccatgtctctttcatatctaacattaaagtacattgtagcttaattcttgtcatatgtcatcacacaaatttatatatataaatatatatatatatatatttatactttacatattagaaataatgagtacaattattttcagcacataacatgtaaatgatcccaaattctatttacaatacaattaaggtttttttttttttttta

SEQ ID NO: 185234 - DNA, 8641 bp, Cannabis indica
tttttttggaatgaacttaagaaagttagggacattgttaatgtgaatattatgaatttcgtgtaattacatacaaaaaccacaaagtaacgactgaactggatggacacagtcatggtcattaataactttattaaacttcaaattaatattactaatttagttgacaaaggttggcacctgcaaattttatataatttagcttctgaccctactaatgagtacaaggacaatttcaacaatcaaccaaaactaatttaagtaaagaaattaggctaattcattaccacaacatgcattaaaaaaacttagcataacataaccgtgttgaatatacttgattattatttaaaaaaaaaatactttggaatgatattttcaaaaatatattccaaattcttgttatttagccccaaagcttccaagtctcaaagaagaagaaaatttaatcatggacaagaaaagattgtctttgcttttcttagttctgtttctttggtcttcatcaatgaacttgactttaggttcaacttctaaagaagtagatgcccttctcaaatggaaagctagcttgaaaacaccaaataactctgccttctactcatggacaattgatctccccgctgctaaatccatcaacagttctgaaaattctccatgcaattggtttggtgttttttgcaacactgaaaaaagtgtcatcactataaaccttaccaactctggtttacaaggtacactgcaccaattctcattctcctcttttagtaatctttcaagtttgaatctcagcagtaatgaactctatagtgccatcccacctgaaatcattaatctttcaaaattagtctttcttgatctgacagataataaattttctgggaaaatcccacctgggataggtaacttgaccaatcttaagaccttgttcctcactaaaaatcagttaagtggctcaattcctcaagaactaagaaacttaaaatctctttcccagttaagcctcgactcgaataatctttcgggcttgatccctccatcactaggtgatctaacaaacctcactctccttgcactatccactaacaacctttctggtcccattccacaagagttgggaaatttgaaatcaatactttatctatttttgaacgcaaataaactcaacggctctattccattctcatttagtggccttagaaagttaagaatgctatgtcttcaccgaaaccagctttcgggttctgtccctcaagagatagagaacctcttagagttaacttctcttgacttggacactaaccaattcagtggttacttgcctgaaaacctttgtaaaagtggagttcttcgaggcttttcagcatttgacaaccatttcattggtccaatccccaaatactttaggaactgtactactttgtacaagcttcgtatacaaggcaatcgattccttggcaacataactgaggtctttggagtctatccaaacttgtcttacatagatataagccgtaataagttttatggagagatttcacaagactggaaacagagcaaaaatctcactgttatgaaaatggcagacaacaacattactggcactataccatctgagattggtagcttaaaacagctagctgaacttgatctctcctcaaataatttagttgggttgatcccaaaacagcttggaaatcttacttctttgctgaatatgagactaaacgacaatcaactctctggtggtataccctctgagtttatgtcactgacaaatcttaatcatcttgacttgtcatccaacaacttgaacaactcaattcctggattctttggtgttttcttgagagccaattatgtcaacttgagcagcaacaagtttagtcaagaaatccctgtccagtttggtaacttagtccatctttctcagctagatttgagttacaactcgcttgaaggagagataccatggcagatgagcaaaatgcagagcttggagagtcttaatctttcacacaacagtctttctggttcgatcccaacaacttttgacggcatgttgggcttgttaaacattgacatatcttataataagcttcatggtccggttcctaacatcacagtttttagaactgctccaaaagaaggcactagaaggaaatatggggttatgtgccaactttggaagccttgagccttgtccaggtagctcaagaattgaacccaatccagctttaatagctgtacctgttgtgggagcatatctacttatagttgttgtctgcttaattgccattgttattggaagaaagtataaaaccaaatcaaatgaagaagaagaagaagaagaaagagacgaaaaccaagatggggaagtagttttttcggtactgaattatgatagaagaaaattgtacaaagaaatcataagagcaaccaataactttgacccgagatttttcattggagaaggaggatgtggaagggtctataaagcaaaactttcactacccaatacagatattgtggcagtgaagaaacttcattctccagctgaaggtcaaaggagactaattgggaaggaattgttgaatgaaataagagcgttggtagagatacgacatagaaatattgttaagttttatgggttttgtttgcataaacgagagtcgtttttggtgtatgagtatgttgaaaggggaagcttggggagtatgttgaggagtgaagagggtgcgaaggagttggactgggacaagagggtgaagatcgttagaggcgtggctcatgcattggattacatgcaccatggttgctccattccaattgttcatcgagacatatcaagcaacaatgtgttggtggattcagagtttgaggctcgtgtttcagattttggcactgccaagcttctaaatccggactcctccaattggacctcacttgcaggcacctttggatacgtagccccaggtaaatccttcaactatattattagtattacacataacattttttacaagtaattagctttaccaaaactatgaaaatcattgcaaatgttacattatgtatgttcattttttaaaacaattagtgatgtagcactaatatgatcctaatctattgcaaattaagagcctaaacagaagaaaaaaaatacatcagttacatgtgctcatgattgtttaaaaaaaatgaacataatgcaattaaaaggaaacatttgtaatcatttttatagtttggaagtagtaagtaatataaaactctacaatggtaatacttaagagattaaaatcttatttattcgttaaaataaaatgtgtacaacagattttaatctttttcgtaactctactcttgccataaccttattttgtaggtaacaacagtaattcatgttttcccatttaatatgtgcacgattattataagttacagggtatgtaatatggttttgtgttttatatttcttttatggacgacagagcttgcttacacaatgaagataagtgagaaatgtgatgtttatagttttggggtgttggcattagaagttatgatggggaagcagccaggagatttcatctccactctctatgcatcatcgtcattagagttagagaacaagcaaaagttggtgatgaagatcatgcaagttttggaccaacgtccacaaccacctttaccaaatcttgagattcaactcacaactattgccactctcgtaatctcatgcttacaatatgacccaaactccaggccacccatgaacataatttctaagattttatccacccaatctattattcatctttaactctacataaaatcaagttttacactgtttagttatgttttatgtatgtataaatcaaatgtaaaatgattaaaaaaataaaaaggtaaaataaaaggatcgattacttcgttgtcagttacatggtgtaataataatcactcgctttgtgtaacaattattaatttcaatctatttctatagaaaacttcctcttttaaaatccagtaagactatctttgtactttataggccaattatttaacagaaaaaaggacatgctactaacaatctttgtaattctttcaaagatacattaaacataagaacatataataagtattagacaatctggatttcagtttcagatattaggtaaactatattccaaaggaaacccaatgttatgtcacaacaacataacagcatactgtaacaacaccaacagaagtacaaaaagagaaacaaaattctcaagtttcttcttgttcaggcaaaagttttaatttcccttttttagtgagttcaaaatggatgttagttcagttattctaaactagcttttacttttctgttactttaccaccatgcacaaccaaaagttttgatatggtaaaagtaccacatcatttcttcagtgggcttctggagaaaatcttcttgcagaatggtctggtttgtagcaacacgtaaggctgaactgcactgaggatggactcatgaagagcgcccatgtcctgtcacaaagaataaagttaaacctttgaacacaagtgaaattgataaggagaaagagaaagtgtttgtggggtttgatagtcatgaattcaactccttgccttcgtaatttcgagagcatatcgaatgacatagttagcgaaaggatgttccaacaactgatcaaattgagaaactgagagcaattcatagatgatgcttggacgaatctcatcgaaatgctttagacatttttcaaccacatgactgctaaatttatgcattgagaggtactcatagttccctctaaactgagaagccaatttggcattggcagatggaagccttagccctatgataaactgaataacataattcctgccattgaaaagtaaagagtgatgggcaatgcaaaagtgtcatgaaatacataactgaactaatagaagatttctttcatattcaaaacttctattttaccatataaccattcagactaatcatcttaagcaactagcaacatctctcactaaatatgtactatataagtttgtattttacatatagaaggaaacctaaggtagcagaacaaatagacagtagtgcaaattagagtgaagttataagattgtttacccataaggatcttgagcaaggaaaagtgcattgttagtaatttccgtcactaacttatctagatgcttttccggggcacgtgaaaggcaccgctgcagtacacaacatccttgccgatgagttgcaatatctatacaatacttcacagcatcgtgaaatatatgctgtcaaacacaatcaattaattatagaatcacttaagaattttttttcaacagagctgcaagaattctaataaaatagtggatttcattctatagacaggacttctaggtgcataggtatgaactgtgcaaatgtgaaatcaggaactttgggatagtgttattacacaccaagcaaagctatcattactcagcttgttaaattaacaagtccatttcaatccaagagtctacacatatctctataatactccaatcaaggtgactaacaattgcctaaatcagggagtccatgaattcttagtagcattgtctatcaagaagcacacagtgtttaagattctagagttgtaaactagaaaataagcatattgctatttttttttaaaaaaaaaggaaaaaagagaaaggctttgagatgaagatcccaagaacaaggtactttcagaagtcaggtgatggcatagaaaccttagcatccaaaggaaatcgaatctcggagtcacaaatcagcattagtccacgcatgacagtactctctacaggacccctagtgacatactatcgagaaaaacagaaacactggacaaaagtgcaccaatatgttttgctattagagatatcaggctaacaaaactcaaatagtaggatacgagactgaaaggtcttgcagcaattatttctctctttaaaaatcaactaacatgacaatagtgaaaacatttaagttgattttgtgacaagaaatgcaagcaccaattagtaataaagtttgtaagctcatcaggagattgattttcaatgcatggcaacatatttttcctattaattgaagatatgactttggtattgcttgacttgagttattggtgttcaatgagtcattgctgactccaaaaaagatggggcatgaggttcacatggttcataacctttttgtgattggtctcataagaattcagcacacaataagctttgtttcagcaacttgaatatgatcttaaagaaaaggcatgaaaaagctcattcagctttgcccatttgctaagttaaactcagttcataacaatatttaatctacaaaaatgttaacatcttaaaacaaaacgtgttgcctttcgacaaaaaaatgactcaagaataattttgcacgagtggtattctacttgttatgatctacactaccaacatgtaaagaaactcaaaaagaacagaagaacatcaagaaatacagaaccttaatatgcaataccaaaaagcatgtccataaatcaagctataaccaatagaaagaaaaccaaatacctcattgtgttcactactaaagcattgcaaacaacgctgcacaacatgatttccatttaaatctttagcaagaagaaggaaaccaggttcgatggctgacataatcaactctataagatctctatcttcagcattctcaatcaacttctgtaccacacgcgagctaatagaaaacattaccaattagttgagagagagtggaaacaaaaaaaattacaaaggtactactgcaggagccataaatacttagagaaatgaatgaaccattgaggattacccatgtgcatctagagaaatgtcaacaagctgtcctggtttttgggttaacacaaccgcaatctgtagtttttgttgtttacaacaaacatccaaaagcttctgtataaggtaatttccaaaagggttgatggagagctccacaacatgatcaattactccatcaaatattatttgcacatctcgacttgttccctgttcaaacaacgtttgcaaggtccggcaaccatattgatccttagctatgcagtatatgtaatccttcagcttatctaatgaagataatactgccggaaagtgcagctgtgaatctttactcgaactcactttatttccactcaaacactttccttctatgatgaaactgtcttcaaaaataaaacccttaaactcccctgcacattgttcacgcctgaaaacttgtggaatctcacctcttggttttgctttcgtccattcttccatcattaaagtattatacaatgaatttctcatattctcttttagtttgggttccaggaaacgagaggtggagctaaatgagtctgtgagattcttacctctattagagtcatttccatgtggttgtagcagagcatcaacattttgttcctgtgtttggcccatcatatgaatcattggattgccattgaaactgggagtgggaccaaagctccttgaagtagaatggatatgagtgagaggagaccctggtttaaaccttttatcaccgtcagaactgatcggaacagcactcttagatgatcggaaagcttcaaagccaaaagggtcattacaagggatggctgctcccccaaaagaagcattaccaagaacaattccatctgggtctctatcaaatcccctgtttctgattccttcctcactgctaatatgcattctacagaaactttcagataatcccagatcattaagcagcttctctttggtttgagaataagaagcgtcggggttggacaacaattccctcgagtaaccagtagtagtactccgtctgggatacttagactcctcaaatggggttgaatatgaaccagcgtcgtcagagaaatcaaacccatggccatttgagaaggggtttgaaggagagtactgggtttgcttagaagctctactcattgatgagcttctgaccaaacggttatggtgttgatgattcaaatatgatgatggtggtggattgaagattccacgcattgagttttcagactctctttcactattcatcttctctattacttgtaaatttttctttcttgaaatttttttcaaacaacacaaacacagtacatatgtatatactaatattttcttgaattctttctacattaacgttcaatcattatagtcagaagaaagaacatgatgaggaaaaaaaacccacaatcaaaatcgtgaaactcacacaagaaatggatttaaagaaacccaagaagcagagaacgaaattgttttattcatttcctttggtatgttgtggcattcgcatttgaatcttaatattttgttggaatggatttggtggggatggagagaggaaacggaatttgattgattctcttggaaaatagcacgttatggttactctctatgaaaaccaaggagggagtcagtcgccactcgcacaccccatatagtacgcatttaaagtgcagaggagagagaaaaaaaaaaaagagctctgctctcatctaattcaatctaattaataattaaa

SEQ ID NO: 185235 - DNA, 4698 bp, Cannabis indica
atagctcaatatttttatatttatatcatgacaagaatcatggagtagtccatgttcttatatatgactcaatatttttacatttaatcaatgtaagacaatgttgtacaataaacatggataaaagatcctgaacaggaatctgtgatgatttgtgcaagaacatgaccaagctcaatcaatggttttgttcatatgaaatgtaggcttcaaacacacctggctgaggatattcctcactgcttctggagtggcaacagttttaaagaaatactgaccaatggctgtatttctgcataaacaacatgtgtcaactgcgaagattaatatgtgatgatctaacacattttatagaggaaggaataaaaaattacaaaccccttttctacctcaacaaattctgaaatgatcttatgaatggtcttgcaaaccatggctgctttttaatatgaagcatcctaagagatatatttagaagcatgattcctttacaaatactcggttccattattgcagcctgaagaccaacaactcctataagaattccaaaacatttcagataaggaaagcataacatgaagcaaagaaaaaacataagtttcagtcttatgagtactgctacaacaagattatagaaacaaagaaacgtaactaagtacatttgtacttcttttttccaactttctttgttcaaaacactttattatttaatagacaggtaatcacctccaatagagttgcaaatgaaaaatgcttcactcttaaccacttctttacagaactcgttaagttgggttccccaagtctcaaacgtgtagaacgaagtgtccccaaattgtcgaggattcggcttttctgaatatccataaccgattagatcaatcgagtataccctatgcgatttcgcaagaacagaaatatttttcctccagtgatcactataaataatagcaaagtgtgcatcataagagatcatgaaagataacttacaaagctttatagaagatagagagactgacaacacttgtatctttttacattgaacatgcacataatgataaacccccacttaaatatacttattataggaaaaagcctcattaggatttattttagggagtctttcaatgaatggtactattgcaattctaggatattaggctgagataacatgtaccaaagactattatagatgtcaacagttttcatgtggggtatggaatgattagagattaatctcatcgtaaagaatcctaatctctcggactattggaaataggagagagcaagcctctcgaaagcttctaatgtgatttctttggtttttatcaataagaagtcaagggaatttcagtcattgtttgtgttctaagataaggaaagattataactaagtaaagcttatcacacaacagttttgtatatgtaatgcaaaaactttatccaaaaatgaaccatatgtaatgtgattattttcagtcattaattttacatgaattaacttctcaaagaaaaattatgttaagaatatggtacgtacatgtaagtaaacttactttccagaattacatggagattagttgaatgattgcatttttcaaaacagttatagtagagagaaaacttaatatattttggttcattgtgtatgttatatatatagatatagtatagatgtataggatgagcaatttaattcacaaaatacctaaagagaaatttatttgtctgctaagtgaaacaaaatgtggacctgttagctccaaaaccatggatcaatactaatgcagggccactggttcctgaatactgatatcggattgaataacccctccacttccacatactgcaaaaataattgaaacatacataaatgaggttacaaatcatgaaaagcaaacaaagtctagatatcattgctgaacattttaaacaacattaacaaattcaagataatgtgacatttattcaataacatcaaattttgagaacttaacaaaattctacagcctcagacatcttaatgagcgtaacatatattcattcatcttatttagttagttggattaattataaatcaaatttaaatattaaattatactattccagttagattggctggaattattataatatgttgattcatttttccaattttccaacatgttgtcaacacaaaaaacataaaaaagtacaatccaatctaaacccatcatactctttccacatatgaaatcagagtacatataatagtaaaaataaaaaataagtatgtagtcattctagttttctctctcccaaaatgtaatttagaccaaatacaaaaccatagtactaaattaccttgaatgaactttgagctgggaactaccattgctggaagaaataaagacatcatcgttgagcaaggggcttttatcgtcaattgggccattgaaacgagaaaatacaacaaacctatctgagtttatcccataaaatttgtttggtctacgaaaaagtatattcagtgaaggtggagtacaaatgttattcttctgtgtggcactttgaaaaagatacctattattcagctttgtaaatggcattagtgtacttgtgcttgccatggctttgtggagagaaagagagtaagatttaaataagctttctatagagagctttcaaggataatttgaagctaagctaagctctgttctgtattaaacgtggtttcgaacttttggttcgaaccaggagcaaaagggcgagccacagctcgtctatgtgaatggcatttctccacgtgggccaacacgtaatttggagtgaaacagaacttacaatcataccttttaaaaatataaaataaataaataacattaaaaaattctataatcacaacttaaaagttgttcatcaatgtacctcttatatattttgatatttagaggaaaaaaaattaatctaatttttttatagtcgactaattattttagacatcttacaaaattttgagaaatttaaaaaaatttaatatatcgaaaataaggttcaaacagtttatttcacatgcgtataaaataaaaaagtctcatgtgcaataaactgtttgaattctatttttgacgtattaaatattttcaaatctctcaaaatcttttaggatgttttaaataactacaacgtatacgtccatgaaaaaaattagactaaaaaattcactctgatgccaaaataaataagagtgcatcagtaaatctattttaagaggtgcattagaaatatccaatagcattgggtgctacactcaataaaatagatttacgaatgcacatcttcgtattttcttatattcgaatagttataattttattttaaataaaataaattcttcattaaattgcaacaatcaagaaaacaagtcacaaacaactcaaatacaatctcataaatctacccaccaaaccatagcatagtttaaatatagaactaatttgcaagactatgggctacaaaattattagttcgtttacaatgactaaacttaatgacacaaacattattacaaagtgatcgaatgtcatttaacaaaatatcaaattcaacaagaagtgattcctccttcgagagcgctatgcaaagtcgttgacattctaattctacctccacctccataaagcccagccaagaaaagagcaaaagtccataaaagaccgccatggcctcaactatgggaggcgacaatgacccccactccagagttacaactgaagccaaaaagaaaccaaaatgatctcgtaccactgccccgtaaccaagcctccgtccagtaacattaagatttgtgttgacattcagtttcagtcgacccactgacgtcaagacccactgagataagattggggaagcataacagaaccaatcttcccaatagtgtcaggtgatcgattctctttaacattcacagtagagaatcccattaccaaacatgccaaaggagcaccaacaacaagctcatctcctctctgttgagtagtgactcttgttcttgaagaaaagaatacaagttcgttctcggcaaagaagcaaaagtaagaacaaatcttacattagatgtgattgacttgaggctagagcaatcccaaagtgcatggaacgatgttttattatccactccacaaataggacacaataacttagtcaaaatgccatgatgagccaaaatggaatccaatccaaacaagctttccaaatgaagacattaatcttgggaggagcgttaaggctccaattagatagttccaccaagaagaaaaatcttaagaaacaaatggaccctttcttaataagtgaatagcattccagtacccactcttagcgaaaaactcacctaaagtattataatgccaaatgagttggtcaatttactgtaaaaacccaagaatagcaagaacttgaagagcttcatcaaaataaaataaatcatcaaccaaggaaaattccagtcaccattttccaattttaaatctcaaaccattgtaacagaaggaggaccatggaaagaataggcaagcaaagttgacttttttggaatccacatatgagatctaatattgacagttcgcccactcttaataagccagcacaccccatccaaaaacaactcgcgcccccacaaaatactttacaaatggagaattctttaaatgtttcaaa

SEQ ID NO: 185236 - DNA, 1140 bp, Cannabis indica
tacgatgatataaggtatcactcatcaatggcgtattgaatccagtcgaatcccacgaagattctcagtctcagagactgatacccagtgcccaccacctaacgttctattcttcactctgcaaaccgccatggatgtaccagcggaagaagaaggagacccacaactacaaagaagctactggcggtggagcaagcgagacttctttcccgagccttcttttgagaactttacttcttacagagccgccgtctccgatacatgttctcgcctcaaggaccgtcttctagatcggtcgactgacgccacagagatcgttgagctccgtaaagagagtggccatcagatgaagcgctgcctcacctggtgggacttgatttggctcagcttcggctccgtcgtcggctctggaatcttcactatcactggtcaagaagcccgtcaaaacgccggacctgccattattgtctcttatgccatttccggcatcaccgctctgctctccgtcttctgctacaccgaattcgccgtcgaagttccggtagccggaggctccttctcctatctgaggatcgagttaggggatttcgttgcgtttatagctgccgggaacattctcttggaggctctcgtcggcgccgctggactcggtcggtcatggagttcgtatttcgcgagtatgatcaatgacgatcctaattttcttcgatttcgggtaaaatatttcgctgaaggctttaatcttttagacccaattgccgttttggttctcttaatcgcaaatggtatagcaatgagcggtacaaagaggacatctttcttgaattgggtcacttccatacttagtagtttaattattgtctttataataattgtgggatttgttcggggcaagacttcgaatctgagcccatttttcccttatggggctgaaggtgtctttagagcttcagctgttgtgtattggtcttataccggttttgatatggtggccactatggcagaggaaactaagcagccatctagagatataccaattggtttggttggttcaatgagtgtgattactgtggtttattgcctaatggctttggcgttgacaatgttgcagaagtacactgaaatagatataaatgctgc

SEQ ID NO: 185237 - DNA, 1927 bp, Cannabis indica
aaaaaatagtgtatgagataatttcgcaataaaatttaaattaattttgttttgttctcatattctttaaaatatatgtatacatataaaataaaaataaaataaattttaattattaagacaaaaagaatatatgaaattttattacaatatataaacataaaaatacatatatttttaaaaggaaaatataaaattaaaattgaaataattattgacattaacaaaaaataatgtaaaaataaaatttaaaaatataggagtaatttttaaaaattaatttaaaatttatcaggttgaagtgcttatagttttgtgagttgtaaataaaattctccatttaaattaaagtactaataattagctaaaataccctcatcatttttttttgaggtaactgtaactaacaagaaggggaaaggagataataaccatagtaatagatacacaaacaaaaatgagagaaaactaaactcaccaagttgagtccttatcaagtcgaagtgcatacacagtattttggtatgcttcacaattctcaatcctaggaagatgacacaaggttgcattagggaattgggatagagactctcgaattaacttaaccaggctcgaatgagctaaattgtcttttcaattgctccaaacttttgtgaccaactgtgagcagtcagaaacaatgaggttgggctggaggttgattgcagagcaccatttcagggcttccagaaggcttcagcttcagaaaagagggatgtagaaacaccccattttggagctaaaaggcctgaaatggtctgattattccagttcttaattgttgcccccaaacttgttcgaagcttcttcaagtcaagagctacatcgacacttaacctgtagttgccgtgctggaggccaagaattgcagaattgctgtttgagggaagaatccgatctgtatgagcaacttccaacatgctggtttttgagttgagattttgtgctgccttgtaatcctggaacaagctaataacataatactccatatcaattaggttgttagaattgtgattaaatagagcattatttcttctgatccaaatctgtcaaagtagactaatcagcaaggtgaagtcctctttgctaaggtgatcaaaacctctcatataatattccttgatgtcacacttatggttactggtaacagagggggctattagccctgggacaatctagaagtgcatgggtgactgtctctactttgcttttggagtgggaacagagggggctgctaagaattttcttgttaaacaggtttaggccataggagaggatatggttaaaggctttccaactgaagtgtttgatttttgggggagttatggtgttccagactgttttccaccattgtttgaaacaacgagggttggaggaggagggcaaggatggataagggttgaggttagtcaggtgatatgctgaacaaactgttaaaatgccagagtggtgatgcccccagatgaggctgtcctgcaaggaagggtcaatggcaatctaaaggatgtcattgacctgatattcaggcaagtagtgttggagtgtatctttgttccgattattatcattgttaatgaaaaagaaaacatgatgatcaatagaatcaaagttatgcaagaaggtaatatattgcaaacctgcaatccagttgggatcaagcaaaaggatggatctgttgagattttatacactaaataaaatacattgcaatataatcagatttatcaattaataaaagatcagaaatcattttatgttgtatggtttacatattgctttcaaaattatatgtttaatgtataaattctattgaagtcataacatagtttcaacaatataataattagtagcatttgggctgaaccttcatatattgaacctaaataaa

SEQ ID NO: 185238 - DNA, 8304 bp, Cannabis indica
aaaagatggcaagcttgtgtggtagtatgagcctataggcgacaatgccaaaatgcaacatatttaacaaaatttgagttttttttttttcaaggcaataggagggttgagacttgagagcagtttatggtactgtcatcaggaacgggaaatctacacaaaatacaatttttattgccagagaaacaggaaatctatgcaagtgcctaccgtggacggataacttgaaacacaactgatttctactgcatcaataagccactgcttttgacacttccctccgcactttgtaaagcagctacaacttcagtcagcacatcccatgtacctgaaatgttaataggttgtaatggcatttgaagcaatatcttctctagtgaatatctatatacatatgtattaaatataacgaaaatagatcaaaagaactgtaaaaattggaaaaaaagaagaagaaacagtacaactaaccatgagacttgaagttcaacaattgagattttagtctgcccaactcagtggatgccaagcaaccaattctagttaacctagctttggcttgaatttttttcagaacctcaataacctgatcatgttgtagcaggtctgtcttggacacctgggatatgaaaatgttgaagttataaaacatgcatcttgacgaacttgaaaataactcagcacataatctcaagcaaaaaccaataaacaagaactcttacactctgtatagcaatagtgtcaataaggggaaattacaaccttacattttcacaggacaaaaggctgctaatcttatgaaatcaaattagcatgtttgtaagacaactggaagaatttttcaagagagaaaccaacagaaatagaaaataaagagtagctatacctccaggaagttcaatatccaagttcgccgagcctttgctaagcatctaacggcattagaccattcttcctcgcaattcgcctgatccatctcgatagtgacatcagattgcaacaggggcaacaaagaaaagagcacctccatggctttctcaacatgagatacgtagtctaaagagtcaattgaagcttcatccaagcactgacaaaagcccttccaacatgaatttctcaacatgcttttctgatctgtgtcatataaagggtctgaagtaattgaaatcaggtacacggtcacatcgtcaatcaatttctcaaccctggaacctgagaatacttttataaggtctgccagatgaataagcagataggactgaatattcagctcaagtgttctgagccttgaaagatcacatagctcatcaaggaaattcaggagttgatcaaactgatttgcatgggctagtgagaatgtgatacattcctccctaagggatccttttctataagctgaatctcgatgtagcagctcagcaacctgagactcatatctcatgcagcgcctaataattgttccccagtcaaaacttggcaacctaggagctcgggagagacaacgtaacactgttgtaactgttgcgataggtgtagtgctacctgtcttgaattaaaagtgtaagaaattagtgagaaataaaaggaaatgtcactaagtacatatttgtaattttgctgtgtttactagagaggttcatgttttttcttttttttttttcgtaaaaggaagaggttcatgttggaaaccgttaattatcaggataagttaaaaattaatttctggactcttgattagagacaagggggataagcggaagcagttgcccccactaaaattcttgatttataattttacacacaaatggtaacttagtattatttctttatttattgagaccataaaagaatatattttcaacaatatcctagctaggtatttttttttttttttttgtctttcacttaactgtcttcctctattttaccccccactgcaaatagggctgactctcaaccattttctggactactagttctgttgcatatgactctttcaacaaatatctttaaccaatcaatcaaccaacattaaaatgaaagaggaagaagaataagagaaaggagaaaagaaaaacagacatgacactatttcattatgaagagagcaactgtaaaagaaagagacacaaaaagataacgataaacttagtgtaacagactttaccccagaaagattgagatgcattagccatgaggagagcttcaaaactgcactatcatcagcaaaagtttgagaagacttcaaactagttatgtcggtcttaataccagtatcaacattaagaagttccttcgaccacagttgatttcgaagaaaagaaactgcccatgctgcatatttttgcagttcatggtcatcagaattctgtgcaatgagaaatatctcttgcatcaatgatgtcaaatgtggctcgcatacagaacttgaaagtagaggaccaatgagatggttggacacctgtttcatgatcaataacttctgaccattaattcaaaagaacaataaagcaagaaaactgaatcaaagaaaagaaaaaaccccattaaggcaacataataggttaccttcttttcagaactgtgttgtagcaacatggattggggacgcatctgaaataaggttccagcatctgcacccatcgcattaacaattccaatcatggcacccaggtggaccaaggcagggtaagtgtcggaataacagcttctgaataaatctagcagaacttttacggactgaatttcaatagagttcactccttcattcaatatgcaggaaacaaggcttcctgctcctatgcaagatgccatcaacaagctctgatggaaaatgcttgatctcttgacagagagtaattctgaaataagttctttataaccgttcaatatttggtctacttcattcacatccatcagttccatcctcagaaagaaagccactattgagggtaaggctaaacatgatcctactgatagaagtgtctcaaagctctcagagtaagagccagaataatcaaccaatgaagttacatgtggaatccatgacattattaagctctttatcttaagaacagcatcatgcaatccagccctgtacacagcaccaattgagcttgccaggccaaggacaactccagaaacaccccatatatcttcgtccaagtcatcacagttctcatgtgacagttcagcattcaaatttgtatgtaggccatatttgctcgatgggaagtatgcagagagactttctataatattagagggaaactgagtgaactgacatattgtgaacaataaggtgctaactatctttccaagtaagtctgcttctgacatcttgtttggttcttcatccaagtctgagtaatcagttgcttcagcccttgtaagaagatcttggcatgaaaatcccaagccaactccacaggctcctttgacaagagtacttttggtattacacaaaacctgaaagcacatacttgagtaagaaacatgttgatctagaaccaagagaataaacagaagttgaacagtttgcaattcaataatcatattgacaaattatgacatagaaaagcatattcatatagatatgcaaataacaactctaaaatcaactggaaaccaattttagaatttaaaacaagctacatgtaataatatctaattagcttaagtatctatccatttccgcataacctgtatttcagagtcaaaagatcgtcttacttcacatctagctgattagtacagtaactttgctagtgtaagtttttgagagagaaacaagcaaaacaagtgggagaaaaaggaatatccaacatggatagcattacaatgagaagaaaataaaaattaaacagaaaacaaacaaagtgacttctcacaaaatggagataagagaaatttcaagtgttaaaggttgtttggcattgacaaaagtaacaaaaaattacaagatttatgttaacttgtaatatgccttgcactatatgcacccataattgcctactgaaggtaagaagcataaatgtaatgattaaacaagtatgcaagtatgactattgaacttatcaaatatatcatttcatatagaaaattaggaaaataaaaatgcccacacactatttactagactcataataggaagtaatcaaagtagattagtatacctcaagaagtccatttatgttttgaaatttctgcttgtgatcagttacatgcaggcaactagtgattaatccaagagaaattgcagatgaccattggcggtgctcatgctcatcctggaacaaccaactcaaaaggaaatttgatgcagctgatttgacagtatggacagatggaggcaaaacctaacaaaagcaataaaaatttggaatgaacaaagcatgtcaaccacgaaattactatctgctaagtgggtcttactttgactcaaatcaaaattaagggactttgtctcagtaaagattaatgagcttttgacagcctcaattgaagattctatttctaaatatactttataagcaattaatttccaacaaatttagtctagaaagcattggaaaaccacacaaaaatcttaccctgcaaagtgcaccaatagcaagagcaatgttttcagaagatctaggaatagcatcttttgcaatatgtataattctctgcatgatggcaagatgggaaagaaaagaaaagagtaacattataatttcataagtatcattgttgtgaaaataaaatgcatgaaggaaaattcaaatgtaagtttctctctcttcaacagatattggaccttcagaatgtcatttgcagcttttgtagttttctctaagctgattgatggagctttagcatcaacatataaaatatcagctcttagccagcgttgcataaatgctttccatgattgaagtgaaagaagagcaacataaatgtttcttgaaagtggaagagatgcagctaattcaagaagtgtcttctcatatgcagcatgcacatcatctagtccctgaacataaattaatgttagaacaaaaaccataaaatacattatattatattatacatatagccacaattattcacctttgatgtcctttgggaattcatatctttaggagtaactgaaagacataacagagctgcaccagctaactctccaacattagttcctttccctgcagaaataatttcaattgtgaaacagaaactaaatgaaatatttgtttaagtcacatagaagaaaaaaacatcaatataacaagagggctaccatcagtcgtgagagttatagatgcgcgataaatgtaaaaaatgttgatatcattagtccactaaagttgtgcataaattaatacatggagagttatcatttttggattaacattcattttaggtatattatttacagaaaaaaaaaatcaagataccacttttgaccttttccaagaaagtccaactaattgctaaccggtaagctcatatgtaatgttgtataataatgataattacgataatgtaacaaaattaattacagtatcaacagtatacccaactatcaatacctgatggaaatatcgcctgaggaaatacatccagcagcttctcaattttacttcttgctactcctttttccttgcgtactcgtctccttgttctgaagcatacagatgtaaaggttttcagaactggactttaccaaaaaaaaaagttcaccaagctaatgaaatagagtatatagagtctgtgtgtgtgtgtgttgtatatattgcttacatatgctcatttgttatgatcttgacttggagttcttccatggccctaagtacatgcagatttgtttcagaaaacagaacctctgagtacactttcttgaaatctggaattttttgctcaaggagtgatacctgaaaaatcatgcataaaatagaattatctaaaggaaagtacataattttgatacagactattagctagaaaatctaggctagtactccactctggaaacacagcttatgttccttaatactgagaaggattatcaagggaatacatatggaagtatcacaaaattcacctcatactgagccaaggcttctagggcagagactctcgccttttcccactgaaattcctcctgatcaggggaagtagaggtgcttataccccacaaaatgtgcaaaacttcctgtgatggttcatgatatgcttcagcatccattgcaccccatcttagaagaaggcaaatgctgccaataatcataagaaacaaaacttgttaaagaaaaacaatatacaatccttgtaattattatttgctttctttcaatggatattggaagtcatattaaaatcaaaatgagatattattttgttagcaactacccagtgttgatccttttatggcttcactagatcaaagggattgttaatggggcttggctataataagctaacttttttatttgtatcattgtgttgctgaaataaacaagaaataacaaagcaaaaactgcttgaagcaacaattttcttaaaaaaatactatgtccaatcctttcctgaattcacatgagccataggaaactctagcacattgctaggtatgtccctgaggagtcatatttaagcaattaacacattacaatcaagtacatattttcacaactacggtgtttggctatgaatttctactatgagtcgaacagatcaatattccatgagaatgataactaacatatggtaaggaaggtggtagccatatgaacccttagtctagagttagcacttcaaatgtagagatgttacctttgtgcaagaattgaatttctggagtagtcaagcacatgctttgaaatgacgtcccaggctgtataaaaatctgaatagcagtatgtaagaaaaggattctcataacactatttgtaaactaagaaaacctcctccagttattataaatttaaaaagaaaaaaaatataaattgggccttttactaaaagtaatttttcaaagaattctaggttcccaatctctttttctttctttaatcacacacacacacacaacaacaataacataaatctagatcaagttttgggaagaaatatgaggacggaaacatgtgtagaccaacatgcattaatatatatataagcacacataaaaggtcacagaaaatccagcttaccaactacatcagcttcacaaagatgagcaaggctttgaaatccaagagcttggattatagggtccctgctctcaatacaagcctgtcaatacaatcccacaaagacaaaaggaacataccttagatttttctccatgaaacaaaactacaacaaacagctgtaaaaattcgtaccgaaacagacaagataaggtccactcccctatcagggttctttctgcaaacatcattgatggaagcagcaatactgatgcaaacatttctttcagacttgaactcagtgaaaccttttggaagcaacaccccctatatataaaaaaacatgaaatcccttagaacataaaagtcacaaaaagcaagagaaaccaacagcattagttttggtttagtcaagtctactttgtgccttaaatggtcacaataacagaacattatgcataaacccagaagattgaatcaagagaaagaaatacgggatgttacttgcaaactcccaaaggcacgatcattcatctcccaggtctgacaaagcaaacgtatggctgttgcatataatgttctgaaaataaattaaaaaaaaaactcaaaaatcaagtaaattaatgaaattattacaaaagaagaaaaggacaattaaacctacagaatatatttagcaataggggatagattgtaggacatgagaaaataaattgcaaacataaattcaaatggaagtaaatattatggttatcacagtacatacggttttgagtctttctggagcattggcaatatggtttgtactatcagtggtatcatcccagaatgtgatgcaagtgcaggaagcatgcctaaaagttttagctgcagaataaatgaaatgagcaaaatactacccatcaaaatcatagagctgagaggaaaaaatgaaaataaccagtggtagcaccaagtccagaatatagaagagttacttaaccaacatattttggctggtatcatcctcttagtgaatatgttattgtaaaataaagattgctagcaaaaaattgaagttccattttaggatccatgatggatatggcggttaaagaaatctaacagcaaacaccccctaatacgatgg

SEQ ID NO: 185239 - DNA, 2210 bp, Cannabis indica
ccaataacttttgtgatctttatcattataaaagaaaacactagcaaagcaataaatatttccagactgtcaaatacttgaagcacacaataccacaacaccacatccaatatatctaccccgacaagccaattcaacaaatcaaagacaagcaataacagcaacacaggccaaggtgaccgagtacacactcttaccctgctacttttgaaaaagtacaaatcagaaaatttttaaatcaattttaggaagagcaaaactttaacaaacgcaataaacattacacatttcagtgcattgggaacaaaataaaaatacagtacgttctttatagaagatcagcagctttgatcatgctttacagacaatacaatgtaataaaaacagtagccttttttaaagacattttcttggctgttataccatctcaaagttataatccttgcaaagtattcttaaagtggaaacagtaaacatatttcgcaaatttgtacatttgatactcatctgactagcagtttcactgattcaaattaatcaaggtcgtttttccccctattcaagatatcatggccttcagttcggcaattcataattcttcgaaagacttctcttagttgacgctccaatggatccaatccattccgaaaactttcacaaaccgcagctacctcatgcaccctttgctctacctcctccttttgctcttctgtcaagggaaactgaacagaatccaccaagtcagtcatgtggcgcgcacatctttcaacctgataaatctccctcaacaatccattggtgtttcgattctctctctttttggattcttccaaaatccgattgagaagtgacatcaaaggcgttccccatgagaaattgcggggcactgagaaatggacattaagaccgcgatcctgacatgggattgcagccacaagagtccacaaaacaaacatgagcacaaaactcattgtgaaaacaggtaccgcgagcccatttgtggccacaatctcgtttccacgaggtggtatcaagtttgtggcaatggattggagttgttttgcagctgaccaagaattggatacactccacgaaagagaccgagaatgccctgaggattgatttctatggtgagaatgatgatccttcttcgtgttatgacggccaaaagacatgttcctgtgagaaaacaccgaaccagtgtccctctcgtcgagcattacaagtgccaaatcgaccaaagcctttcttgcacggcggaattgtccctcactcagtgccctcttcttcgagtctaaagcgcaaacaacaatatccaaaagcttatgccatgacctgatcttctcaatcccatcacaggtggcattacagatatcaagagccttcacaatcctttcaaagaaatcatcaaccaaacgctccaacggtggctttgagacctctgccttattattcaaaagaattactctgaaatcctccaaagaggaattgaaagcatccaaaagcttttgaatccatggaattgaaagcaattcatcattgccagcactagaaaggtcttggaatcgttctgtgacacgctgttggaagaactcgagctcagattcaagggcactagagtcctgattagtctccattgagtgaacttgttctctcctaaaactccaaattgatcgaccaaatgcggccagaggtgaagaagtgcctgaattttccgttgaaggcattgttacaagatttcacagccaaaaaggcccttgatcttatcaacacaacaacaccgaaaaacacaaaatcagtacaaacccattaatacttagctaagaagacctcgacccagaacctcaactctcaaaatcttcgaaatcccacttccaattcagtctactgcaatagttaaacccaaattcagaaatgttttcaccatattatatatcagaaaattatccaaacttgtcgaacactataaccaaaaattccatttttttttaataaaagaacagaaatttcacccagatcaaaaagctcaataacctggtttatctaaatgactcaagaaaaaaaaaaaaaaaaaacgaaaagaaaataaaagacgttacatctacaaaaaagtgaataagcaattctaaaataccaacgaatatttattattagaaaaaaaaaaccaaaacaattagtagtaccatacatttcgtaaaaaactaattaag

SEQ ID NO: 185240 - DNA, 5539 bp, Cannabis indica
ataccaaacatgctctttgtttttcctatatttttcttacttttctttttcgttcctcgtcaaaatccaactttcaaacatagggttagggttaaagtaacttaaagatggtgataacttgttatcctttgagcttaattgattatggaaaaaggaaaaaaagtagttgagagattcatgcatgcactttacctcccaactttttcctttttactttctttttctcttttcaaaatggggacactttagtttagacaaacacaagaaagaaattgttttggtaagttgagattcgatggacctaccatgcactaatcaccggctcacattgaagaaaaagggtcttcattcacaatgtgaaagtgaaataaaatccaaatatttatcactacacacactaaacacgcccatctctctttacttgcatgtgaaacttttgcaattttaagaactattccaagttgcacttgtacatatattcacccccttatcactatcacctcagccactcactactattaactcccgaacttattaaaaattctcccgaactattaatgtaacgactgtccttgtactaatcatgctcactaaactttcatccacatcatactttcgttaataaaattggacgaaagtcgttgaatccaaagatctcattagttcgaaggaaatttacaaaagaagggcaaagataaaataaaaaaaaaaacccttttgttttttgcttattcataatggtagtagtattcatatttgaccaagaaaatttcactagcaaaagtcacatttatatcaaatctaagccaaacttccattaaatgaaatcaaatcattaccactcagtgagaaaaacaattaaatcttgaccaaaataacttgacccctaataagcacacttaagttcatctaagagtcaaaccaataagaattaagaaaagtttttaagagttaggaaatgaaagcactaatagaataagtggagtagttggacccaaagaaaaaaaagctaagctacatttccgagtcccaaattcacatggtgaaatataacaacaatctatacaaacagacaagatcaaatctgtgttggggtttttcctaaatatattttaattattcaaaatgaaagatgttgcagacaatgcaaatcacagatagattctcacttttgaaaaagctgtataaatatatatatatatataatcattattgaaatggaataaaataaaaaaatatgaaatatgtattagttgtagttggctgatgagcaagatagacttacattttacaaggatatggaccactcatcatcaccggtagtagagaccattgcaaaacctgtcaactttcatgtaatagaaaatttagaccaattgtgctttctttctaaacccccaaagtattaaaactaaggggataaaaatgtgggttttctagcaatgaggaaaaagatctagtaaagaaatgtacaatttcataaccaaaacttgcaatgcagaaacaagattaagcggtaaactttccattcctctttagtatttcctgtaagaagtcagacacccaaaaagaaaaaatgtcacttttagcaaactgtgtggtgtaataatggaaacttgctagttttctgttttcgattcaagtgtaactgtaccaatttggtttctgtaattgttcgacgatgcctttctttcttctgacgttggcactctccacaccagcttgaacaagcgtccttttgatatttcttcagctctctgtagcccgaactgtaaaaaaaataaaaatagaagatatatgatttgtaaaacttagtaagacatttaaaatacataaaaactgactttgcattggagtagtatttcctttcatttcaaagtgtaatagtcattccaccaaaatggtggaaaagtattctaatattttaaaatgcaaccaaacaaagaaatagaagaaaaattgattaatttccattttattgcctccaaccaaacacaaccttagttttactcacagcctagaacatggttactttctgtgaaatttggttatttcattgtaaaatttcttttcacaaagctttattatgcagtggataatttttcttgtgtcacttccattccatgcatctatttcatccacatttaatattatttctatcctagtaaatcatttcaagaacctttcagtatcttaaataaaatctaaacagtagggaaaatgtcagaattcacttctcagaatatctagataacaaggtttaagtaaggttgttggatgttggggattcctgaatgatctgatattataggttcttccagatatcaagtgagtttcgtaagaataatttcattatgtaaattatgcaataactacatctcattcctaaagatgccagatatggaaattatgacaatactaatgagaggctatccacattttagatatcctgaaaagtctattaaatggaaattatgataatatttacgagagcctatccacattttatatatcctgaaaactctattctccagtcagtcaccccaagcagtaaacattttacactgatagtcagagcatggataaccgagtaacttgtacggccagcttcttattaacatagatgaagtgtaaaatgaagccttagaaggtaagagatcataactaatatcttatatgttttggggataggattgttgaagagatgtcctagtggttcatgaaacaatgccatatttcatgaagcaatatggtgattcatgaatatggtggttcatgaaacattgccatattccatgaagcaatatggtgattcatgaataggatcacgaaataatgtgattgttcatgaatatatatcaaaacatctataaatacttaaaaaaattatagatttcatatcttgttttggtggtttaatgttttttctagatattagccacatgtttttgtatctcgagggtaatttgtgagctttgagaagtgagggcaaaaaaaaaccttaaaggtaagtggcaatacacgcctcaaacccaaattctttgttttcattctttcttgtctcctactccacatacttctcttacaatcttttaggttttatttcaccatattcataggaaagatgacttcatttctaaaaaattgatcacttcaataagacaaatttcctccacttcctcaaccaacaaagacaacgatgacctcaaggtggaaaggaagaaaaagctagaagatcaagttatatgtcgtggatacattctcaatactctatctgtgatctttacaacaccatggagtctctgatagatttggaatgctttagggtacaaatgcaaaacaaagaatgaaagtttagataaattccttatttgaaagtttgtcaaggtaggggtacaaagttcattcttgatcaaaatagatgaaattgtaagttaatgttattgagcttaaagaatagaaagttgagatctctgaagcattgtcattgccaaattgccctaaagttggaatggttgtaggaagaaactccatagggaagaagataaaatcacatgattcgaaaggcaagtttagtgaaactaatgaaactaatgaaaggaagttttagaagaagccctatgacggaaaaaaaaaaggttttcgagaaattgtttcttttgaggaaaactagatcatcatcaaaacaaatgtcgttataagaatacaaaagagtaaaccctaaccaggccaatgttgttcaaggaaaagttgaagaggttgttcaatggtgatgaaaatgcaaagtgcatgaccatctgaacaattggtagctcaaatatggtggtgctattgtaatgataaggatggtcaaacaaacctcatggaaaatcatgacactccaaatgagattagagaaggaattgcggagatcaacttcacttcggataagaagtttctttaaataatgttttccatgtacccaaatttagaaagaatcttgtatccactagttttatgtgtaagaatgggttgaagattgtatttgagggcaataattgtattgtatcaaagaatggggtcattgtagggaaagggtattcttgtaaaggcatgtacaaactggtattgatcgtgaaattgtgaattttgcttatattgtttggcatgctgattagcacacttaatatttagatctttgaaatacatgtctaagtatggtttggaaaaaggtacaatactaatgaatctagtcaaaccctcaaggctatattagtagcaaaaggtttaaaaaaaacaatgaatggattacttcaatatatatgctctagttgctggattcacatccattagaggctatttactatagcatctagttagttacaactttcaagtgcatcaaaatcaaatgaatgttagattgagtttttgatcttgatttgaagatttatatgaagcaacccaaagggtttgtattgctcaaaaagaagagaattagtcaagtagctctatgggttaaattaagcaccaaaacaatgtcatgagaaatgtgattcaattattttatctcatggttttaggcataataatgctgataaatgtatatatatatgctaagtttaaagattttggtttgatcatatgtttatatgatgacatacattgttggaacaaacattcacatactaaaaagatcttggtgagatagatcttaacaagtatattaagttaggattactagttgtctcaaccacactttataggaaaagtgctacttaaattcaaccacttcaaatgtaaagaagcaactgcccgaatgaccacttaggtggcgtttggttggaggtaatgaaatggaatgaaatggaatggaatggaatggaaagaattttattccattcctttgtttggttgtattttaaagtgttggaatgtcatttcaatggatgacttttccatcattgtggtgaaatgatttttatgcattttaagtttaattccattctattcatgttctcattctcattcctattcttatgttctcattcattccaaccaaacgtcaccttagtgaaacttccagagaatgatgttcgaacaataacatatcaggaatatgcagtattattggtagtttaatataggttacattaggcaagaatggaattgtgtttgcagtgtgcaaactttcactattgacgagaaacccatgtgttgaacattggacaacacattggaaagcaatagttagagtgcttggttattttataagagccattaatttggttgtcataaaatgattgtatggtagcagttgaagggtacttcaatgctagttggataacaagtgcaaaggacaataaatccccatttggttagagttttacaattgcaagtggagcaataagatgggcatccaagaaacaagcgtgtgaaactcactcaataatggaaagtgagtttaaatcttgagactgcgggtaaagaggcagaatgactaagaaatttgttgtttaatatagagttgttccgatttcaatatatatatatggagagagag

SEQ ID NO: 185241 - DNA, 2123 bp, Cannabis indica
tgtaatgcaatctagctctatgtggtatacataatctttgctaattcatttctgctgtgaagaaaggtacttggtttctgtagtttacttgatctttattgtttggtcattcttgggcagttgatttacttggctattgtttgtataaaatgatggttgtttaacttccaattgaaaaagaaaattgctacttcacacatgcttttattgttcagcattccatgctgattcctaagctattatttttagatcaaatttaagctcaaatatttattagatagctgatatacacaacaatagtaatgactgaataaccttggtgtcaagtgtattgatgttggaaaatagtcttgcatttgagaggctagaaatctttccactgatcgatttaagggcaattacaaattccagaatgaatcctcactgctcacactctacactaatcaaacaaattattcttcctagttccgaggcctgactgaaaatataaattctccctgttataccagataaaaggaaatacgtataaacatgacagcagtactatagctttctatgtggcgagcttggcatacttgaaccaaataagaggcgtagcagtagatcttcctgttttagcatgagagcggaaatcaatattgtcatgtgtatcagaaagatcaaggtttcctagatgaagtttgtgcttagaagttgacccaaaatctggtgatattagtttacgatcctgtatgtaacaatcttgaaaggtagatgatttttttgaatttcattttcagtgggtctggattttaagaatgacttgtagattatgggaattgggaatgtaatatcttgaaactattgtgtgcatgaaggttgtttaattttaattgttgacaccaagaggtagctcaaatgtttgtggtttgctcctacatggtttgaggttctagtccctctgggtacctagatagcaattgcaacaatttactgctcaccatatattgtaaggttaggcgggacttctagtataaaaaaattatctgttgataagttgaacatagtaggatcagagtcattctcaattgggccttggaaattatctttggtgatatagcgggctagggctcagcacgcaagggagtggttgccttgacattagctggattatataaccaactaaccaattatttgctaggtatcctttttatattctatctaatgaatctctatcaagaaaatggtcaacactattttgtgaaatggaaaattcacccaaatgttacattgcctatcatggaaattgtaacctgtgaattttcattagtaagatcctatctttatctgtttgagttgggtggaacgttgaagaaagaatatatgttatgttagaatataattagctgtatattggttgtaaaaaatttagtgttaattgtatttaggtagtttcctttttagtctcctaactttgtatataaatacagactattcctttgaataaaatctacaattcatttaccatattttacatggtatcaaagcaggttttgggattggaattcaaaattcgaaattagggtttatttgaaattggggttctcaattagggatcataaatttgggtttttcaattagggttcatttttcgaaaaccatcttctgaggaatcatttattctcaccgcccactttgaaggattgctgagtcgccgatctgccaaaccccaaagttcggtcgccggattcctcgcgtgtgtggctcacacgctgcttctttcttctgcaacctaccccacgcgtcagcgcgtggaggcgcgtgtgacagagatttcgacgacgaatcatcttcggttcgttttaggttcctcttaaacctactcgcgtttgttcaggttgtagtttggtttttctccctactttgtctttgggtgttctttacttgttcttcattgttcgactctgtcttgtctgttttgatatttgtttttgaagttatggcagagacaaaatcaaatccaaaaccactagttgtttctgatgtggctcccatgatttctaaaatcacggaccataaattgattggttcgaattatttggaatggagtaagacgactcgactttatttaaggagtattgaca

SEQ ID NO: 185242 - DNA, 2565 bp, Cannabis indica
aattaagtatgctaacttctgagataatttctttgcagtgatgaaaagtatttgcagtaccaagtggatggaaatcttcagtacaaatgtgctacatgccgaggagaatgctatcaggtttgccaagagtagatatggttttaacaagtctttctattgataagtatattcatatttctacatataatgctaggtcaaggatcttgaggatgctgttaaagaactttggaggagaaaagacaaagctgatcgaggtctcattgcgagcttgagggcagctgctgggttgccaactcaagaagatatattttcgatttctccatattctgacgatgaagaaaatggccctgttgtattgaagaatgaacatggacgttccttgaaattatctctaaaagggttagttgataagtcaccaaaaaaggcgaaagattatgggaagaaatattacagcaaagggtctagtaagaaaaaataccaggcatcagtgatcggtaaaagagaacaagaaatgagttttgaagggcataatgatgcccaatccttaggattcagcttggctaatgacaagaatgttggcatgcagtctcataaagatgagatacaagacacgtattcttctccggttgcagcaagtcatagtcaaacagaagagatttgctctatcaatcagcccggagttttgaaatgcaagtttgttgatgaggtaatggtgagtgatgaaaataggccttctagagttgttcgaattaagaacaacaaatctaatgatttagatagtggtgaggatactggaaagcaagctggcaagtcaaagactgtgaaaggaaagaagttagtcatcaattttggtccacggaagataaacgttaccaattctcccaggtccgatgcttcaaccgaccaaagagaaccagagatcatgaattccaatggtgtgtccatctttcaatcacatacacattctctctccctctctatatattatataatataaaatatctgaggtatgacttgtgtgcttatgttcttaagcaggcacagaagacacgagttggcgaaaaacaaatgataagaagtctatattggagaggcatgatggccttgctaacagtggtgatggtagttggcttattctctcttctttattggaataattttttcttatcttgctcaacataagtatttgttgttgattttttctttttaaattttaaattattaagttagttacatagttttctgcaattcacagagagaaatgattcttctagccaatcaaagggtttgaagctcggaagagaaggaaattttattaagttgggaaaaattaggaccggggttcctagttataacccaaaagttggccgaggcagtagtgctgatggatctgaaactgctactccagagcaaactcacacttcactgggaaaaagaagaattgaagagaccgccgcatcagtggagcctgcaagtgaagttcctatttcgaaaagggagagagtatattcaggaaagctatcagaaggaagacctgatactagcacggagaacaacgatgattctagtcagacacctttgtcaaattctttgcctaaagattcaaaacctttgttgcggttcaaatttaagaagcctagtatcgagagtcagaactctgcaaatcaagaggaggagaaaagttctttaaagggccaaaggtctaaaagaaaacgcccttcaccgttcatggagaaaacgacacttaatgcagatggtgcaacccaagcacatcaagaggatttaatggatgagatcatggatgctaattggatactaaaaaagttgggtaaagatgcaattggaaaacgagttgaagttcatcaaccatctgacaattcatggtgagtcttctcttctaagaaactttcttatgtagaaaaatatagtattgggatatcaggaaattataataattgttatgtagatgtccaaggggagcaaaccacatgtgggacgatttgagctatctttcttaggtgcaagtagaaaattatgttacaatttccactatgcgaatcctaaatgcgcattatgacagttgatttttcgaatttcttatccaggcataagggggtggtagctgatctagttgaaggcacatcaacactttcagttactctagacgacggtagagtaaaattcctggaacttgggaaacaaggcgttcgattcgtgtctcaaaagcagaaaagatcaaagacatgaaatgtcgaacaagttcaatttcagtaggcttttctttcactacacctcagcacacaacgaaaacagttccccatccttgaagccaccgagaaattcaaccgcgctggtatcgctgcagctaggttctcgatgatgaactgtttgttggggactcatcaatcagtccaacagtgattgatttttattggcaaatttttgttttttctcaccattaattgttggaaggtttaaactttatattaaggaatcaagtcagctgtaatagtgtaagatattattagagcagccttaagggttgttagtatttttttttttttt

SEQ ID NO: 185243 - DNA, 4117 bp, Cannabis indica
acatacattgtaggattttcttaattattcttctacacttcaagcctagttacttgttatacatatttttatgttaaaagaaaattggatgtagtttgcttatacacattttctttgcatgtgagtcattcttgtttaatgtttagagagtaaaggatttttccctggatataagaaatctggggtaaggtcctcatatttttgatgttatttctttctttttttgtgattgtgtttccactcaaataatgtctgctatatagtacatttttctcagtctcatacttttgtcgtaagatggttggcttcctttgatctccttgggcagggaaatgaaatgttagaagcaaatgaaatgaaatgttattctactagaccctgttcatcccataagttttgtacatgggggggagggagggagggagggagggagggggatatcacatagatttatgttttgcaatagatactgagaatagtatcttttttcactggaactggaggcttgcatcttttatcatgatgagtgaatttcagaaattgtaaatctgatgtcattaattccgtgtgttcctttttattatctaatgaatttattttacaaccctctttctattcacctacagatgccatgataaagaactttgaaacaactgtagcagctaatagattgattgcagaaagcttgaactctaagttgagcgatgtaaagcttgagttgaagttaaaagaagatcatattaatcacttgctaaccctgagggacaacctggagaaagaaaagagtgatgttcaattgctgaaggaggatcttgctaaaagattagatacgtccttccttgagataaagaatcttgaagctcttatccatgtgttcagttccctgttggttgaagtggataaacaaagtttgactgttttagataagtttgatcagctaaactatctttacaactcttgcttcaagttggtccaggaggagagggaccttgctagcaagcatgctaagagacagtatgatcaacttaatgataagttcttactcatatcatcagagaagaatgcattgcagttgggaaatcaggacttaaacaataaggtcattgagcttcagaaagttcaagagtctatcatggcacagctttctgaggaaggcaatatagccagggagaggatccagaatttggagtctgaagcagaaagtctggtctcaaagaagatcgagtcagagaagctgatttccacattagaattgcaagttgaaactctttcggaaagttcaaggtcatcagagaataaactggttagcaattttctcaactcatctatggaagttcctaacatacaaagtttttaaactaaggttattttatgatcttgcagcaagaactactgctaaaattttcagcattagaaaatgaaaataaagataacacagaaaaattacaagcagagatgcagaaaaaagtcgatgaaatagatattctgcaaaaagagggagagaaacgagaggagcacataagcttactggagaaacaagtagagcaacttcgtaacatcatagaggaaaaggaaaggctcattttgcaatataaagaacgagagactaaactggaagaacaatttacagaggttctataaacagctttggcatattattttgtgagtcctataatatttcattactgaagagattctgtcggttaatgcagaatcaggtgttgttggctactgctgaaagtagactagcagaagctagaaagcaatatgatgttatgttagaaagtaaacagctagaattatcaagacatttgaaagaattatctcagaggaatgatcaggtcttgtatcttattatttactaaaatatcattatcaagcctctgtaagctgtacaaatacctttggattgactcaatatggaattggattaggcaattaatgacatccagaagaagtatgaggcagagaagttagaaattatcaacatggaaaaggaaaaggtaagcctgtttcataatctctttccacatttttaatagtgaatcatgcttttcatacttttgaaccttcaggtagaaaacattactggagaattggaagcaaaatgtgataaaacagttgctgaatgtaaagaagaatcaagacagtacctgatgcgtgtccaggaggaacatgcttctctggtatgcctaaaaaagtggtgcaagcctaatattgttaacttgctaaatatcatttttccaatggcacattcttctttatggtgcagcacaaagatctttgtttattttcctagaggtattttgacaaaggacactggcaatctttttctttcgcttaaggagtaaaaattgtatgaatatgctgagcagccacacggattaacctatttaatggatctagtagatttcattcattcttaattattcaccatttaaatcataaaccttatgtggtatgcaaacttatccaaccgaaacaaatggcgttcggaaaatgtttctgagctacatccgatacagttttctgatcttgttttttctgcacactgatgtgtactgttatgatttcatttccatcttgtgcgtatctaggtaagtcgcattcagcaggattatgatcgtaaagagctgagtcttaaagccaatcacagtgaagaactaaaacgttctcaacttcaagctgaaggtgaactgaaagaggtacatgctattcatatttagttggagaggttcaattttaaaacgaagtttgcttcagtagctaattagttgtaatatgatcagagaatgacaacactgaggaaagagtatgaagcgcagatggacactttgaggtgtcagcttgaagatgaatgtagaaagcttcaagatgagttggatcttcagaaatccagagtaagaactttcctcggacatgatataacatcatgatcactgctttgtattaattttgcttgtaagcgcaggaggaccaacagagggctttactgcagttgcagtggagagtgatgggcgataaactacaagaggaccaagaagtaaactcgaaaaaggtttctctttagaattggaagctctctccctttctctcaagtgctcacatttacataacaatggagctcgatactacataaattttcagatgaaattaccctacacatctttattttgttgaagatttttatggagctgtatttttttagaactaaatttgaattttttccttctattacctacctgttacattttcataatcttttaaacttctttttctcttcaggattactctgtttcctcaattcatatcaagaattctgctggtgcgaaaagaagtcaacatactctagtaagacctgacaatgaagagaaggtgaaaacagaaacaagcgatcaatttgcaacatcaccttgtgtaaaatatctccttctaatttcactatttttaaaatcaatttccttttttctcaggattcttcatacttgagagcaacacaaacaccggtatcaaagatgttgaagaaagtagagaatccaaccgcgggaagtgtgttgagtattccaaaacatcataagaaggcaagcaattctgtaattgattttttactagaagtatactcttaaatggtggttcagaagtttggtatagctgcaaatgatatttaattgagctcatatatgatgcttcgctttgagactcacttcatagttctgcaggttactcatcacgaatatgaagttgaaacttctaatggaaggacaattacaaaacggaggaaaacaaagagtactgtcatgtttgaggtaggcacttggttaccatgacaaagcttacatacatgaaatgagtaaatttatcttataatacagtatttttgcttaatgctgtatcaggatcccagaaaacgtaaaaagatgaacactccaaaagtaaacactccaaggaatcttatcaaggtgaaatctgtaatgagattctattttttccttttaagaacctattgttggaatctagctgaatattagattgtcaggtagtacttttgattatgccattttcttctagatagaataacaggaagttccgtgctctctaaatagagcctataacttaa

SEQ ID NO: 185244 - DNA, 4057 bp, Cannabis indica
atatttggtctggccttttgtttgttgtatttatgttgttctttcactaatatttatatgctcgcagaggcaaaaattgcaatggttggacgatggaaggtcagcttctttctcagagctagtcatggtttctactaaattttcccattatctaattctgattatttttgtcagtaggcaggacctggtaaatctctgtttgatgcgatttctggagcagttggaaagattaatataatagctgaagatttggtatgcttattcgattggacagagaaagttcattttttcattggatagctgtgtctttctcatacttgtcctcagttacatatatgggtcttccaaaactactttgagtaatttttcttttggttgtgtaggaaatcaagctagtaattagtctttatattttatttatcttctcaactgtatataatatttattgcattctcttaatgctaggagatctagggtttgatttgtatatatatactcattcttcttgtaataagaattagaaaatatttccttcatttgcttcatggtaccaaagcatttgaggctcctaaaagttattttcttttctcagccctttctcaaaaattagggtttggtactttggaggctctatcctagaaaactaatttagaggagtttttaattctcaccttcgacctagggagtttgtcctacctccgataggcaaagctcagaaatttggcacccatatgagttcgtatgggttccacgcgccaccttcaaccgctgtcgccttctccatgcaccagcatgtatgcacgtggctgtcttcggcgatgtttttctgcggtgtctctctcgctttgcttcattagtggttcttcttcgtctccgacgatgttattatagcgtcatctctctccgttcacttcattaatggttctcactgtctttctctatggcaaaacaaatctccttaaaagccatctcttttagttgcgcaagacaatgctacacattcacttcaggttattaaacctctcatccccttggattgtggattttggtgcttttgaccatatgacaggtgatagatcactattttcctttttaagcaagtgctctaatgaaaagagtgttcgcaaagcagatggttcatgttcgagaattgacagaatcggaaccataacaatctcaccaagtcttgtcttaaattctgtcctttactttccctagcttgattgtaatttactctcagtaagcaaatggagtagagatcctaattgtgaagctaagtttaatgctaatttgtgtttttcaggatgtggaatcgggaaagataattggctatgctgagttcagtaagggcttgtatctactaaaaatcaaaaaccccatgtctaaccatagaaatcgctgttgtttctcccaaggtcaatctatttcctcagtaaatcagtccaataaaatcattgctatcatgttatggcattatcgtctaggtcatccaaattttcgtgtatctcaaacacttactcccatccttttttgtcaatgtaaaccctgagtctcaggtgtgatatttgtcaattttctatatactctcgtcactcatttgtcccaagatctcatcaaccctctcaccccttctcactcattcaccaagatatctgggaaccatccaaaattcaaaatataagtgggacaagttggttcttgttactaattgatgatcatagctgcctcagttggacattttttatgaaagaaaagtctaaaacaagtcatatcttccaaaacttatacaaaatgatccaaaaccaatttcaacgaatattcaggtgttaaaaactaacaatgctcgtgacaaaatggtgtttacaattctgttcttggaccgtgtttacaatcaaataagattattcatcaaagttattgtgttgacacaccacaacaaaatggtgtggcggaatgtaaaaatcgtcatttgcttgaggtagctcgatctttacttttttcataacatgttcaagaaagattttggggtgaacaatcctcactactacttatctcatagacaaaatgccatcaagagtcttaaagttcaaaactccactgcaaatcttcttcgaatcatatccttactttcatcttctatctcaaatttccctttgtgtcattggttgttttgcatttgcccatgttctttcctcaaaccgaagcaaacttatgctcgcgccaccaaatgtatccttcttggttgcccatccagtaagaagagttacaaatgctattgccttgtttctaaaaaggtgttccactctatggatgtcactttctttgaagaacaaccttactacaccaattctacaattcagggggagaaccagagtcaagaactgcaaaattgggactttgtttctctcattgacattcatctaattctcctcaagtacttcttcacaaaacacaaatttgttcagaaataatacgaactccttccgtttctcacactctaaatctttcaattgagccaaatgagccaagaaatcttcttccaatctgttcaagtccttctatccatatcccaagcaaataaatccatgtttctcacactccaaattgttcaattgagccaaatgagccaagaaatcctcatcaaagtcctcctgtccatatcccaagcaaagaaatccatgtttactcaaggagaaagaagcaactcccaagcattgaacaagctactacgtgaactcagcaaggtcaagattatgattcgatcccattcatcgttgacgagactagaccataatctattatagaagaaaatatgacaggtgatctgagcatacccattgctcacaaaaaaggggtatgctcttgcactcaacttcccattcacaactatctaagttactcaagcttatctcctacatatagagcctttatcacctacttggaccaagttcagattcccaattcagtccaagagcttagagcacctgaaaagaataaaaaatggatcatcacggatttatcacttggaaaacgcacaattggatgcaaatggattttttccatcaactataaggcagatggaagcattgaaagttcaaggctcacttagtggccaaatgattcacctaatcctatggcattgaatatcaggagatgtttgctcctattgctaagttaaacactattcgagttcttttgtctattgtagtgaataatgatcggcctttattccagcttgatgtaaagaatgcatttcttaacggtgacctagttgaagaagtatacatagatatccctctaggatttgaggacatattcacaaagggaaaggtgtgcaaactcaagaaatccttttacatcctcaagcaatcctctcgagcctggtttgacaggtttatgaaagttctgaagggagatgactacactcaattcctattagatcacactttgtttataaaacactcagctggtgaaaaactatcgacatcagttgtttattttgatgatattgtggttacaagaaatttcatgaagaaaaattactcatctcaagcagctcctttccaatgaatttgagattaaagacgtagggcaattaaggtacttcctagggatggaagtagcaagatagagacttggcatctcaatcactcaacgaaagtatattctcaacctcttacaagaatcagggatgatcaggtgcaagccaattgacacaccgatggaccctaatattaccagacttggagttcaaacagacggaataaaagttgatcaaggaaggtacctacatcacgtgggaaagttgatttacctaactcacactcggcctgatataagctttgctgttagtgctgttagtcaatttctcaataattcctctaaggaacacataaatgttgtctaccagattctcaagtatctcaagggatgaccagcctaatgttcaagaaaaccctccataaggatcataaaatctagaactgatgctgagtgggttggttccctttttgatcgaagatctacttctgggtactgctcatacatttggggaaat

SEQ ID NO: 185245 - DNA, 5065 bp, Cannabis indica
gtgatcgcctcatccctcttgatcacgagatgcctaatgactctttcgtctttgtccaacatactcttgaaatcgttaatccatttggcatccatctcgaagttcatcaaaatataatgggcattctttgctttctgtatcttgtatgctagtctacgcataccccaatcgcttattctccatatcgtgcctctcttctctcttaaaaaatctgcaataagtagaagcattcagtaacatcttgtggcatatttgaaatgcaactccaaagaaacaacactcaaaaaaagtgcccaccacttgtagaaaagtatcataacttgtttaattaccataatgtgcaagtgtggttttgagagtaaaatagggtgaggtgtatggtaagaaatatgagattcctttaatggtattaagtttccatgactctaccaattttggacggttcaatcacaattacaagtggttcttttggctctaatttttggattgaattagatgctcggaagagttttcttcgagtctaataccatgttagaatgtgaaagtgtggtttagagaaaatagtttgagatgtatggaaagaagtatgagttcatctttaaactgcaatgagtggaccatgatcttataaatggcattcagtttaatccagactctctgacataatatatgaaagtaattctaagagcatataaatatcctttgctcacactcaaaatcataatatatcaatctcatgattaggcaaatagaactgggaaagagtacataccatttacttttgcattgacactctcaacctcttctgcgtgcttctcatgaattagatatacgacttcatagtggcgcactgcaaaaaagaaaacaaaacaaaatgtcaacaatattatgttataacaaccaaagaatgcattttcccatgttgaaaaatcaatgcagggtatgagtacaagcttacatctttgttcttcttgaagatcattttccagctgaagcttcagaacttcatatatcttctctgcaatttggcaagaaattccattattgtaacttcaagtcccaaaacaaggcttaatcactagaagaaatttgatttgaacaacttaccttcttctgcatcagctcaggaactaatttaccatctttttctactttcttctgtaattcaacacaaaataatcccaattcaaactcaaacttcaacaaaaacatgccaattaatagccaaagcctcttcctttacaaactcatgttactttaaaccattaatcttcacacccgaaatagaaaaaacatgaaagctaatacaagtgaaattacatttaagaagaattttacatttgaagcaccaagtttacatctttttttcatgttaaacagttggaaagaataagacagcttcagaaaaatgaaaaaagagcaaacctctttgaataagacagattcaggaaatgggccagtagcttcatctggtttaggtgcaaaatgatgagtatcttcttttctgttcttcttggctccaacaatcacagataccctctggcttgagttgggagagagtgaagaagaagaagaagaaaacccgtttgagagaaataggaagcggaaggtttgattcccagaagacccaattcgattgagatgatttggagtaagaaaagctacggaggagtggagttgtagcagagtatccatggtgaggaagagaagagagagagagagactagcagagcaggctagcctatccgttcagaaatatatcaaagggttctttctcgttttctatattgtgagtttggatctgctgtggtgctgctgtattagagataatttgcacaatgcacctaaattttttataattttatattttaagattttattttatattttaacataaaaataacaacataaattatataaaaataataaaataaaatagcatacaaatagcaacaaattaataagaatacaataaaattactatctcgtaatacgacacgagctcgatacaaattattataaattaggatcatcaaaaatagatacagatttgagtcgaacttgaatgacacaattattatttgggttggattagggttaacgcatgtgacacgaattgactcatttatattcaatatattattaaaattattaatttatagttaaatattatttatttttatagaaaaatttataagttgaaaccaaaaaatcttacaaacaatataatagataatttatattattgtattgttgctttgtgataaattattttaattaatcaatattatttaatagcaacttgatatatttttatttattatattatttaaataagaaaaaacacgtatataattaaaaaaattatatgtaaaaattaaatattaaatgtcaatcatattaatcaagatgtattgtaacataactatagtcgataagtgaacacgacaaatcgacacgagaacaccacgggtcaagttaaagtttaaatttcttgacaagaaatatatattaatcaggttagaattaaacatgtcaacctatataatataaacacgaatatgacacgataatacatattatcaccaggcaccaatagtgttattggtgtctgctaatatctacatatgacacgttataaataatttgcaatatataataataattaaatatttaattaaactaatggcgacataacatctctaaagactatcttttagcattattttttttaagtttacatgatatatgcccatttcttttttaattattattttttttaaatattctcccacagcttaatgggaatgaattgagttgaaaaaggaaggcaaatgcacaatcactgccattattgatggccattcatttaagcaaacagctgacattagatggtagatagatgttagagaggaagaggaagatttctgtaacaagaaaatgatgccgaaaactaaaataaaacactgtacaaactctgcaatatgcaagctagaaagggattccattcatgccagcatatacaattcccaacttttactcatacaggctttttctttttggaaaccacaattgggccatttgtaaaaatttataaactctaatgctctcacatagagtcacactgttccatcccgaaatggagggtatttttcaccatttctttcccttcttctttttcttgttgctactgctattattgcttccaccgctctttgcgctgctgttaccagctttggaagatgggctctcggtgttggtggagttgacgccgttcatgttctcaaacatgcctgattgcaccgcgttctgaaaccattcaaagaattcttcctctgtcatgcagtcttcaacgttattcgctggcattttaccgcctttttgtcctgaactcgatcccttcccaacactatgcttggtcgttagactcgtgttcacatgaaaactaggcttgtgagtgttggccggacatctcattccctgtgacaaagttcggaaaacaaattaattccatcacaagattgttttggatcatcaagaacttcatttagctaggattattttcataaatgatgagaaagctgaattacctgacagatataccattctgtagcattgtatactttgctatccgcacaaacaaatgcaacaggagcatctacctgatcagtgagcactatgttaaattgcataatcaaaaatcgaaatttctaatcatgtcgatgatataattattatggaactccctctcttgactttttcgtaagttttccagtcattcatccggacgaaatgtgaatatcgttaaggtaattaataagcaataataacaatcttaaacttgtactttttagataccttctgtaacaatccaaaaattaagggttgcgaagattgttctacccatccatccccatcccttgcttgatgaaaatcattacaatccttcaaaaagaaagaatacataaacacagtacagtaaacatctccatgttgtgtaaaaccacatgttaataaaaataaaatgaagatgtaactctgaaagttgatatttcgtatgaaaccaaatgaaaagccgaacggtaaatgaacaaacctggcaccatcttgcttgagattttgatttcctagtgagtacccaaagatgaaagttgttgcacttcttgcaagctattcttcttgattccccaaacggatcctcaccatcagcatccgaccgtgccattccagaagcaaataagccatgccctccattctagaaaatatattgcataaaatggttaagtaaaagaagaggtctgcaaaaggaaaaccatatgcctttccctttccctatccctatccctagaaaattacataaactttttcggtttagtgacaagattttcatcataggttgcatgcactatgtttcgggcaatttattttagcaacagttgcacaaacagagtgaattgaaggtcataaaattgacataattcaggctctaacctttgcatttttgagtttaaattttctataatattataaattacttcagaatcaatgcctctatcagatattaaattccattagtttgtgtcaagaacatattaagtcactaattcaaacatctaaccaaccctgatcgagcttgataagaaaccacatgtgtaccttaatataagatcttgtaaagtaactgatttctacatgtaaaaatttatcacagatattgggctgaattcctacaaaatcgaaaggcactgggaagctgaaatggaacgatatgcaaatttataccttttgtgatgtactttggaacctccggaaaatgtccagtaactcctctcgtcttaattcatcatcgtatgtttttcgcttcactgcatcgagcaagaccttgaacaaatgaaacaaaaagggtaagcacaaaatatcagactggaaaaccaaagtttgaattgaatcttatgagaatcaaatttaataacttacctcatatgcattctgaagtttcttaaaagcttccacagccttttcatttcccatatttttatcaggatggaccaacattgcctgatga

SEQ ID NO: 185246 - DNA, 1512 bp, Cannabis indica
ctctctctcttcttatcaaaacactcgctttcggatccaaagctccggttaacctatcggacctactgatctagggcttcttattccgactagtttcatctcctctggctgagttggcttgtcagtgtcttcgcacgtttcgttattgagatccgattagcttctcctgtcttggctcgagatccgggccaagaacagaagaaacgggtttgggtgtggattctggaatcaacgctgctcgctcgcacagaccaggttattattcttttgattgttgtgttgttaggtatttttctttttttttttgagtttttgttcggttgtctagaaagggtgggaaactagacgtggagaacacgaacagtgaaatacggttactgaattaaactcttttcaggttttttatttttttaaaaatatcgtgggagttttttttgtatgtataaaatgatgcaactatattataagagcttcattttatttacagtttaaacttttgattttttttttttgtttttacacatttgatgctgttgatataatatatattgtttgtatgatactaaaacttatgctggttgagttgataattgattgattttgtttatttcattttttttttttacttttacgtgatgggattgtcattagatagaaatacaaattataacaagttcattctgatgtttgaatatcctttgatgctttatcttgattggttcaatttttttaaccattgagaaacacattggattggaggtgtttgaacattgaattactgtttaattttgatactgtaggatatagatttttatggcgtcaggtgagggatttcttacggagcatcagagggaaaagttaaaattagccagtcaaaatgttgaaaatttgtcctcttctccaaaatcccctccatctctgctttccgaattcttaaaagttccccctggtggcaaggcacctgcaggtgtccctgggagacatgtgcgacgatctcactctgggaagtctgtacgtgttaagaaaggtgagttaggtttatgctggactatgcattttgattattggaatggggcgggaatatctactgagatttattgttgaagatacaatgtttcttgatacttttgataggtcactggatgagattaatttatactagatttcacgcttcggtcatgaactcgttagtaaaatttcagttggtttagcattcccgtctgttctcccagtataattatgatatcttttctataattgagctgttcattttcaagtgtcttagatgtgtcgtttatgtgcttcgttatatcataatcagctattgtaaaatagttgctggaatgatcattatatttattttaaattagttgctcaatgtgaactatgatgtttttttatttgctgggatgtagtgtgtatgcagacaattgcttgtttttgactcaatggtgaatgtcattcattctgaacagtgcttaaatgtcattattacaattgtttcatcataaa

SEQ ID NO: 185247 - DNA, 5250 bp, Cannabis indica
ttccaagtgttgctccctctcccgatacttaattagtcaaagtttaaagtgttgctccatctcccaacacttagcagccaaatttttaggtgttgctccctctcccaacgcttagccaaatttccaagtgttgctccctctcccaacacttagaagtgttgctccctctcctaacacttagcaagagttccaaatgtttctccctctcccaacacttagcaaaatttccacgtgttgctcccactcccaacactaagccaaatttccaagtgttgctccattgttataagtataggctatgatgagaaagatagcaaagggatgtacaaccaagaacgatccgttaaagctagcacgcctctaataaagcctgaagagatgaggtggttgtacaatagatacgacgagtacaggtagtggaaacaccatctgcctcactctaggtacaagctgacatccgaccaacactcttccactattcctctgacacgctgaccctcatggtacaaacagaaatttatcccttacttttgagaccacttgtatttcagagcaattagaactcaagtataaatttaaatacgtataaaagggttagaaaatcactatttttaagagagctccaatattcaataccctctccctctattattgttgttgtctcatattttattttgctgtataattgttgttggtagtgtggatctaatattgtttttaatgcattattattgtttattgatgtggaagatatatctcagatctatataatttttttttccatgtgtcagtttaaaatcgaggtaattgtgaaaaaaaaaaaaaaatcaactataaatggtcactcaattttaataccgactgttaagaattaatgtctattctattccattttgcgttggtgaaataggctaatgcctttttttagtagtgttccaataggagtaccactccctaatgcctgttgcttgcattagtctataaaattcttttactgcatgagggaatctaagagtaggttttgtatcattttttcagttttttaactatttgtatatatttttttccatgccggtcaattttttgaagcatctttgttaacgtctatgtgaatttggacaagtgcgatacaaaatcgcataggtaactaacaattccaaggacttgagtctttgtgagaccttcatttgagaatttgagcaactttgggactatatgttgttgggtctcgtatttaccataatgtagctttgattggccttcaaccatcttcttttcatagagcattattctgtattttgcggtgatgtctgcaaattggctcagaatgttagcatgagctttaatatcagatgagaacaatagttatcgccgatgtcgattaggacctgatttaagaatgggttgtagatcttgctcattaccttttggaatagttatcgccgatgtcgattaggacttctaatgttgaaccataactcaataattaaagcacggacttatgtaacttttgagtttatcttttgtctaactggttacagaatatttatagaagactgaaagtagacccatgctttaaataaaaggaatgaagtaatttactattttatctttgcaaagattagtaaaaaccttccaaagcattgtatatcttcttaacacttgtaaaaagcaatcaaacatagtcaaatttgacttatcacactctagagacaaggtggcatacaaatctggagcaatattgctattataccaacattatactgtataatctcaaacagcttaattgagacattttcctctactcgttcagatcatataaatacataaaacaacaaggaatgaccaatgtatttaagaatttgtgatgaaatcagagtagttccctggctaacctcactggtttttccattaagaatgccacttcgccattgggcgcagacagcagctgatgatctgcctgctcatcactgtcagccgtgccagatgatggaagagataccgattcatcattatcatcgtctgcatttgcattattgcataatatagttatttacagattaaaaggtttgtgagcgagtaaaagcaggtgtaaacagctgcatttccaacagagaatggaaccaactactgactctgtattttctaatgagtttgatatactcattaaatcaatcacttagactacttaacttaaagccgagaagagaaactagataaaaaatataaaaacaatgtaaaaggcccaaaatatacgggaccttcccaaatgtgagtttgtcaacgattttcaaagcaaggtcagaattaacaacccagagtcccaaaatgatttgaactttcaaccagttcgtgaagatgagaggggacgatccaaagtcataagaagtgagataacagtcttaacagatcctatgcttagaaaaatgttgcaatgcaatagcggattaaaaaagttctcactatgtgagatcatttccgacttccctatagggacaaatcacaatttgatacctatttgttggacttacaataaccaactaaacctttcttacaagatataatcagattctgtactagatatattattagactatctttgtttctctttcaatgaaattgatgaataggcagtttgatataacaaacatgatcgccattgcaaactcacctgaataagttggatgatcaggaagatgtcttactgcattaatctgaatgctttctggcagaagacaattacaaaaagaacctgaaaagtcaaccatctttaataagatcaatgaaaatctaaaacatatctgtcgggaaagatctagcacatattcctacttaaatgcatcctaatctacatctgctatatgcataggtaatatgatcattttaagcacacaagtaacctgttctcatcatcaaagagcagagaagtacagcacaagttgatatatactacaggaccaagcataaatagagcatgctcaaccacaatttactgactgaatttaaatttttaactaaacaaatctttgccatttattatttctgtcttccagatatgattatgagcacaaacatgcttataacttataaggcaacaacaaaacatttgagtagatgatctactttcttacctgcacgggcaagccgatttacccatccaggaataggctttccagtaagctgcatgcaaacttcactagtaaaatgattgcaatttttggcaattaaatgataagtgtccccatggtattctcctgaaaggtgttccataaatgatcgaaattctgaagcagacatatcaatgctgcccaacaacactgaacgtctaaaaataaatccaggacaacttttgggttcaacctcaaacaccccactagaagggtactcatgggctccaaagccgaactccataccatgtgctgtttatccagaaatattacaattgtattaggtttaggacaagtaacaaaataaaaggaaggcgtgaagaaactatcaaaacatacaagcatagaatgaataaaaagcaagaactagaatttctgcataataagtgcatgtaagaacctaagaattgcaattaactactttctaaacagaataaggctagctgaggcttcattcctaacaatagtaaggaagacaacagtttaatactaccttaggcatgtataccacatgtgaaaacttttcctgaatcatgtaaaagaaaggagtaacacattatggtttaagcttaagatggagactcatggatctgttcgtattcgatatattccccacctttgtcctaaagtctttgacagctcaaacttttagctttatgcttgtgaactaatccatgtcctgtagaaagccctaatgagggacaggagatcaaacataagtttatttcctgttgttttaacaaatttctccagaaacacctacaaaactggagctcttttgtataaccccacctatagaaacgcccatcaaagtttccaccataaaacaaactctaaaatgaattcatcacctatcccttttttttctccttacaataaatgcacagtagaataatccatactcaaacctccataatcgatcaaaccctgattgaagtacaagtatcaactcaagaaaagtcatgacaagtattggtttggacagttcttgggtctaacatccacaaaacttactgacttccatagcaagggaagccaggcaggagttgtactagactcaaataaaattaatgacacaccaagttcaagccatatgaagacacctaaattaatgcgttggatttcaaacgtgaaagctttaaaaactcaaacctagaactagacagaggctagcactacttaaaatagacccatagttcaacttagtccaagtaataaaaccaaggaaacatagcattcgctacatacaacacaagcccacacatacatgccccaagataagaagaacatcaattcaaatctactgctgctatcatcttatcaactatcaatgatccaaaaatacaattagtaattataatttcttagatcttaacagcaatataggcaagacacctgataccgacataaaatctatacacagttttaccaaatcaactagcatacgatctctagttaaacatctcaaacacgcttaagctttcaatatcaagccaatatttgcatatttaacatcagtcgtattaagcaattcaccattttactaataatataaattgagaaacaaaaacgaaatcaagaagtcacattgagatgagaacttgcataccttcgatgcccgaatggtagatcccgagcccaaaccagtaaaggtagttatttacaggggttagatcatatatattgaggtacaacaaagctcgattagctttaccattggccgagctcgagcctgagctcgaagaaaataaccgcattgtaccgaatccccaccctcaaattcccccactctgctcaagaaatcacaacctcatcgtcttcccaaaactcaagctaagacaatctaatcgaattccaaatcaaaccccaagaggaacccaaaaagcgaaaaataaataattaaaaaaaaaagagcacccaatcaaaacagaacccaaaaccctagctcaaatccgtcaggttaccaaaaggggaccagacaaaaatatcaaaatggaaatggaaaaagattgttttcttcgttacaaaaatgaaagctttattgggttcgttaatggaatattacaagtaaaaaaaaaaaaaa

SEQ ID NO: 185248 - DNA, 3536 bp, Cannabis indica
gaattgatgttagtgagactgaaagctcaatccttttcttcttttcaattcatgaacagggggcaaacgacattggtggctgttcaggtacagcttcttcctatactattttgttttcttttatttgtcaaacactaatattctacccaaagcctctcttagtttgttaggaaaaattatattatttagaaaacctttggccttgtatgattaacatttttcttcccttaatgttttgcctttctaatatatatttaatttgtgttgatgcttatttcctatgcagagactgtgaagcttcacaggaagggagaacttgaacctttgctggtagaaatcaaaaataaaaaggcacaaagctagcttgctgaccaaatttttgtttagagatttcaatggccttgcaatatgactccaaacttgcacatttgtagctttatgtttcatataagaacacagttagaaccttattggcttgatttgttcataataaaatgataaatcccatttgatataatgagaaaatgtgtatttgtttacctttactcttgcagatgtttagcttgtgattatgtgaaactaacagaaagatgaagcaggcgaaaatctgttattattattatataataaaacataagatcaagtagaaatacataaagataacactaacaatacattgtgatcattatgattgtttatgatgtaggctgtgaaagatacttctctctaaggcctttgagatactctaataactgaggacgatcagggtgattttctttgatgacatcaacattgttgaagttttcaatccaagccattaaccgaggtaagctgttgtgttcaagtattttaacacctgctgcctcttccagtacttcaatccatatagctatcaacccaaaggctaagtcagccattcctatgtcgttgcccccgaaaaacttcttgtcaccaaggccattctcttccaagattcttagaacatttcggacgtctctggtagctttttcttgctcttctcctgttgtcttccaaaacctaagaaattgctctctctaaattacacaaacagttttttagtcagtcacaccagtcaagtctaataaaaacacacacacacacagagcttatacatacagtagtttacctgatcatctacatacttcatccaaaaccgggcgatggctctttcgttaggatcatccggtagcagcagaggattttgaggccacatctcatcaatatattcaagaataacaagagactctgcaaatgattttccaccatgaatgaaaactggaactttcttatgtaaagggttaagctgtagaagcaatttgctcttgttagataaatcttcttcgatatattcaaactcgattcccttaagttttagagcccagataaccctgtaaacatatggactaccccagaatcccactaccttcacttcctccatttttgatcagctttagctctctctcttccttcctattcaggtgagttttttaatgcttggttggtctgttttgctttgatttcaactactttcctagaagttacgtgagaaagaaaaatgcttattttaaattgcaaatcaaatttggctgctagtgtacaataattgcatgaatcatgatcacataaacatatcatatttttttccaaaactttgaccatgtctcaaaattgttgttggaacttggaagtgtcattaatcctatgtttggtattgaaggaaaagttaaaggaaagaaattttagaagagaaaatgggaagaaaagagttggaaaaggaaaagttttataattgtatagaaatatgaaattactaaattgtcatttcttacacaaaatttatattattaacttgagggtacaatagtaattttacaatacttacattccaaacaactatgaaggaaatatactctctctatctctccaattttctttcctctataccaaatcttcaactttttcattttacattacatcaacccaaattgcatctataattattgctgtttttcacatagttgtttgaacaataaacctttctcttaggcctttaaaatagattaacaactgatctctatcaggaaagttgtctctgatttgtggaacatctctaaaattcttgatccaagccattaacataggaaagctttgaggctctaagagcttcacaccaagtgcttcttccatcccttcaagccaaccagatatccatcccaaggccaaatctgccatccctactttctcacctcctaagaattttctactctccccaacaccatattcttcaatcactttcaacacttttttcgcttctttcgtcgccttctcttgttcttcccccacactttgaaagaaggcaaaaaagattggttcctacataacccgatatggaaattattataaactattatgcaccaaaatattacactaattataatcttttgttaccttttcgtctatgaactttgtccaaaaccgagccttagccttctcataaggatcatcatttaaaatcaatggattgtgtggccaagtctcttcaatgtactcaagtataacagttgattctgatattggttttccattatgaactaacactggaatcttcttgtgaattgggttataatgtaaaagaagatcactcttgttgaagagatcttcttctacatattcataatcaataccctttagttttagagcccatataattctgtaacaaaatgggctaggccaagctccaagtagcttcacttcttccatttcttagccccaattggttaatgaaattgtcttaatttggttggtatttatagggaaactactcattatcaaaggccacatttaaatataatcttgttattgactatacatgcactctaaattcaaatcaaaagataaggtttttctttaataaaaaaaaaatagaagctatcttcttgagttgttgactaagaaatagaatattgctaaggatacttttatggtgttatgaaatatagtgcaatttaataatgatttttatgttttctaattaaaatgcatcaatctaaaggtgcaacatatcattggtagtactagtaggtcatttaattgaagatgttagatttttttttctcttaaatagcttgattttgctcgataagtgcgaaatctgcaaataatagattatgtccaatttattaatgaaaattttattaacctttcaaaaaaaattaaccaattaattcattttctttaaagcaatatcatatcctttaaaatagatattgcactaataattctactattattagtgaataataattgaataattctttcttagaggacataattttcatggacatagtgaatcttgcttagactgccttaatagtagtcttctttacatttttcatttcactcatagtatgggaaagaaatagactgtaaaagtattactcattaagtttaagaataaaactctttcaattttttttataaatcattttgttaggcaaagcctttattatttttta

SEQ ID NO: 185249 - DNA, 5357 bp, Cannabis indica
ttgtagttatagtaaatgatgccatttatgacagcaagtgtgcaaatcatctgatgtgtagaaacatttctcattggctactaatacttaatgttgtaggtttccaaacacatgaatcatttgctaaaagctcccttctgtgtacatccaaaaacaggtaagtgtctgcttgtaaacctgagtgttgtgcatcttcaaccactctatgtttaagcctttttttgttttaaaagattgacactcaactgtctggatcttcttaaagctgctaaattgctatgtaatgttgctaaattgctatgtgtgactttctgctgtaggtcgtgtttgtgttccaattgatccaagccaatgcgaggaatttgatcctaccacagtaccaactctttcccaggtaatgctcactattatttatttattgtccaaaatctttattaatgttagagcattttttttccgtcattattatttgtcagtctcattcttttgttaatttccggaaactggtttacagaaaaccttttcacgggtgccttttttctctttttttcgattcaatgttttgcttcaatttgctacccttatgtaagaacgatattttactgattaccgattgtgcaattgatacatggtctcgtgatttggatactttcttatataatttgttgtcttttgcagcttttggaagaacttaacattggagggatgaaagcagatgctgataacggtatgtatatacaactcgtaatattatcttttctccattaagatttacagaggcagagtgtgagagattatagttagcatataaaataccagaacacacaaaaagtggcatgatgatgacgtgaacttcttttgtaccgaactctcaccccaaataaccgaagctgaaccatttaaatacccaagaattttagtccattcttcatccaagttgggcaaagtatttctgcgtatcattcaaactatgaccccaatttagggtcactccctttcccttaggatagctgttctttttgcaacttgggtcaataaataatgtaggctgatattggagatttgttttcctttccatatatttgcacaaatattttttcttaatttaccctactcttatttttcacctgcagattgggataggacttcacttggaaaatcaatcagatttttcagaacttcatttctccagcctctactaaaatcctgcaaggtatatgacgtcctatttcttgttcctctaatttttttagcagataactatctatctcttatgcctaccagttttattgctttgctgccaaaccatcaaattttcaagaaaaacacttggtttctattcaaatgtacaatgaattgatgtgtttcgaaatttcgcaggaggatattgaaaattcatacagcgcaaaacttcagcattcaaagaactcgattagttggtagcaccttcctaattattttaacatgatggtctccatttctcggaggccataggcgcttttgttgtaatgttatttcaagaaacttgtctttcatttcagtgactgattattgtatattcctcataccactctttccaattcatatactatggtatattctgcttttaagaggtgtaatggctttaaattataatgcttaaacaacccatgtgaaatcttgattgtgtaatagcttaaaattatatgcttatcctgtgtttgagagatataatgtggcttaaatgtagaggccattttgggttgttgattgactctatcttttgaattgtgatttgggtcataacgtgtcactttgaaattttaagttgagattcacaagtcatataaatcattacagacctttttgtttacactagccaatttaataacagattaaatgtttgacggaatttctggtaatgacaaatgcatcactttcacatatttttattattgtcattttacaggtttcaggcaaaaggaccacaagttcgctttcacaaggcaaggcttttattttttacttagccaactactcttttaaactagtgatgttaatataatttgtaatcttaaggtcctaaattccaaccaatttggatcaaaccatttaagattagacgaaatgaatctggtgtcaatagtttggtcaatttgaaaattctttggttcggtcacggttttaaaattttcgtccgtggttcaaatcaaaccaaaccgcctaattctttatatatagttaatatgattaatttttttaattgaatattgacatttaagaacgattttaggtataatattgataattactttaacattgtgttaagcatattttgtttcattattatgtattataatttacgtgattgatttggtttagtttgaacatttaattgttttgttcgactttgaattttagaaaatcaacattactgatttggctcgaaaaaaatggaaattcagaacaaaccaaaccataaaaactccctattttaaacttgagcttaggagaaaaaaaacaataatcaaatacatgaaattactcagaattattatttcaaatagaagaaatataaatatttaaaaggccatagacttatttatgttattagcaattgacactaaggccatagacttatttatgtgattagcaattgacactaaggccattcttaatgccttcgtacaaaatgaggcacagcaataacttcactagttcactaattaaatagtctaaaaaagcaacaaaaaatttcagttcaacaccaaaaacctagcctttacaatttaataaaactctaaaaataaacataaaacaacaaaaaaggagaaaaaagaaaaagaaaaacaagagcataagctttcactaatttttctttttaagagaaagaaagaaactcagttctcaattagcaagaacttcccagatcaattcaggatcgaaagagggaattcgagcaagagaacagtcttcaaacatggaattctctgacactgaaacaggacattgagttaaaacagaggaaggtgaattctcacacttccaaaatccatcttcagacacagctggagaaactatctcctgatccaaattatccccaaaaaacagaggcgaaaatgaagaataagatgaatcaaatgttgttgctgtagctttagaacaatcacttcctttactatcctcaccagaaaaatcatgctctgtagtagtactgctgctcctgctgctgttgttagtcttatttttcatcttcttcatcattgatttcttagctttgtttttcttcactttctgacaaatagcttgaatctttgcatcaactgagttcttcagagtattcagcttagtccaatcttcaaatcccaaaattcttgggtccttaagattgggaaaattgagtctagcatactcacctctgagcttatatgcagccctatcataagcataggctgcagcctcggctgtttcgtaagtgcctaaccagactctcattctattctgaggaagtctaatctcagctacccatttcccccaatgcctctgtctaactcctctgtaaagctttttcttgaaaggaacagccatgaaatttgacacatggactgaatcttgaattgggttggtctggtaaaagctagaataggcattgaagttggccttgtttcctgagctgaacttttgaacaaggtctctttgtctatggtagactgaggaacctagtggctcgaaaatcgggttggcggtggccgcggttgccgtcgagcaagatggggttgtggtggtggtggtgccacagcagtgtgagaaaatggaatctaaggtgtttgttccacctgctaatatgagatttgatagagatgatctgatttccataccttcactaaatgataaagctgaatgattatcaagcattctgtccatgattatagccacttctttaactttattttccaggaaaattggagttaaaaaaaaaaaagaaaaggaatcaagagttgaattaaacaaaagggcaataaaaaattcaaacccccctttcccaaaaggttggagaattttagattataaaatgaaaatccaccaaaaggggggacttggatttgaatgaacaaaaggaaaagaaagcaaaagttgtgaactttcaaaaacagagtgataccctttagtaatttgaggaagaagataaggaagagcttttggtttatgaggaaaaagagagagagagaaaggaaaagaaaatattttgttgttgggaaaaagattttgattttacactgtgattgaagactgagttttggtttcttaagccatatatgtgtatttatagctgtagtggtttgtgcttttcatgaacttttttttaacctttctatctgtgcgccacaccaaaaagttcttacttgtttgacattttggtccaccttgcacagctatttattcaatgaccaaattgccatcatgaaaaatttaggtattatgtttatttatttacttatttcatttttgcactgataatctaatagtaaaattttggaatttttgaggaaggaaaatagaaatgaagtgattgatttttgtcaaaaccatggatagatttgattaataaattatgcttataattagatagataaactaaggtatgattatgaataatagtgataaatcacatttatttttctaatagaatttgctaatagattgaaaatcaattgagacatgccttttactttagctacgatctaagaaagaataagcagctctcgctaaattattggtagttttgttcgcaaatctcaaatcttttgacaaaggcaattgagacattgttaagaacaaccaacccaaaagaaggctccatttgtatcaaaccacacatagaatcgatgaacaattgaccatcgaactctaacaccattctttgtaattacgatccaacttagaacttccttgacatcaataatttcagcaaggttccattgtgctcttatcataattgtcattctcaccaagtccaatattgttaattatcatattttaaatgaaataatatattaaaaaaaaaagaaacaatgttgcttcatattattgttttgttgaaggtgtttattgtaaattgaaatatgttgttctagaagaaagaaaagaaaactgttaatgtgtgaactgagtaatagtaaactaaaaagaaaagattgaattgaagctgggtttggtgtggtcccataaaagtgaagacagtactgcataagcccaaaaagctactttttttattaattagagaaagacagtcaactttttgtatttaaagtctacaccaacaattacttcatcagggccacgcgtctactttcccatcatcattattattgttatta

SEQ ID NO: 185250 - DNA, 4751 bp, Cannabis indica
gtaaaggcttatcaaagtgttaaacccactcaaaatttgtttctttcggcagacaagcaaagcaacaagacaatccggtgtatcaggtgcaacagagagcaaggagcacacttcatgtgagtacggaagaatgaaaagaagtcttgcccaaatcgtttttgaacccggaattttgatcaccccagagcattctctctgctttaagtacgttacaaaatcctgaaactgcagaaacaatgttgtaagtcctatgtactgaatagacccaagaggggtagctcaaatggttaggcatgtttttgctctcacaaggtctgaggtttgagtttttcctcagtacttacatagcaattacaatagttcctggcctccaaatattgtgggattagacagggaccctagtttcagaaaaagaaaaaaaaatctaaactcttagagatgcaacctcaacatctacatttcaatcaagttttctactaacaatacataaagctcacaaacaaccttgataaaaaggtctacacaatagtattatccgaagaaggtaaatgaaaaggctaaaaattgatagagggtcgggaattttgactttattgggagttaggacattgcattattcaagctactctgtctaacaaagactaatatgtcgaaacaaggtgtagacaaaataattaacaacttttttaaagtttgaacagtttgcaacgcttcatattagtaatcatttaatgactacacagcaactgtggtaagatttcgtcactacaagtacaatattagctaaaatccaagaaaagaagagtggtaaagtaattactaccaaacactaatgaacaaaatgagtagaataacttacgcctttatggtcactggaagaagatgggacaaggatacaaacttccctctgcattatgttaaaaaattaaacattaaaatcatattataacagggaagggaacggggttgaaaatacagatcctcactttatgtggtgggctactagtaaacgtagacttcacatgtcgaaagtctgtgcgtttagtcatatctaatttcactggccacctgcaccaaattacccaggacaccgtattttccaattaaaataataggaaaaactagagattgataaacataaattgggtaggtgtatgactgaaaaaatgaataaaacataaatgttcttactctgcaggttcagacaaggcattggaatatttacaaacttctgaattgactctcagtgcataaatcgtgcaataatgaaccccactcttacataatgttccctgccactggtactgaggaccatgtccaggactttctgcctgtgatgattctgcaacaggtggaggcggaggtggaggagaagtgggtggtggaggtggtggagatggaggcaaaggaggtgggacttctggtggaggtggtggcaaggatgttatgggtggtggtggtcctaggggcaatgatgagtacatttgatcaaagtgctgcactagagttccctgtatttgagccagtggagtcacagaagccggtcgaaaaggagccgtaactgcattaccatgactcacatttggtactacaactggtgttggattcatgggaaaattatgatgcaaaccccgtgggtcccaagaagtatttgaatgatggtaagcaggccgcatatatggagatgaatgaatttgtggaggaggtgggacgggtggtccttgtgttgctacacgtacacatggaccactccctgctgcaggaagaagctccatgtcaggttttgggtacatccacctttgctccaaggcaccagaaacagcatgactacctagagggggaaaatacagttaccatccaataactttataagaacttataagaaaaaagaaaagctgctctaaaggaaaacaaaaactggtttgggggctgtgggataatattatgaacctcgacaaaagtctcacctccttgtgatgaatccaataccatgtttatgtcactgccatcacctattctagacaccaacttcaggcatctcattacagccagaaatacctctattagaaataaatgcatgtccaccttgtgatactgacccatgattctcagattttactctgggcgaaataagctccatagggtgggcctcgggtcttactgaaaaagaagttggaaggtgcattctctgttcgctgcccaaacaacatggcatatacattgtaaggcaacaaactttagctatcataaggaccatttcatgattaaaaataagcatactagcagtcaggatttcatagttcaaacaaaaataaaaacataacatcaccatttattgtttatatagacttctacagtttctcatagacttggagcaaaaaaaaacaaagaaattgaaaaagagaaatttatgtagcaattgacatgaataaattaacttgcatcacaaaacaaacgggatcatatttactacataacgaaaagatgactaaaacaaacctgaattctatctgaaaaaatattccaggacaaccacgcagattcttcagaacagtgactgcagcatctacactgctgcattctacataccaaccacatccactaggcaaatttgtgtgcattagccttattatagatccagtattggcaattgcactattacaaagagccatgatctcatcatcggtaaggaatggagaagttatattcggaacattgatccaaagggtgcttgattgtactctgtcttcttctcgcatgttagcatgagaacttccagatgtataattgtcagagtagcttgaattttgattgacattatatttcgaccgtaatgacaacatcaaggaagttagattagatgtccttcccctacaattatcagcagggctctccagcacagcctttgcaagtgatgaatttgtattattgttatacatgtttccagaattgctgtttctgacatcagcatgtgtagacgcagacacagatattgcacaatccaaatgagacgatgtaacattacattgtcctctatttgaaggatgcttttggttacttctttcctttcgatgctgcctgagatgcgccattacagtagtagcttcctcaggtgtctcaagttccatcagcaatgcaccttcactcttaagatcagtgatcataggacctttgtaaagtactttccttgattcatgcaggatctcatccttcgaccactggctagaaacatttccaacgtaaacatgacaactagaaccaacagcgacgccatttataacacccctagtacccaaaccagtatccataaattttatatgccagtggaaatgcctacgcaaataatctcgagcctttatggagtcgaaaatgttccgatactcaaccacacaaaagcctctcattgggaatgaaaaatattgttcaatggggccaaacctctccaactcaaatcttacatgagcttcagaagaatcagatcctaagagacccacccatagctgtttagaagcagagaaaacatccatggctgcaatatctccatcagataaccaaacaactggaatagcagaggaagtgtaaagtcctggcatgttatgattaggagatgaaaacgaattacttgcacctccactagaagtccccaaggtaggtgaccaaaaatccagttttgttgtttgactcctatcattgtttataacttggtttctagcatcaaatgaattagtcctaaagtcatgtggggttcttgtgataggtgaatgcatatggtgatttattaagtccctgggtatagaagatcgagtttgcatgatgtctccatgttctccattcccaaagtccattggtcttatgccaccactatcttgattaatagatttcaaatggacagctaattcacctcgatgattcaaaaattggactttttcagtaacatgttcatcacaggatccaccacaaattcttgaattcctatttagtcctgatagttcaccaaaattttcatgctgattagtgatacaaggcaccatgtatgataggttgatggatttagatgaatcagaatcatcaacatcactatctgcttgactgtcctctgtaactgctcttttaacaaatgattcaatgataccttccatgacatacttaatatctgaaaaggttttggaagatgacattttacatagcttcttatactttgagagcaggcatcgtcggagggatgaatcttcaacaagtacctgagatttaattcatagagcctatatgagagcgaaggtaacaaacttaatgacagaaaagctatactgttttcagatacaatcaccacgacaaatagcggtgcagtagcatacatttgagctgtacactaacaatataaagcacatcaacatcatggctaggccgaacaaaaatgtgtatatgtgactagtttaaatttgtagtgtatacaactgtacactaacaatgtaaagcacattaggtgctgcatggtcagaaaaataaattttaagtaattcaagaccaggtactccacaaaaaacaaaacacagaacagaacagttggaccaaatctgtaacccaaccctcaccccttactgccccgcccccaaaataaataaaagagaatgatagaagaagtaaagaacatatcttacaattcagacaaacataagaaaaaaataccgagggttaattattaaagacagaagacaaccataaaataataccagtgccaagaagcagctgtt

SEQ ID NO: 185251 - DNA, 1131 bp, Cannabis indica
aaaaaagaaaaataaaataaaaacagagcggtttccggttttcatttaggtgagagaagaatacagggaaaagccacttctatgctcaaatacaatgcatgtgggttatacttgggtgtatgctagtgcaccctaacctcattgcttcttctgataaaacctcccactacaacaacacccacccttcattccttattttcttcatcaccaaaacttttttttttttatttttaactttttttttgccctatctaatagggtttctatgaacttgtagacttaatctttctcatgcatccctgccttgaatcgatatcaatcgcattgatttccttaatcttcttcggttctctcttttttgccttctttggagggttcttcggtggaagtctctgccctttttacctttcggggttttttgagcactactcatgtcgaagatctttgctttcaccggtaagtcctcaattgctacatctatttatgatttatttcatgttttttttggcttagtatcttctgattataaccacatgttattgttttgggggagttttgatgatatttaatgggttggattttattttgttttatttttgctttatttgtaaatgattcttgaaagaaatttgacttagcagtttaatttctgaaatattgctatttaggtttaatagttcatgaattttggtggctaagaatattattactttgtttgatgagctgggatttgatatgttctttggatgttgttatgaatttctaggtttgagcttcagtctgagtgcttttaaattttaaaatgaactttttgtctgatttattttaggggtattatttgatcatgactttcatatttttgttatgaaataaatgactatatgagcaccgtcgatctcaatattgtttttgtcagatattctgagtaggttgtttgtgatctgtggatattatctgtaaaagatgtgatttcaaaaaaaaaacccctctaggggtggattgattccgtctgtttgttgttgctcctaataattttttgtgaaataatattaaattcttgttatggatcgtgtgaaagtttgttagagtaagctaattctggttttgatttatcaggtaacgatgactttt

SEQ ID NO: 185252 - DNA, 1518 bp, Cannabis indica
ttttgtttttttttttgaagcaactcatgttggaactttaaatgcagaggcttgtagagattatttaagcaatggctaaatcaagaacacaatattcaagtcaagattcatcattgtcgcctacttctgtaagatcgagggaatgggaggggccagcaagatggactgaatatttgggtccagaaatgacacccaagagctctaggagtaccagtcatgatgcccaggttcagagctccgttgggtcacataagggtttgaatatgcaatgggtagttcaacttacagaagttgctaaaggtcttatggctaaaatgtataggctaaatcaaatactggactacccagatcccgttggccatgtgttttcagaagcattttggaaagcaggcgtgttcccaaaccatccaagactttgtgtattgctctcaaagaagttccctgaacattttagcaaattacaacttgaacgtgtaagaattgtttatttttcatttgaatgctggatattttgtgtggcagcacgtgaagtgggtttttgaactttattaactagtgaggatactggttccaggttgacaagtttgctttggatgctttacatgatagtgcagaacatcatttgcagagtttggaaccatggattcaggtactacatgggttgtatacttccttttcttattttatgttttacactagatatcaatttgtcactgtttaactaagctcggaccgaattctgtgtgatctttatgtttatgaagttttagtcatagtgtttaagatgatttggacaaaattataaaagagaggattgccaattgttttaccctctctttttctccctctcaatggttttaatgttatgtttattggtttggaaatgttattgaattgttacaacttacaaatggctgtgattaatccaggagttgtattcctttcaaggattcaagtgtgaactttgctattggactatgaaaatccattagacttcacttcctactattatgttgaaattttttattcagcttatttttataaaattttgacatcaaattaactatgattaatatatgtatatatatgccttttaatgaatcagcttcttcttgacctgatggcttttcgagaacaagctttgaggcttatattggatttgagcagtactgttattactttgctggtgagtctcaatttctcttcttttgctagtttgatgttataattaaaatgttgaaacttgaatcaggtagtaattctttaacagactcaagtctgaaacgttttatgctcaagagagttacctctatacatggaaatcatgagtttgaaaaatagtgatgcacatcgttgcaaaggtggagcgtttgttaaaggcaaattgaagaaccttaacaataacaaatggaaatatgataaaagtttacactgaagcaaataaaaaaaacttattgattaacactttagttgctgctactatatattgcatttcgtgtaatagaaatagatgtatct

SEQ ID NO: 185253 - DNA, 2604 bp, Cannabis indica
ggtctaccatatgtggactagtgctttaaagttacttttatgttattaacttaatcctttactatgttacatttcatcaagtgtgacaatttgccttgactccaatgctgaccgctgttttcccttctgttctgtggatgcaatctagagatgcttcccgtgcatttgtttcaggaaacttttcaggtaagaatgtcagttgctattgttaattgtgaaccacaaaagtttgatgcttgtaggtgtactctattattgttcgagtcatggttttcaactttttatttctgtagatttagaagtcttgtagcaagttggtatagaaatcaaaaaagctagagtcactctaaatcatactagtaaaatattcttgaggccattagtaaattagccctgattttgtagatttttttttctttttcagatatgacttcataacagagtctcaggactaaccaagcctctgcttattgtttttcattatcctatattcatttcataaaattaaaacatgtacgcatatacgaatagaagaatattatccactagagatcattgcacctaatctaacaggatgcagacgccccaacgcttaatgaaaacagcacacttagtaactagcatcttcatcttttggtgcactatcttgatgtttgattattacttccttgatttgtttctttgttattaatgcaggagatggactcacagactcactacgtggtctatccagcaccgaggtaataattttttcattggttatactgagggctcctctactgttacccagctgtcctctcccaaacaccggctatggaaaataagagaaaaaaaggggtaactagcaaaactaagaaagagtgaatgattatgaattagtgctgcatatattatacacttctcgaatatgaaatacctccccatagggttgctaatatatcttttaaatgtctctcacaatggtcagaaactcctatcttgttccattttcttgccttgaagatccccctattaaatattttcatgccgcgtgtatttacttcaacaatgggtggagcagccacatgggccacattattttaccatgataaaatcttactttgatcaacttcacacagaaccacagctttttttttttttttgcataaatagtatggaactagtgtaggagagaaggcatgaagtatcattgtgttgaattgaagttttggaagggagtaattacaaataatttcttagtgtgaggccttccaataatttgccatcttcagtccacattgctgttggattctacagagattcatttttgtccccttgctctataaacgtagtgtataatttatgacaaaccattgtctctgtatattgaatcagttgtgttagactgttagttgcagagtatgaactatgttgttttgaatccactcattgtttttattaggttaaaagcattgtagattggagggatttctactctagaagttacacgtgagttcgattcatatttcttttgagatattctgctttgttaaaagtgcattgatattatttgaatgaagaaactatgtgatattaactgttcttgattcctatttttcagatttgttggtaagctagtgggtcggtactacgatagcaaaggaaatcctacaaaatatttgaaaggagcagaagcaaaggccgcaagaggtgcacagcttttggagaaacagaagattgaagaagcccagcaacctggctgcaattcaagatggagtcaagacgagggtggagaggtatacattataatataagtcactgaactctcaaaattagaattcagattctcatgaacaacagatttatctattcacctaatcatacaaaagatagagatttgatttttcatttgagaaagagacataaaatagactgttcattttggtcttgcaaccattttcattgtgatttcataggtttaaaatctttgtttaggtctggtgtgatgttggctacccaagattagttcagaggcccatagaaatcgccttgacgggtaaaatgagcaagagatgtgcttgctttaacaaagaggaactggatcaacctggattagaagtatacgatggttgtgattaccttggcaagacttgccgagtttgaaaaaaggtcaatgcaatcattcacattcatattacagttcttccttctgttcttgatccaagttttggatatttgaattcattctttttttttcttttcctcttccatagatatggcactttagcataggtaattaaatgaaattcaagcttcatgcttgattaatggcaaagtatttttgagttaggcacttctatttcatttctcttttgattattttattagggtttatgccttaagaaacctataaaaatatttttaattataaatattagttgaatattttgatatatgtttgaatgttaaattattaatatttaatattaaataatttatatataaatatcgaaaaattctgtatccatatacgaggttgttacttgtattgtacggagaattaagatcacttagccattaataaaatagtgagtaacatattaaagttattgttatccgtgtttc

SEQ ID NO: 185254 - DNA, 7249 bp, Cannabis indica
taatggtgtaacatcaccgccttgctattattttgatagtagggttagttttgtttatggtgataatagtcttgtttctcattgggtcactagcttagtaggtggcatgactattcttctaggtgttgggcaattctcatatttttattaaccagatactttgtggttatattcttcatcagaattgctataagcatggttagttttgctatttctatttattttaagttgaataatggagttgcattaccgaatttttattggaagatcttcagctgatagtcattgataggtgtaatttgtcatatattcattcatgttaaaggctaacattctttgcactcctttaatgcttcactgttgtcagcttatcagtcttttaattgaatgtggtgttcaggttttctttgttaatgacgtggttagcatatttttgttaattatgctcttgagtgatatcactatgttcaatttaccttttgacagaaatcctcatttttctattttatcttagtgtaaatgcaatatttctggttactcaaagttttattttttccttaaggtgaagaacaaatcaattgtgttgactgtcgatcatttcaaataaaataggattttcttgctaagaaatgctaaagggcacccaaggtgtctagtacccttgtgatgtgtaatactgttattggtgcaaatcaatatattaggtcccacatattttgctttaataaatattatagagaaccgctaaccaattataaggtaccacctcatagtggtgctagatatcttgatgcctcaagtaatatgacagtaactttactacctaaacttaatccaattgacctctatcaaaaaatcaatcctacaatgttcctctcctaatcttaataaatcgaagagttgttgtacatggaatgttgagctcttgagcatgttgaatgtttagtctaattaacgggttcaaaagctcttagccataccaaaaattttggtcgggagtagtaacacgccaaggtaccaaactaatctcgaagcaaatactttaaaactataccaattcgctatgtaactttggatatccttctcattatcgaactcatgaaaggcattttgtaatttccccccacaaccaaattccgtatgacaaaaagtgcaaacttcaagttgatatctagactactcttatatggcagaaggtccaattttgcacaagaagagagtttgtttgaatatctttcttaaatctatgtagaaagtgggaaaagcttttatgacagtcaaagtcccatgattcgtaaatggaaaaattgggtaagttatgcaattttacatcgtctgagaaatgtcaagtgtaataattctaagactgtgtaaatataggactacacaattgaaaatagcttaaatggattgatgtgtactacttatgccaacaacatacatcttttcaatagtccttcacttaagaacttcaaaattaagtgtgtttgacctagattactcttagaataagtagcctcctaggaagttttcctaaaaagcgtacaagtgaggacaaaagttgttttccagagaattattattctaggaaacaaccaaagtgatgtacccgtgtatactatgtaaaggatctatacaagtgaagcgagagcattacaatttttgctttaagtttagctctagctgtggaagttctgtttttttaggtttttcctactttaatttgtaatttttgttttatgctttttcttattatttcggtttccccaagttgtctttaaaaaggaaaagaagatatcttgactattcttggtgtgtaattgattatcttccaactccattctttctccctatgtcgaagaaccaactctgtaaatgggccattttttttaacaatgcccatgcagagttactaaaccctatccaacacgtcaatctcatccatagcaacacccattgttgctagaatcttgatccccttcgagatcaacaaagttgcaagtgaaacaagtgtgaccaacatgttatcctctttcgaataaaatggaccacaaagcactaactcgttaatgaggacacaagtcctgggaaaataggggttccacttgctgatctcaaaattggaggtgtggatatgaaaatctcgccccaaacacttagacccacgtttccttaggttcattaggctggcttttgaaccatgcaatatcaatcaggcctctcgtgttgattcgttagtgtagcttgatcattgaaccttgccccaaacatttagtacgtgagtctttagttgccatctagctatagaaggtagttctaatttttgcaaagaactcgatctcactgtcattgagtttgtggttgccatattcatgggattgtgcgccactttttctttagccttgactaaagatggaaaaggatgtctctgttgtatattcttgaacttctttaagtcacttgatgagccttatattcagtttgtttacaaaagaaggaaagtcaacaaaggccaagtataagttagtcttggaaagttttacttttcattgtatagttgtcttaattgttttgagacaggtgttcagtggttattagaatttaattaggttgttgatgtggcaagttctatgctctataaatagagtaagagaactcggcagtaggtatgttttgagagaataaaattgtcttgagaggtcataggagagaaaaaatctcccaaacagatttattgtataattcttaaagattcaataaaagttttctagtgggatttcatttttcttgtgtgtttcgaccgtataccaatttattcaagtgtcttgttgttcgtctccattttgtctactgctatgatagtctcctgctctgcagccattctcgttgtcatttacttggcaaccatggctctggtacggtttatctctaacctttcagagagtgaggaaaccatttgatgggccttaatcaaaacaacatatggcaatctatgatcttgaataatcgagccattatcatttctcattaggattgcaccttgaactttgtttgagtgattaaacctttagcgaaagcaaaacgaatgatgttggcttacaatgtggctcattctctatctttgttaattctgtcataaagtaccagccctcagcagtggtttcttcccatcaataggatacctagcactcttgtcccttctcgttattctagggtaggtatatttaatcaaaggcctatcaatccttccctcaaaactgattaacaatcatctttctattcatgttttcctagagaactaccacctctagttgttgtactacatcttattctaaccgttttctattttacctaattgtggatgtcaatcaatagcttgatctagcatatctaagagcataactatgaatcccgaaacccaatatactcaaccatttagctagaagcaacaaaggctagcttagaggaatggattaaaagtagaggtccaatattttgaccaagaacctccctgttgttttctttctggtgtggcaagtatgctgaccatataaaataataagcatagttttgcaactttccctcctttaatcttggtttccaagttaaaattgttgtttacttgccaattgccttaaacattgttttgccctggtatgagcaaggcagctgcagaactaaatcaccctgcattttatactttgttagtaatgtatgtcaatttcaaataggctaatattacactaaagtagtcagattgttctattcctaataagcctagcatttgaattgtttgtaataacatctagctggggtcagaaaggaaaatttaaatagatgtaccaataataatgtgcaactacttgtttacaaattgtatatattctataaccattcagagattggtagaacgaatgaacttacaaattttgtcgtacaaacgaaagcatacctgtattctttgtttcaatcgttatgcattctttgaaaactttgaaaccttgcagagaaacaaactgaaatacacccaatatgtacatgctatacaattcaactcatctgagaaatactaagtagaaaaggctcaaataaataaaataccctttagctaagttgtacaaagattgctgaaatttaccataatttcattcccaaattctcaaacggataatagtacttatctggtgaaatttccttcttctttgacagcatgaaaacaataattgaccgatacaacaaagcgaaagaggatcatcatcaaccagggaacccaacatctgaagtgaaggtatcatccagttcttgtcatttttgttttggcttttttcttctaagcatgtttgagaagttagtgaaatgcttatcgattatttgttacataacaacttggtatacaagggatcaacatactgaaatccatgttcatttttgtagttaaatagcaatctagcaataccttaaatttcaagtacaagattattagctcttatttcacttttcatacaaaaggaatgcaatactttaaacttcaaaaacctatctcttatttctagtgtaacatttatgaaaaattccacttccaaggagtcattgcatttctctcgaaggcaaggaagatacaaaaatgtctgcagaagaacaggatgccaaacaaaattgagctttctattaagctattagatacagtagaacaacgatataagggtttcccattctctctcaaaattaagccttcgtttacaaatgcaattgaaactgcttaactatacagatcaccacttaataatttcctcatattacctgtttgcatctagtcaagacagattgcagccttgctttgtgttaaacgtaaataatgagaattgctaaaggacaacatcacattaacggtgttataccgttattagtacaatttaatatcagattttacatgttttaattttaaaaattaatgtaaaaaaactgctaaccactataaagcgctacctcatatggtgtcgggcaacttaagttgcctagcaatactcattaataatacatggtgggtgtatttctccaagtccaatagttgggtcttgctctgtgtcagacctaaatagtttcttcttgtttcatttgttttattatagaataaattaccaaaaactttcatttgataaaaaagtctatgctataaaaatgctagccaaatttcaaagaggttgatggcaaattagctctaattagagactacataaaacaaagagttaatcatgtgcactttagcaaactaacagcatggacaagtccttgacatttagctgctacaggtcatgttgcattgaaaaatgtgataaagattccatattgcctaccaacattataatctgctggactcctataattcaaatgctaaacattatatagcacattgtaagccatgacatgtctaatttagaagtcgaacgcagaataaaaaatgatgaataaagattcattttctcatagagaatatgacttctgcttaatatagaaaagatccaacaaaagtctctagtagctaaagaaaagaaaaaataaataacaaaacaggacaaatatattgagttccaatccgccaagaatcctaatcttctattagatattttgataatgtgattgcacctctaaagttgatttcaggggtcaaattcttactattgctaaagataatgaatttgacattgcaccgacagtaaatatttacatgaacagataaaacactttcattttgattaatattttcatgatggcatttcacattcaactagtaacaacttaaagggaaagtattgttctcaaaataagttgtttgtttatttttacaataccaatatgtattgcttattcttgtgataatattcatcaataatgtgtgttttgaatagttttggcaaagggaagcagcaatgttaaggcaacaattacaaagcttgcaagaaaatcaccggtatgtatagtcaattcattttaacatgagctatcgttcaagaaataaggatattagagaaaatacagcaaggagatgaaagactaaccattcgagactcgagagtttgaattatcttgttgccctactagctagttacaagctcaaatgaatcaaatttatcaattactggggctagctcagacactaccctaaaaatgttgctacactgtccttcacaaacaacaacacagctaatagattataactgtactaatttaaatttttaagaaggattgtcaacataaaaaataactttttagttacgtcctgacataattctttcaatcacttcagccctatcatgtgaaaattaaaatatagattagtcatctatgactacatattcattatctcaaagaacatgtatccagccacagatgtccaagattggctataaaaggttatgataaaatagtggtaaatcaagaaaacatttgttttatcttcaaaattaggtggattttatagtagttcttcacatattgataccaaacaccaataaggaaatccatgattgaggagctatttatttcaaacaaaaggctgtgatttcaattgttaaatatttgttcgtatgtttaaattgaatatcaaggatctatgtgtcctctacatgtagttccttgtaagataaagaaaaagaaaatcaaaactttctagttgctgaaatttcaatttaatgagattagatttgataaacttatacaatgtaatgatgaagagtcatcacagagtgaacaagcaacactcagaattaacagaagctatcactaagttcaatacaaaaggtaaccgattactctccaactcaacaatgaggcaggtatagttatttgttgagaattgtaaacgagagaaagaatgaattgaacatgcatttctcattactgattcaagagagttgaagctctttaaatacaagactaagctagtaagttaggactgacgcataacaaaatagttgataaatacagccatgtacaatctgttaataactgacagcttgcctaacattattacatcaatgccattagtgttacaaccaccacagtcccaataggctagccctgtgagaggaggatgcccaactgattatagaacattaactacacccatatgtagttgatgtgggattctaacaattacacataggcaacagtttaccagataaagatgataagcactattaactacaaacccagaaagagcaatagaatagaaataatgcacgtaacttgt

SEQ ID NO: 185255 - DNA, 1357 bp, Cannabis indica
agcacaattccatctcattacttgagaggattgccttatgaagattgctgggcattgtttatgagtcaagcatttgaaaataaagatgaacaagatattgatgttcatccaaatttgaagtccataggtgagaagattgtgaaaaggtgccaaggcttgccattggcagtaaaaagactaggaatcttattgcgttggagagctaaagaagatgaatggaaagacatattgaatagaaaaatacgggatcttccatatgaagaaagcgacattcttcaaagtctgcgatccagttatcatcaccttcctacacatctcaagcaatgctttgcattttgtgcagtgtttcctatgggacacgagtttgataaggactcgcttgttctgttgtggatggcggaaggttttcttcaacaaccaaaggggaagaaacgattggaagatgttggtcatgagtatttttgtgagcttgtatcaaggtcactttttgaacaagttgttgataataacaataatacatcatcaaaatttgtgatgcatagcctcttgaaggagttagctgattttgtttctggagaattttgttttcagctaaaggataaaacacaagatgatcatgggaacagaatttttgagaaggcacgctattcatcttattttcgtggtaaacgtgatgcattgacaagattcgaggctcttaatggagctgactgcttgcgtacattccttcctttggatccaatagaaagcattggagtaagctatttggctaacaatgttcctatttctttgttgccaaagttaagctttcttcgagtactctctttcaattcttgtcgaattactaaattgccagattcaataggcggtttaaggcatttgcgctacttagatctttcttacactgcaatcagagagttacctgagccaacaaatactctctacaatttacaaacattgaacttatcagaatgtcgctacctcaccaagctgccatcaaagatgggaaacttgaaatgcttaaggcatctttggatcaatggaagcagagtgggagaaatgccattgcaactaagcgaattgagggatcttcaaacattgtcaaattttgtggttggtaaagatagtggttcgggaattagagagttgcggaatatgaaacaacttcgagggtcactccaaatttcaggattgcagaacattgtcaattttgttgatgctgtggatgctaatatgaaggaaaaacaacaacttgatcaactggtgtttcagtggagtaatagctgtgatgattcattgattgagaaagatgaagaggaagttagatatgtgccacaacatcaacatgtaaacatgg

SEQ ID NO: 185256 - DNA, 2227 bp, Cannabis indica
ttagaaagttacaaaactacttaagaaattcgcttttatacaagatgatttaatacattctaatcaggtgaagaattagggaaaaaaaactaatttccattttaactctcaccatcatcatcatcatcacttctaacaatatcatcatccaaatcagaggagttactcattgtattggtctttatgttttgaagcatagtgatagcttccctagcatcagaaaccaaagcattttttgctgatctaacaacatccattttcatgacattgttctcctttccatcacctattttcaaagtggcatttttagcagctgctgcttttctcttagcatcccttgtgtgtaattgatcgatatacctctcatgtaagaatttgtttttgacctccttcagtactggggggctagcaagagctgtcaccttcgagccactaaatcttgatagaagtggtatctttttgcctgaagtagatctctcactatatttctgaagtaatccttgtttacaattctttggggtggaaaatatatgattaggctggagagcttcactagataaatccaagttgggttcaagaactgaaaaaagatcagcatcatgatcttggttctgattataatgctctttcaataacttcctagcatttttctgtgtaatgcgagtcttctgattattacaacttcgctttttgagattcagatcgacgggtttaagcactttacttgcagagagctcaagagaatgaataggtgatacacttcgtcttttcttggccccgcgctgacgttgaggtggggttaaatggtcagcattgactttatcaaaacattcctgtgctgattttccaggcaccatttttgaaaccttcttccagaagtgcggtgttggctttgcagctaaataagctctttgcagtgccaattcttgatcctcattccacccattaacattctctttaccttgttcatctcgctttctcttcctaccagcattaacccctctacactcaccatcaccatcaccatctggttctttgaattgtcctgctgttgaactctttcctttcccagtgtgtaaatttgacgaaatgcggtcattatttcctttactcttctctgtctgatgatctttaaccactctacactcaccatctgattctttaacttgtctcttcgttgaccttttccctttgtccaacaagttctcacccgatttcactcttaaatgtcctttcccagtatgtaaaacctcctccttacccacccccttatctccgctagtcttctctgagcaattagaaagcctctgagatctcctattttgaaacctacccatgtcattattcttggaagattttataagcccagaacccaaatcctcacaactactatactcctcttttcccacagaatctttggtggaaattctgggagaccgtctgagattagagggtggttcggatccacaatttttgaacccattactgggtttacttagtttgttggaaatggtatctgaaaggtggaaagagcttaccaaaatatcgtggttcttgagaagtctagcagaccttcgaggggtcaaagatggcagaattttagtggcagagtctctcttggccattttgtcgaacacttagcgtcctgatttcataagttggagtgttagagggaaactattcaaatcaaacctaagacatattttgaatttaaaaatttaattatccacaaaatacaattactatactaaattcttggctcacaactattaagtatttttgtgttccgcataaaaattcattcttgaaaactaaacaatgagcccaaaaattgttaattaaactcaagtacaaaaatgtcgaagaaagaaaaaagagaattatacaaacaacattgtaagtatacataatataattatattgaaattcaaattgttacactgacaatgacattattacctggaaatccaattgatagctttctagtgttcaatcaccggcaacgtcgatgaaaggaaatgttttgggcatatgggtcagtggtgtttgtggagatgaatcgattttccaaggttggacatttgggtatgagtatctgtgggtactttcccctttaaggaaagggatgggacagagaatgtgattcccaatccctaatttggaattttattttaatttatctttcaaaaattaaataatataaccaaacaataaacttttcatgtaa

SEQ ID NO: 185257 - DNA, 2307 bp, Cannabis indica
aataaaattttagatctgaaacgtgtgaaattgaagtttagaccgttgcctatagaatagccgacggttgcgtcggtaattctcttttacaaatacacgagattttttaaggcacgtttaaaaactatcgcccatacctctcaacaatttaaaactttttcaggaataccttatttttctcgacaattttaaacactcgtttaatttttttagcaatggtttcctaaaagaagcatttttaaaaccgtcgtgaatgctccttttttgtagtagtggtggatgatactattttgattaatggtatgctaaagagcttatcaagtgtttgaccctgctttaattatgagaaatggtttgggcaagtttatagcaaatcaaatcctagtgtgcttttctccaagaatttggcccattgtccaaaaaaattctattttgaagtgccttgagatcaagcaatccaatagagagaaaacccacctaggaaattttgttttcaaaagaaggagggaattaccaaagcaaagtcttagagacaatatggcaaaatgattggaggattggaaatttaaactcttatcttatcacctttgttaaaatcagtagcctcttctttgcctatctaaagtctaaactatgtcaacgaacaaggttctccatttgtcggaatttggatgccttaatgaactcacactttacaattggaatagtctttagtgtcagtctttttaaaaaactgtatttaaccgagaccaaaagtttattttgtagtaatgcatcataaatctactatatattatatatatattggtcagatcatatcttgaatgacgatttgctttggaaattgatataacttaattaaactgtttccgatattagttaataattcgtggccgatcgagagaaacactacgcacgtgacgtgagataattaaatcccagaaatttacacagtaattaattaataataataatataattgaagtgtttcaatgcatatataattatattattataattataattattacacaacaatatcacttaattattggatctccagcactactttttgaaatctataataactaattaatatacgtacaattaccattacaaggaattaataataactagttttgttaattattattattattaagtcccatcatcatcaactcaaactcacgaaaatcaaccttaccatcgaaattcaagtcagcaactctcaacatattctctatatcattcatattccaaccacaatccaaacctaaacaatcgaaaaccctcttcaactcctctgcctcaatgaaaccattcccattctcatcaaagatctcaaaagcttgttgcaaaaggtggcgttgctttgagtagtccagttccatgatctcttctacgcctagcaccaccactgcttcaaccgccactacttcctcttcctcctcctcaacatcatcatcatcatcatcatcatcatcatcataatcataatcataatcataatcataatctccaggcaactcaaatgatgatgatgatgatctttgctgatgatgaccaatattattactattatcatgatgatctaattccacgtgatgatcgtgagcgccaactactacagcttcctcattcaaccttatcaaaccaagcttttcaacaacacttctcgccttttctttgtggattttcccgtcgttttgcatgccaaacactgtgatcagagctttagacattgaatcgttaacgactaccaccttcttttctttcccattatcaataataattgaattattatcgatttgatcttcatcttgatcttgatctgataaagatgatgatgatgatggtgatgatgatcttattcctccatgaatcacctgaaccaaatctcctattaatctagaccatgtctccgttatacccattatacaaattagcctatatatataatgtttttggagacgaaatatatatatatatatatactctaaggtgtttacgtaattaagattaataattagcaactacttttatagtgaattgcatgacataaatacccttggttctttcattaaatttcgtccatatgccattctaataatttgagttacatttatatattttataaagtttatatgatatttatatctaagattccgaagctggcaatttatcattttcaatgcctgtacatagggtggctagtgcaatgtactacatatattatgcatacatcactattatataatacatttaggtaaatactattttccaattgtaaaaattattaattggatt

SEQ ID NO: 185258 - DNA, 944 bp, Cannabis indica
agtaaaatatgaacccataaagaaaagctctagtctatttaattagtagtattttagaactcacatgtaaaatgcaatatttattgggatacagagtaaagtagacataagtcactgtccaattataaaataacgaacaatgcagctcaaactactaaaagccttaaagggaatccaaaataaaagggtcaacaaaagtaatactactcttattattatacgaaattaagtaatgatttaaaatattgcacataatgatgcagtagttttttctaactaatattaatgtttcgctaattagtggcttaaatttcatagtaaaatctttactgaaacctacactttcaaagtttggttatatctcgtgtgttacaaagtttgtgttttggtttgcttttaatatatcctagtcaaatttctctgtagatttttggatgaacttcaactactctctaattctaaagaaaaatagacataagaaatgaagctgtgaggaccccacgtaaaattatagagcactatagtaaagtgcactacctatatgttattattatataggccctgaaaatgtgatgaaatatggtaatcatcttaagccttgttgcatcattattcatgattaatgatcgatctataaatatacccactgctactgcaactcaactgacagaagaaatcatccaatcaatacaattatcaaagtgtggttcaatcacaccaaattgacagtctgtaaggaaggccgctttaaatgttatccgcaaaagccaaagaaaagaaaagagaagaaaagaaaattgaaagctaaagaagtttgagaatggagatttttaattttaaaccagtcaaggccatgccaggctccagctgtaccaattatatccaacggctcactgtactggaaataggcccacaaaataataccctctctctctcacgtgaaa

SEQ ID NO: 185259 - DNA, 2938 bp, Cannabis indica
cccatcatggaattgcagaggactgtgcaagaagcatcagttagaccaaatatcttcaacttgtagatacataaacaagtacgagaataagatgaaatacaacactcaactctaggaataagaaaacattgagatgacaaacagattttattagtaatctacagaaaaagcctgagggattggaatgaaaaataacctaagctccaaaatcagcatgatgatgtggattaaagaaggcctttacataaatcaacaaacggctcatcaagacctgctccaagctctaactacagtgtttgctgcaaaccctgctagaaagtattaccatctgttagcccaatctggtaacttatcatcatatacagatgagtggtttaacattaacaataaatgaagaccatttgttaagttgtaactagtacctgtgctattacgagcaaagctaggatggtgctcatatgacatagtattgacattaagttctactcaaacaaccgtggctgcctgctccacaagcccttcttgcagcttttgggaagatccatgcggctgattggtgtccttgtcacccaatgattcctcatatgctgctgcatgaacaccaagagcagcacggcctgatggatcgagattattggaccatgctgcatcccattcaacagctttagcagtactacatgccacacttggaccaccaggaactgttgatctggcagcattctgttgaaaaaaatggccagttgaatcagggctctagtaaaaatataaacaatgcttccgaaattggatattttaagtaaaaaagagcagtttagtatgaaaagtaagacattagcaatttagtaactaagaaaacaacacaagaaacaaaccagcctcccacctgacagcgagcataaaaattgttgatgaagagaaagtacatatccgttcaagaaaaaaaaaggaaagtattatctaaatatttcaccttgggaaagaacttctcgaatatagtcctgtaatagtatccttcttttgtggttggagtattctcgggataaatgaagcttgcttgaattagcatagcatctgttacctgatcaagggcaatcaaaagtaaagagtataaaatgcagtcaaaaagaagaagcatctgtttcttgttcaattcagagatagaaataagttggcttaaggtagtacaaataaaaagcaaattctaacaacacccaaacaaagcaaagtcttacttgtttgttggcatgatccttcaggccatcaatccaactgtaccctacaccatcactgaattgttccttctgtctgtacaaaatgtgctatgaccaaaaaaaaaaatcaaacttataagaaaaatgatttcctgaaaaagagatgataaacatcccttcaaaacaatgaaaacaagatatgtatgcaaaacaaagattgtgtataacttgatgagcacaacaatctgtgtgttgcaaaagcaacaagtacagaggtacacacctttggtaaatatggtttctgatcatcatcaaatgcgttacgtaaaacccacttctcgattctcccaagatcaggcctgatctgtagttatcaatgcatgaaagtgccaagtattacaaccatatatatttagtttaaattcatgaacatatgatgcaaaaagttacccaaagagaccacccctatgttatatattaggtctaagacatggataacgttgcttttgcttcaaatagttttaactttggatccaataaatatatacatatggatcatatatttatatttataagcttctctaagtggaaaaattataatataacttgatacacaaagtaaaagttcaccattttccattctggatcaatggccatggcaatgttgataaattctttgtccagaaagggtacacgagcctcaagcccccatgctgaagttgatttgttggctctcagacagtcataaagatgaagagccttgatctgatcaattgtccatgtaaccattaaaaatttcagaaactcaaagctaaggcagtatgacctaatccagcaaggttgaattgcaaggtcacatgccactaatcaagaaatgaaatatcaaggaaagaagggagacattggtcaagtacctttcgacatgtttcttggtgaaactcctccttgtccggggccttgtggaaatacagataacccccaaaaatttcatcggaaccttccccagagataaccattttcactcccaaagatttaatttttctagacataagaaacatgggagtgctagccctgatagttgtcacatcatacgtttcagtatgataaatgacttcttcaattgcatctatgccttcctgaattaggaacaaaggaaacaattctattatcttacatcttacagacttaaaatgcttgtagcaaccttagctttataagggatggatcacctgaacagtgaagtgaaactcatgatggcgagttccaagataatctgctacttcttgtgcagcttttagatcaggagagccctgaatacataataagtgaggcaaatgaatatacactaacatttagaaaggtaaaatggaaagaaaaagatggaacaattaaaatcaaaggatacaaattaatcgcagttttagaaatctttcaaatcaagctaactaaaatttgaaacatatgagtgaaatatggtcagagctcttcctttttgtttaaactattcatgtcagcgcatataaggagcaaatataattaataatagatttacgtattattaattattattatttgaaaaaagtgtcagtgcatataaggaacaaatataattaataatagatttacgtattattaattattattatttgaaaaaagtacgaatagtatttggttaccattttacaggatatcaaaaaaaatggcatagcacaagctggtacaaacac

SEQ ID NO: 185260 - DNA, 2086 bp, Cannabis indica
aaaaaaaaaaaaaagttttggctggaactaaatagttttacagctacaataatgatattgtcatattattatcttattaatcaaaagattaattattttatggttctccgagaaattcaaggatcattattagttatcaatttgctatgtaatatttatgctactgaattaggtaggttttttaagaaaaattactacacatactatttttctttaaatttatagtttggattattccaatagtttctatgtgagttgctatataaatttcggttatgattcaagttatttcgttagtcgctatgagagtttttatgtaaaatttcgtaatgcaaaaaaaaaaatgtgttgaagtataaaaatgaaaaaattcattttttttattaatgtagctgcctaatatagtgaatttgtattggttatgtcatttaatttacataaaaaattaattgaaaaaaaacaatttgtatttaaatcatattattatgtgaaatccaaatttccacccttagaaaaaaaaaaaaaatagaactactagcaaagtctatttattactctgaaaaagtctttacctaaagaaaacagtaacaaagaaatggtagctggaaattgattagcaatggtgtcaaaaatgaaagacataaataaataaaaagttcattttccttaattactctttaaaaatgtaaaatttttctgacttgagtactaatttgctactcaccttgtgtacctaattagttaggcaataactatttttctagtatcacctaagctttttagtagctatgattcccatattggaattatttggttcaaatcagttggaatttgtcgagaccacggattcatttggtccggttttaaatggattggttagtgtttcaaaccagtgtacgaatttcataaatgaagaatgcagagaaaacattcctattattattattattcagtttagatggccttttccacaacaaacagaaaaactaaacataacaattccaaaaggaaggtgttcaaatacccgaaactcatcatcatcagtaccctaatccaataccagattatacattttcggttcatcagtaaagatcatgttctttgtgggtgtgaatcacacaatccgaagtagggtacgaaacacatgtcagcaaaaacccttcacccaattgtttatcatcgagaaatgcaccatcagactgatcgacactgcctgattcgatcttccctgcacaggtagagcaagcccctgctctgcacgagtatggaagatcgatccctgcagtctcagcagcatctagtacgtagctgtcatctggagcctcgaactcgttcacattgccatctgggtcgattagcttaatcttgtacactgccattgatgatttgaacgaggtagatgatgcttttaacccgaaagacttggagatgttcttgacagagcctagggcaaatggagatttgacaatggcagtggcgagttggttctgaggggcagttttgatcatgcaatgtgaggggattcttgcagttgccgacatggttgacatatttgtacctaaattcacattacaaatttctatgaatcaaaaccgaaagcaagtaaaaaagagacaaactatttgttgcttctcatttcattttgttgctaagcaagatttaaacaagggacaaaccgagttcttatttatttcaatgcagtgatttggactggcaagtgttttaaaagtttagaagtgaattgttagcatccgaaatttcaaagaaacgacatcaaattatccatttcagaaacatgaaagcttattaatgtgtggagcactatgagaagaagcaagcataaggctgtttcgctcttcactcgaggctccatttcaaaaccactataggcctaaattgaagtgagaagctacaatcttctattcaatttccaaatttccaatagcaaatatttacaattcaatcaaagcatatcaaaataaaaggtagaaaatatattgtatgccttcgagacttattgaaatggcactaaaccatccatttcgaaaacaagaaagcttttgatgtgtggagcactatgagaaga

SEQ ID NO: 185261 - DNA, 2588 bp, Cannabis indica
cgtgggttatgccaaggttggtaccacaaatgatagttagcaaattaaatggtagcaagcgtaaaacaaagatttggagaacggccatactagcaacaatttgggctgtgtggttggaaaggaatgctcgaatttttgaaggggttgggatttcggaagaggacgtgtgggagaaagttaaattctggacagctacttggctttttaaaaccaagttttttgaagacttgtctttcttagatttatgtagagattggaattcattgctgtaggggagtcattcaagatctctactgtttttttcagcacctttgatgtgctaattttcctatttatttctttgtaatatggttttcctccgccataagtgaggcttcttaatataattttggaagggtcctgtagactgttggatcctttctcttttcaaaaaaaagatataataagatctgaaaatttttaagacttcttaaataaaaagcaaacagtaaataaaaggaattcaaaaatagagcacaatgttagaattacctccaaatagtcaggtctaactggaaggataccagaagcttgctcggaagagctgttagaaatcaaagcttgctttgccaaagctaaagcctacagcaacattagaatgagaatacacttgtgaacctgaagaacacatggatttatagttctttccaaattctaataatcatacggataaaactaaaccaagtatttcaaaaattaaaaatatccacaaaggcactcattgtaattataattaattaaaagtacaatgagaatcaaatcaatataggtaatggcaactataaaagggttggtattagttacactaaccaagtgttgaaatatttcatttctagcaacaaagtcagtctcacagttgagttcaataagagcagctctgttcccattctgcgccaatgccaacattccctctgtggcagtgcgagatgactttttcgatgccagtacctttcctcttttcctcaagtccttctgagcagcctctgcattgatggtcttggtcagccaattaagacaagaaaaataagcaaaaaaaaacattagccagaagaattcagaccaatgtcccaattgcactcaatgagagaagctttaacatctttaatgggagcactagtcctctccctgagttgcttgatgagactcatttggtcagcactagaagctcccacactgaatcttctgagggagatgacagagccagatgaataacaggcaggaattgagatcttggtttgtgtggattcatcacgagaacctcttttagtgaaagcccaagtagaaaacttatgccgagaagtggcaaaagtagtactagtactgccactactagtgaacaccctattatagagaatagggccaagagaacgtcttgcacctctgaggaaagccattgaaatgagccactcacctagttttatttttttacaaaagaaattaaaccagaaacaaagtcaatgacacccattagagcgaattgtggatcaaatgttgaaactctttccttgattgttctcttattaaataatttcaagcgaaaaaacatgaaaatagagaaaataatagaatacaaatgaaaagacaatacatcactaacctataaaataaatgcctatttaacaaaatgtcttgtggcttaacagagtctttttaaaactctgtcaattttaacagaaacctgtcaaatactaacaacaacgtgatgcaaccacttgggtagaactcactcccaaaagctagcctaaaaaaagagggtgcccaagtaattatataccaccaaccaatcccgtagttaatgtgggatcctaacataatgcagaagagatgcaaatgaaataaatcataattgttaacatcttctctaaacaggttattagttggtagctattcaatgaagtattgtccattttggttcaaaacttttctaaacagattaataattaataactatttaatgaagcattacctattttgcttctactattcaaatgctgaataaaatttgaaacaactacaaattatctctccaatcaacaacaacacaacattgttccacagtgcatgcaaaggtcacttatttgacactataaatacttaaaataactccagttcaaattgcttagaaacaccataaattagattttatttggagaaaagtttctcaatgtcaccaaacacttcctcaacatcaataccgttatttcacaaaatcccagaaagaattatcctagactcaaacatacctaaataaaacaagaattccccacaaggctcagaacactcatttacaaactattggccatgtaatgtctagagtggatatatacataaatttcttttctgaaagtgtaatcccattgaaccaaaatcacaaatttataaaagtttctttcgtttcaaacggagaaagatagaggacaaactcataaccatcccgattagaacaaaatctcgtatgattattacaacatattcatattattaacgtttaaaagaacgctataaggtctacatacatatagtatacacaatatctaaatcttataacc

SEQ ID NO: 185262 - DNA, 1224 bp, Cannabis indica
tttctgcataaccgaatcaatgtagtctacagcccaatgaatccagcttcccaaattagtttccttatgttgaaaaattctttggttcctttggttccaagccagccaactcagccccatgaaagtttcaaatctctctgttgtgcatttgctttccatatatatgaggaactccataaggtctgacatcaagccaagatctttagggaacaagtgccaaaaacctgtatctttccaaacaattttcatccgagggcagctccaaagcgcatggcctatggtttccacttggctccaacaacccgtacaagttctatcaagtttaatacctctcttaactaattcactcttcgtgggaatccagttatggcaaactctccaaacaaagttcttcattttcggagttaatttggagtgccacaccctcttccaccaattcttcaccattgatctattcgaagtttctgccccttttttctcagtttggatcaaggtgtaaccacttgctacagtataatcccctcttgttgtgtggtgccaaatgagtctatcttcgttaactcttctccacggttggatccccaatacccacggtatatcatctctatgcatcttttccacaatgtcctcttccttccacttaccatactcatcgatgagtgaattcacaagagtattgggaggcactaccgctggggttcttaggatgaaagggggtcctctcgggatccagcagtcctcattgattctaacttggtttcctttcgccatactccatctcattccctttactagtagttcacggccccataggatacctctccatacattagagcaccaagaaccaagccgagcctccatgaagttcgaatttgggaaataaagagccttcaaaatttgagcaaacaagctgtccgtatttgttactagtttccaaccttgttttgcgagcaatgattgattgaaatcttccaaatccctaaaccccatgcccccggcccacttatctctgcataatttctcccaatctccccaatggatttcatgcttcgctgtcgtagacccccaccagaaacgggctataagtgcttgaatctctctaattagacctttagttatcctaaagcaactcatgacataaaccgggatagcttggataattgacttaatcaatatctcgcgaccagcttgggagaataggcccatcttccaaccttggagttt

SEQ ID NO: 185263 - DNA, 1044 bp, Cannabis indica
aaaaaaaaaaaattacaatatgatgatgaatagatcaatctaataacaaagacagacaaaaaaaagttaatagagcaaagaacacctgagaatacaaatattgggcagcaggataatctcgaatgtacatacgatgaacatccgtaggaggaagaagcaggaaatgcttgcgtccagtcacaacagcatatagattttcgtaatggtccttgtggaatgatgtctcagacaaatgattaccaatccagagattaacagcctcagggaggcagccaagagcatccgatgcccaaggaatgttggcatcacaatcgggagatagcgctgagtactccaaccgaaagcaatcattttgttgctgagcataagcaacaaaattggaaccagtggagctgataaggcttagagcttccgggaaaggcatgtgttcaacatgagcagaggcaaaacagagagaatcattggccttagttaggggggcaagagcatcagctcggccattaggggtgaggtgtacagacaccaatggatcggaagaagacgagctggaaagggattttataagataggaatcattggaccagtttgaaagggctggccagtggttgatagcattagagattatacatggcttgttttgagagacaaagtcccttaggaattggattggggttggggtgagttcagacgctctacttcccctgaaagtccaaggctcagctctctcacttcttcccacaatgtttcaatctccattgtctgagaaacactagttgattcccttttctcctgattgggttttcaacaactatgttacatcgtcattataactacaaactagctaagcaagatactgaaattttcaaattcatgggttctaatttatattgactaaaattattcgcaactgaacatgaaaatcaaagtttgtgctcaaatttttaaactgaaattataatctcctgttgcagttagagaaagggaaaactttcaatgttaaaagcctaaaacttcacaaggtggtcgtctgtgtataaatcaaaa

SEQ ID NO: 185264 - DNA, 4510 bp, Cannabis indica
tgatcagatcccaaaccagtgccgtccgatcccgaacccgaaggtttcggtgcaatcggccggaatctaagcattattctgttcatcactgacttatcgtgcgcaccaccagcgcatcttatcatgctccacccctctggtccaccgttcatcctatcgtgcgccaccaaccctagggcaaatatacctagaaagctttattagctcccatacctgttttttttttctcttctctctttctctctcattcagagtctttttctttgagatggagcgttttgacgataatctaagtgagtgggaagtaagagagggacacgtggctacccgactataggccgggaacagcgacttgacccgattggtcagtattattaaaaaagaaaaagaaaaagaaattagatgataataggagagagtggggtggaatccggcgtaattgaactcagggtatggtcccacctatcaaccaatcagaagcgagaaggtgtccagcactgccgaaagaaggtgtacacgtgttctgacctcggacgtagcgtagtggaaagagcctttggaaaggttcgagatataataacacgtggttttattctattagcagagaacaactaaatcagtttcaaaacaaatgaggtaaaaaaccatcatcttctaagaaggagcgcgtgaaagacacggataaaggtagagatggccagcgttgggaattaacagagagtgaggacacgcgtggaagagcggaaaggaaatggctttattctttgaaattcctttatgtgattggtgggtgtgaaatgaggacgcgtggttggcctgtgactatgtggatcttggtctagatttttgatgtcatctgtgtgaaagtgaccttttttttttgtttggagcacaatgagtaatcctttaatcactgccacgtagcaatgttatccaatttttgttactgttgctaaatacctgaggatattagcgattagagtaaaaattatttaaacgttaataatgagagctcacactaatttttttttatctcatacatttatattataattttaaaaaaattctatttttttattattagagagagaaaaaaacctgctatttttaccactcgaaatatataactatacagtagcttaattacgatgtatgagttttatatcctacattctttaaatttttttcattgttttttttttttttttcattttattctttgtgaaatgatcgatatttcggactcattccatattctttctaatgtgaaaaaccaaagaattggaattaatttgactattgtacgattaaatattaatttgggtaatattattcattgtgattgtgatgatgtatgtgtaaagtaaatatgacacgcaaacgttaacatgtatatacagaattgaagattgagacaaaatgctttcactttcagacaacctatcgtacttagagagagagaaaaataaagcaaacatttttcatccttggttaaatatttttttgtttaattcatacgaaaaacattgacatagactttagttgactttgctattactgtgtctgtatgatgctttatttcgagagtgtgatgagtcgaaaaccataacttatttgaacaaaccatgtatatataaaagatttatataaagtccaataaaagagttttaatttgtgaaacattaatacatggtggcccacatcaattacaattaagtacctatctcagcctatttataattttgtttgataatttattttcatatataagatataaaaacatgactcaacatacaatgtatacacaaatatacatttatatatgtaataagtaagtgaactgagtttggctcattacaactcaagaatccgccaaattcaaggcacctaatttatcacatatatcaaatatttttctactttgttttttcttgaaacataatataatctagttaagatacgaattagatacaactttataattaagaattgacatatggggtctattatcatttatatataaagaataatcttggccattatgcactaacacatatatacggatacaattatacaagtcctgtactgttatcattcacacacacaagaccttataatttttaccaagctgcatttatatttacaaaccaatttttattctcttctataccttttatttatttgtttttctttttgggacctatgccaaaaatagaaaaacaaatgagtcatatcgtttgtgtgagagctataaataccctctttaaccttcaaatcatcatcatttgtgtttagtgagaaaaattattctggttttcacaagagtattataacacatatatatctaatacctacttacacatatattcatttcatataccatccatataatatttatagaaaattaaaaaaaaaattaatgtatacctgaaaataaagtcgacagctacaaagctcctttattctttaattttggtaaatcatcatcaaagtcccaaacccaaactgagagcagctttaacgtcgagcctccatgcaaaaccaccacaatccattctataaacatcacacggcattatcttagaacaaacctctttataattacaattatttgctctcttaaactgaaccctaactcgacacgtgaacgccgggcccattaggcccaattccgtcctactgatactgatactgttacgattattatcattattattttttatatatttattattattatttggtgctacgaccagccaaaccaccacctccggccaccacatctccgcctcctcctcttcctcaacaaccatctttttaaaagcaccgtttacccactccaccctgctaaagtgactgtccgtaacaaaaccgggacacgtgtccttctccaaattctttattctctccacgtccgtacaacctaaccctcgtacatccatgcacgtgtcggtcacgctctccaccgtcacccacgactccaccgccgccgcacccctccgatccaaaacctcatcgtcaccggccgcctttctagggttatagttattatcattcatcatcagcttattattatcgttattatcctgtacggccgtacagtacatccaagatccaggagcaccacaaccagtacccccgtttaaatctcgaccgtccgatttctccggcaacagctggagcgtgacggtggtggtggtctctgcttcttgtagtccagaagatccgttattattcgtaaccgttgatctcctagggtttttatcttttttattattaatatctcttcgaaccctaacgtactttcttttcacgcgtttagtcggtcggagaatcgatgaagtgttgttgtccgccgtgtaagatcctccggtaaccggtttgggagcgatcggtcggaatctgagcataactgggttgattatcgtcttatttgaagtagtagtagcctgaaaactggccacgtgccatccatcacgaccttccatctcttgaccttgcgatcttcttctttctcttctttctctttcttctttctcttcttttctttcttctttctctctctgatctttctttctgatctccctgtctgagagcgataatcatagctttggcgcggtggctaggtgagctatcaacacgtgtctagggctacactttcgacagtgttccattctgattggtccaaaattaaaaataatttaatattttgagtgtgtgagtgggacccaccataaaaaaagtgtttttttgcgtatcctgatttatgaatcgaggtctgttaattggttcttactttggaccaatcagagaaaagtacgtgtccactaatccgaaaaaagagggacacgtgggctttgtagcaggacgaagcataatttccctccaaccgaagtggaagaaaaggaagttcgagaatatggacacgtgggaattttctatttgttaagaacatctatattaggttggagacggattggatgtactgttactaaaacacgcgctgtttactgcgcgtgttttcacttgggggatatttttgcttcttagtgctttttattgattggtttagttgagtggatcccacttatttaaatgaaggaatttttaattttttgtttaattttttgaaaaaaaattaaaaaaacaaactattatttagttgaataaaggacacgtggtggctgggcctggaggacattgacagaggaactgaattgaattagctttattgctttttctttggttttggtctaaaagattataatgactttttttttgaaaataagattataatgagtttagttaattaattaatcaaccagttatatagtgatgtacacatacatacatgtttaaacatatacatgagaagttagaataatgattaatttaaaacattttcgtaaattgctattataaaaagctaattggtaagtaaactatgtataatttgtacaaagaaaagcatggacgatgtactttttgagataaaacaattactcagctt

SEQ ID NO: 185265 - DNA, 6195 bp, Cannabis indica
ggttattattttttctttcttttcatcgatttttgcttcttgccagattttaaatatttaatatttctatattttttctgctatatattgtgacagagtgagatttatgatcggattgatcaggcagttctgcttcggcaagaacaattattgaagtcacaatcattgcaatctgcttctcttgatgggaatgccaggtactctttttctctaatcttatacgtttgactgcaaattagttgtttcttgacagaaacgtttgattaatctgagttaggttttcatcttaaatgaacaacccatttcgttattccctttccttggggaagttggccttttttttttactggtgatagtctttggacagttagctatgttagatggtaatgtttttcttatagaactgagtagcaacacatttctggcagagaaactgactatcttgcagcaagagctgctgctagtcgtcatcccacccaagatctcatcacttatggaggaagagttgatgctgattctcgcaatatatcgttacttggtgcttcatcctacaacacacaacatgccccttcaatattaggggcagccccacggagaaatgctgatgaccttgtgtatgcacaaagctcttcaaatcctggttatggagtgagcctccctcctggtagggattacgccatggggaaagggctacatgcttcatcacttgagacagattatcctagtagtgtattgcctcgcagtggtcacgcaaggattgatgagctaaaggatgatagggctagttaccttcgagagtttgagctaagggaggaggaacgtcgtcgggagcgtttacgagatagagaaagagatagagaaagggagaaggaacgtgaccgagatcgagatcgagaacgggaacgagaacgagaaaaagaaagagatcgtgaaagggagcgcattttggaacgccgagaaaaggagagagagcgagagcgcaaacgtgcacttgaagtaaggcgtgatcgaagtctaccaagagtttctcgggatcgtcgaggcgcgtctttgttaaaggaggggagaccattgcgacgagagtcccctcaacgcgaagctttgcataggtggatctttttgttttattttgcgtcgactggttctgttatagctgcttgtgtatcttgcagcctttttcactaactgttggtgttctgttatcctgaaggcgtcgttcccctgttaaagagaaaaggagagagtatgtctgcaaggtaaaaagcataagttagccattaaaatgataatgagaatgctaaactgttcaaactgttgcaatctgcttttcacctcccttggggatcagcgtttgagctcttcattctggttgacttaaatttcctcaacctcagttacttttattagttcattgtgctggaaccatttttcattttatgtcctcttcctgtgggggcctggcttctcactgcaatgtttcctaatacattctccctgcaaggtgtctttctgtattcttgttgcaatgtttcttaccacattctcaatttattgtcaattcttgctgcattctctcttaccacaatcttgttgctgtgtttctgtccacattctctctctctgtattcatgttgccatgcttattaccacgttctcaatgcattgtttctttctatattctcagtccagcatttcccaccacattctttccgcattattttttccgacatttctcctgggtttctttatctgttgtgcttgcctttggctccagcattttctttgtatcttcttgtgtcttacaatgcattttctttctttctctctctgtctctctcctttttaaacttcaattttttcttcttttatctccaacttgttatgctggtgtaagtatgtggaaattgattttttctgtactgctgctagcctctggtatatggattttttggggtatggagaatattttgaatgtaagcattttatttctttagctggtggtgggtggaaattggaacacggttacattcaggcaaatggaatacagatgaaagaaatattgagaatggaactctttgttgtatgcgtttactcttttttcttccttgagactaagatgtttatgaatgttattggcacatattttggttaaccaaattctcttctgcaggtttatacttccagtttggttgacgaggagagggactatctgtgcatagataagcgatatcccaggcttttcatatcccctgagttttccaaggtccatctttaatgttttatatccatttagattctggtgacagtattccaggcttttcatatcccctgaattttccaaggtccatcttttgattttgatatccatttatattctggtgacaatatcccaggcttttcatatcccctgagttttccaaggtccatctttagtgtcttatgtccatgtagattctggtgacaatctctaactatttttttatcaggcaattgtatattggccaaaggagaatcttcaactttctatccatactcccataaggtacttgtgaaagttttccttctcttatttatttatttttttgtttttcatttattttgatgagggatgaggattgatgctaatgattttattttgaaattatttagttcgtctacttttttaattaatttgattataaaatttatgagaactctgagcagttgtggaacttttcatcaccccatacgagggggaatcctcagattttaggaaaataggctgtgtagcattttggttattatattaatgaaaagggagaggaaaaaggaaatttaaatattgggtctcttattgatattggaacagttttgagcatgattttgctgaagaagaaagcacatcagggtcgaaaaaggattctactaaccttttgtctgaagaatcttcaaaatcaggacatggaaatatagtgtggaatgcaaaggtaagaaattttcttcagctgtactttagagaagttttacactgtaaattactgagtgattcatctgaaatgaattttcatgacacaatcttgcatcaagcaaaacttttgcctggccacacattgtgttattagttttcatttctagtttttttttaatttgtttacgtaaatgttacttgattttacttttccgtactatttgcattatattataattgctttaaaacattctttaatccatgataatgttttagttttatatggcactaaacatggtactcaacaatccatttagtcaagtaatctaatcccatataatagtcttgtcatatacactccaatccacctctatgccagatagcttggttaatagtttggatattttagtggaagtttcattagatggcattctaaattgatacaatattgaataattcttcatctttgttgtttatttgttagtttattctaatgagtggaattagcaagaatgctctggaggagctatcatctgaaaagatttctgatgatcgcataccccatatctacaacatccttcgcttcgctgttcttaaaaaggatcattctttcatggcaattggtggcccttggaaatcggttgatggtggggacccatctgttgatgatacatctttaattcatactgctcaaaggttaatgctgaacctttgttttctttagtactaacttctggcaataaattgtctttggtaaatacactaagcgatttttctttatagatatgcaaaggatgttgctcaacttgatctgcaaaattgccagcactggaaccgttttcttgaggttttcttttgattcctcctttctctctcataatgttatatgccatagttttgcttataaatttaaataaatttataaattttgcttgccatatgcagatacactatgacagacttggaaaggatggactgtttagtcataaggaggttactgtattgtttcttcccgatttgtctgaatgtctcccttctttggatgcatggcgagaacaatggcttgcacaccagaaggttgttgctgaaagagaccgtcttctttcactgcgaagagaggtgcttgacaaagccattctttcccttagtgctcaaaatgaatttatgtttttattctcaagttgtgagggttctttcattgctgttaacgaacctaatatattgattctttcagaaaatgaaggtgaaagatgcactaaaaggtaaagtttgaatgcttgtataggtgttggatttttgtgcctatgccatcagtttattttctatcttttaaccttttcctggcttgcagataaaaataatgattcctttaaagatgttaaactggttgacaaagaagagaaaaaaagagaggcttcatcttctggaaaagctaaagatgctgaaaaaaaggagaaagatggtaacaattccaaaagaaatgcatcagaagcaacgggtgacacaaaggtggaagagatgaaagtggataaaaaagaagagggagcaactgctgttgctcaagcaactggcggtgtggtgactgggaagaagaagattataaagaaggttgtcaaacagaaagttgctggcaagactactggtgatactgcaagcaaacatcataatggaaatgaaaaagaggataataatgcaaacttagaaagttcaggtcaacaggatgcatctgcgtcaagtggggtgaaaacttttgctaggaaaaaagtagtgaagaaagtggtgaaagctagtgtgagtgaggataaagttgcacattctgagaagaaagttgacaaggaaacagattcctctgtagagaaactaaaagataaattagatccaaacagtgctgcagctgggaaagataccagtgtgaaaactgtcaagaagaagattatcaagagggtaccaaaaagaaaaattgctactgtgcaatccaacgacggtaaggagaaagatgctgctgaatcagtagatggaacaccaaatacagggaagcaaaaggctgatgcagataacatgaaaactgaagttaaatcatcagaaaaaaaaaatatttctaaaacagcacaagttgtagagaagtcagataagacaggaagttctggtaaagtagatgtaaaggatgaaaaagcagagaagaaagaggtgaagggagccggtgagcgaagtgctactagaaaagagacagaaacagataagaagaaaatatcccaaaaggacatcaatgatagtaagagcgggtcattgaaagatgacgagaaatctaaagatgttaaggagaaaaaggccaaagatgtaaaggatgaatctagaagcaaatcaaataaagaattgaaagaaaagaaaaaacctgaagaacctcctcgacacccaggatttattctacaaacaaaatcgagcaagaattctaaggtaaattcttttgttagtatggtagcattatgtcttgaaatatttattagttatgtccttcatcttaattcatttaataatcctcgtctttttaaaatttgtcagttacgatccatgtcactggctctggaaacactcttggattattctgataaagatgttgaagaatcaacatttgaggtttgctttcttggttcacgtattgtctttttgtaaatgtcaaaacaacgcactagtttatttatggatttttcttaaatatatatatgtatatttatcattttgtagctttcgctctttgctgagacactctgtgaaatgcttcaatatcaaatgggttgtcgtctcctcacttttctccaggttagtctgagacttgttaacaaatatggatatgcatactaccataagtaatttactaacgtactgttttcattgctctttgtttttgtttagaaattgcgtgtgaaatttgtgaggaaaagattgcaaaataagaggcaaagggaagagaagagagggaatgaaactgataaaatgtcaccatcaaaacgtctcaagactgagaaatcctctgtcaacaaccaatctactcaagcatctgaaactgaaacatcaaatcaggcccatccagatgataaaaaggaagataaaaatacagtggaggagcatattgctgttgaggcgaaaacctgtaacttggttgatcctggtgatgaagtgaagacagaaaatggaacagatgatgatgatgaagactatgaggaagatccagaagaagacccagaggaaga

SEQ ID NO: 185266 - DNA, 7850 bp, Cannabis indica
aagtaaagagtatgcattgtggaagcacctcaaagtaaaggttaattaagatttttgccattcgaactttaacatacataaaaattcttcaaattgtatagaaaaattttaacaactaaaaaatttagagaaataatttagtacatgttaaataaaaatcttaataagcataaattaataattaattattaaattaatatattttttttttggttacagtcacacaaacacacactctcttcacgtctattatatctgtgaccaccaccgtaatattcatttatttcctccctttttgttttgcccaatttccaaaggcactttctctctctcctctttcttctcttcttcttcttcttcacaattttcattttcatggcggaaatgtgaaatcgaacagcttgagcttcgctaagctgactgtactctactgtgttttcctcttctctctctctctctcactacagctgagggagctagggtttggtattgtgttggtttcactttcaatatgcctttgacgaggtaccgtgtgaggagcgagtatggattggcggatcctgaactgtataaagctgccgataaagatgatccagaagctctgcttgaaggtgttgccatggctggcctcgtcggcgtcttgcgccagctcggagacctagcggagtgagcttcctgttcttgtttttggttatttagattgttgatgtttttttttgttaatcggaatgctgagcttctaggatttttgtttggaactggtggactgagaattcaattgtggtggttgtaactagcggtgaattaggaaatcgtggtttagatttagagtttattgtcaatcgcgtgagctttttacttcgtttctgttttaggtttggtatcactcgtagcggtgactgaaatgctgcattaaatttgtggttttgtttcggattggtatatgatttgttgaactttgtcgatttataaggctgaattggttttcgtgttagtatgttttggcgcattattctgtttccctcccaatattatcatttgagtaccaacttcaaatggaatatgattctgatgtctcgaaacgtagagataaaatttatggttcgtatcacgtccctgaagtaaattgactttcagcttcagatgattcattttgagcttccgcattagcagtaaggagccacatggattggtggcttagaggggcaacagcctcttcatttttcccctttcataagtgtttaaaaaaaaattaaaaaaatgactgaatgagatcagttatgcctaattatttatcatattcatatgctctgtatgacatcggtttgaatcttatgctcgcttgtaatgcatttttctcctctttatataaaaataaaatctattgagatttcaatatcagaagtataatttcatatttatcgcacatggattgtataggtttgctgctgaaatattccatgatttgcatgaagaagtaatggcgacctctgcaagaggtcatggtctaatggttcgtgttcaacaattggaagcagaatttcctccagttgagaaggcacttttgtcccaaactagtcattcgtcgtttttctgcaattcaggtgagattaagtggttcacttcatgttttatggttagattagtgatgtacttacactactatatttatttttttattttcttttccgaccatctcacatcaattgttctggaagttaatgttgctcatacctcatattgctattcctcatctgaacctcttatattttagaactgccatctacatatatatgccatgtacacatttaggaaaaaatgctacaatgtatcttggataaatgtattttttttataagctctcagaagctacagaattcgacgttgtgttttttatatggttagtgagtcagagtattgttttttgctttatatttatatattgaatttaaattccttacttacagaaggtttatggagggacataccattagttggtttctgattggtagtaattacatgattatttaactgtaggtgttgattggcatcctaatttgcggtctgaacaaaatcttgttgcccgtggagatttacctcgctttgtaatggactcttatgaagagtctcggggtccaccacggttatttcttctggacaagtacgtttcttcagtgtgttcactttattctttttatgcaaatggaggaactgcatagatttgattttacttcttggaagatttacaatatctttttatttctattaggtttgatgttgctggagcaggagcatgtttgaagcgttatactgatccatcatgcttcaaagtggatgcagcagcatctgagatgacaacaggagaggcttatcgagaaaagaaaagccgtaaagtgaaggtactataatataatgaaagatactggaactaataagtacaaagtcctgtgttcattgtttattgcaatgtataagaacaaagtcctatgttaatggttgcaaaaacaaagacttgttttaaataaacataatacatgtcacattccatataaccatatccctgaatatcaattgctgtagcctgtaggtaatatgaattttttagtttctctagcatgtggaaatgaactgttatggcttggtatcaacttgagaacagaaaattctgcttttatatggacaacttgcaaccatacaatggcacatataatatatgttgtcttcgagtgtttgacagtggaaccttctatgaggaattgtattcaatattaaatcgtccatcaaattgaatgagcttcatggatctattcttgaattaagttatttgtattttaatttaaattaacattttatttgcatctctatcctgaaacctgattcggtttttgttatttttaattcctgacttctactacaatcctacaagccttgccttttactttgtcaaagactcaaaggttctgtgagaagcctcagaagcttgaaagcttaagtcagaatgtaaataacaggaaattatgatagaagtaaataaacacatgcttacttacacagcataaatgctagagatcacgtctatttaaataagtgtgcagtgttctatttatcgcgcactcatatggtcaagcatagattcttagttatacacaatgtactcttacatagtttttcatgcataccaatactgtggttgcttcctcatggccagagtatttggaaatcagcttcccttgtactgtacatatttctttagtaagatgttgattttttttgcttttgcttttagcagaggaaaggaatgcgctggaggaatggggaaacaaccccggaagttgcaccttcatcacatgcaaagtgagggatcttatttcgtattggttcattaaatcaattgcattgtattgtagtgtttatgcacttgtaaagatttgtaactcattattttgaatagtgcagactgcatcagttgttcctggaggagcgtattgagaacggtcatagtgaccctgcacgtctggttaaattgaagaggaaacagataaatggatctgcagttgattctaaaacagggaaaagttacatggagaagtttgtagagattccacctgagcgtgaactggcttgtgaaacttcttttactccagcactcttaacatcagactatactagtgaaccagggattagaatacttgagattagtacagtaagtcctgcagaaaggtcacctaggaatagaaatgactgttcattgcctaatgtccatgaggttgcattaagacaaccaataaatggttatgacaaggaggtgattggtagagaaattatcaaggtgcctgatacaacttttaatgatgatactgctaaaagatcttcctctcttcgtgtaatgcaatatgagaaggcaagtgtccgagaaggcaaaagtaagcggggtgtcaatggatatgactctgatgatatgaccagtgagatagacaattacgtggatgcccttgctagcatggagtcagaattggaaaccgacaatgattgtaggcataatacgaatactcgctttttgagtgctgcaacacatacggctaattctgatgcaaatgaagaacaacttgagtgtgtagctcagctctcagatactcagtcagttggaaacttttctacatcagatgatgggaataattctttcaagaaaaacagatcgagtttctcttactctgacactccaagcagtgttgttgagaatacaccctcagattttgatggagatgctaaagtgtctccttctgaaatttgtggtactgaaattgtagataaatcaaccaatgagagctctgtaattgcagagcctacaggatccaaggatgatgagtttgtgtcccatgatatatgcatcaagaaagaaagcattccggatcacgaaaatgcatcttatcctagtccactgcagtcagaccctggagctagttcattgagtacagacttgtcggatggagctcaaatagttgaaacgtcccctgaatgtatcaaccgcaattctaaagtaccagacactgttgaaaatgggacaattatggttgagtcatcatcagttgatacccaagtttcctcccaagaaaataatggtatgacaaagacttctgaaagatatactgtcaatgaattggaagatgatccaaatgtcatttctgatgatgcgttgcatttgtcaaacatttcagagctagattctggaaaggaaagcggagagacttcagtaaatgatgtatttgaagcactaaatgaagttgaagattcaaataagtgtttggttagtggtgaagttgagtctccaagtaattcaattacagaaaagcagctctacttagaaactgattctgctacatctgtattgcctaacaattttactttgtctagtgatcattctgatgtgttagaagctgaaaatgtggttttgaaaaaaggtgatgttgttacagcaaatggaaccaacttggaggattcacctcccaatatggatactggaaagagccatatcgaagagataccttccactgtgaattctcctcagacccttggctcaaaggagttgcagttctcaacttcaagtgacaatttatcttcttgtgagcacgtttctgctgagtcagaagttccatattccaaggaaatgccagatgctgacgagatttctggaacagaggcctctggagatgcagttggaaccgatgttgtttctcgggatcatccatctggatatctaagtgatgattttgtaaactcgagtactgtggcacatgaaacagttgaagtagaaaaggaagcagttgattctgctgactctgccaacattgttgataacaggtgcgatggtatttgtttacctccttgtacagaatgttcttcagcaacaagtccaactgatctgcaacaagaagatagggtatttgacgtgggagtttctccagagtatgcaacagaatcagaagcacgggaagaattacatcctatggatgctgcttctgatatccctgtagcgtcacaatcttttaatccaaataatccagaatcagatttgagtccttgtgatagtcctcatctagatattggagaggatattgtatctttacctacctgtccccttccagagacaaaaatttcttcagaaaagtcagcaaagttgcaagctgaccaggctggtatggacgatttgctacggtatgaagcaggtattcatccagagactctttatgaaaagttcctgaagttgcaagctgatcaagatagtgaagaatgtgtggaaacagaggaagccgatcctcatccagaaattccttcagaaaattcgcaaatatgcagcgatggggaatggttgcaagtagacagagaaagtataaagacttcaagtctttcttcagaacagatcaaatctccaaaacacgtaaataaagaaacttcggttgatgcttctgtagagtcaagtctagaagaccctccaaggcaatcttcaaccgcagaattctcgtcaaaatcaacaagccctgaagttgatgtcataaagcaagcatcaagttcatctgagtttgctccaagtgtcgtcttgctcccagaagcaactcaagttgatctggaggagatgccaccattgcctcccttacctcctatgcagtggaggatggggaaacttggccagggctttccatcaatgcatccgtttggaggcaatgacaatgctcaagttagttttccagcatttcagggtgggatgctgccgcctcaacatccgtttggtggtaatgagaatgcccaagttaattttccagcatttcagagtgggatgctgccgcctcaacatacgtttggtggtaatgataatgctcaagttaattttccagtatttcagagtgggatgcagccacctcaacatccatttttgcctctcaacattgaagagaatgagaaatctctgcatgttgctaaacctttgtcggtacagcctcctacatattcaatgcagttaccgactatcgtaaatgatgccaatggtcaatacaatccttttgctttagggggaacacaatccctcaacccattcataaggctaccagaagtttctagcgagagagatgagcacagtgatctgtcaccgacacaacccgctgacagtacaagcagacaaaatcatgttgactcaacagatgcgagccagcctatggaccaagtaggtcctcctgaaacaggtgttgataccatggaaaataagcaatcattgaagaattcagaagaggaacaaggaaattcattgccacctccaaccatggtagatgaacagtctcggcttagtttactgatgtcagaggaagaaaaagcctggttgtcgactagttctgctatgatgccagactctgaggtggaaaggccaaatggaaatctagtgaacaagctccctcgtcctaggaatccccttattgatgaagttaacgcacatggcaaaagcaaggtaataatagtcaaaacagttctgtcatgcacctccgtttaaggtttgattcctgagatatacttgatttctaacatgttgaataatattcagttgagaaaggtagccgaaagagttcggccccaaaatggaccgaagaccgatgaaagagattcattacttgaacagatacgagctaaggttagtgctctgtctaaatcaaaaattggtcgatttggatttcttacaacttttggtcactcttttgttaacctcaaaattaatttttgttggggaaaatgttacataattttgtactttttgttgcttcagtccttcaatttgaagccggctacatcgacaacaaggccaagcatgcctggtcccactcctaagacaaacttgagggttgctgcaatattagagaaagcaaatgcgattcgccaggttcccctctctctctctggctcgataatctacatatacatacatactttattttatgtgcttgtgtcagattctgatgtataactatcgtggatttcggttcaggcattggcaggaagtgatgatgaagatgatgataattggagtgattcttgaaaagaaaagaactaatcttacaactaagaaaggtaactgggttaggggacaccattattctctgttctttagtgcaattaggaattctatatatactctctctctctctctctggtcaactcttcttttcttattttatgttgatgtaatatacaccacaacccaccttgtctctcacttctcctttctataatatcttgtctccccaacaattaccctgttatttacctactctgttctgtccccaccgaaatttgtgtgggtaaaaaagaaa

SEQ ID NO: 185267 - DNA, 3246 bp, Cannabis indica
agagagagagagattgaagggtcggttggggttttaatcgtgaaaaattttgtccgcgcaaggaaaattttttcacatttaatcctaaagtgaaacatatcgtttcatcaaagggttacatgttttcccaccaactttctttagtatattttcaccacgaaggatgtctcctacatttttaacacttttgtcgatgggtattagcaccaacaagtgtaaaaatttacaaaaaacagaactacctatttgatagttcatttgtcatatacttttactgacgtaatttcttacttgcactggcaaaagatacgaataccgacaaaagtgatcgccagtaaaaacaattacacaacccaaaaaatagtttacttttgccgacaaagctacctaattgtgccagtaaactagaacttttgccggcgcaattatataattttgccatcgaaaatgagttttctcgtagtgtcaattcatacttatttttttatatactgttatgaatatataatttatattttaaagacaaaaaatagtaatttaaaaaataaatatatatggtacatgtatattttaaaatttaatatatcaaatatatatatttatatatagaaaatataatttaaaataaactatatttttttatatacaatcattatttctcttttatagaatttgttatttttaatttatttattttaatttcgatcttgttggagatataaaataataatattttgtttgttttattttgttgttactcatgtaaaaataatttttattttaataattattaaataatttaatatcttttttttttgaaaatttaaataatttaatattaaaaaaagtaactaattcaaaataattaatattatacttactattgcgaatttgaattgattgaattagatttaaaatataaataccactcagtgcaaattaaatgtactataaataaaataatgcggattaaattgaataaatttttttatttctgtcagcacaaatttattgtatatataaatgtattttcttttgaaatcctcatggaaaattctagatcatcattttcttaattaaagaaaaaacacacacaatcatccaatgactctctttactgatatctttcaatcactgaaaagctctttttcattttattctcttggccactagaagccttgaaggtcatttgacattccaaagcttgacaaagagaaccttattgcttattcttattcttctgaggaagtggccttataattagatgtgtcaatcttgtaaaatttctctggagaaatttttaaaagggtatattttttatacatttattttaagaaaatatcaataattaaagaatgtaatttagctgcattatgaagatatatcttacacgtttgacacttcctagcctattctcctatccaaatatatattagcacttaaaaaagggaggtctttacagaattgagcaagactaatcttctgatacgatgagtacaaaattgaaaattatatgtagtttagtaaatgattggatattaacttaaataaaaggttattgcatttcccatattgttttttgtgtgacagagattctaatacattctatgtcacattttgagcttggaagtgtggtcatgatgaacgaatttaggcataacaatattagatgtaacatttgaaaaacatttcacaagtcgagcatgaaatttaagggcatataatatttgaatattatcaataagacatcacaaaaatcttactttattgattttactactttttactttgtacaacagcatcagcttttatatatttttttttagcacatcatttgaatattatatttttaatgtattttatttatttttaaaaataattgaatgtactaatagttttatattacacatatatattgaaaaatataataaattaaggtataaataacctatcactatgtgtaggctaactaagtaattaaggtaaaaaacaaggatttttttttttctattttaagctaaaataactcaaaataaacttttatactacaagaataaaaaataaatatttatagaatttaatatttactaaaatactattttttaaatgttttatttacaaaaatatgatagagacaaaaaattgaaaatgatagttattaggcgggcgcgtgaaagacacgcgtgacttgagaaaacactacaaacaaatttaatggatgcaagttattaatcgacacatgtaaaatcaaatgatagggactaatatttactttttattgggttttgacaaacactaccaagactacttcagtaaaaaaaaaattaattttataaaaatgtacacaaaaatatatattttattcaaattgatataaaatgtggtgtttgggatttttttttttttttttaaaaaaaagtagtgtcggcaactttattcattagagactttattttaataaacaatttttatttataacatacaaaaaataatattatattcaattttatttggtaaattatattgtaattactttatatgtttactattaaattattattttgagtatgtatttttgtagggtgataataattaaataaattaattaaaataaaataaaaaaatattaatcacaatacagtcatatatatataatttatgaggattattttagaaatactcaaaaacaacaaaaattttacgtttttaaaaaattcttttttttttttaccttttattgacttttttctcttagaaaccgttgtttttaggttgttctacaaaagaccattgtttacacgttttgaaaatataacataactttacggcaacatgaaaataatgttattttcattctaaaaaatcacaaatatatataaaaaaaaatcgtaaattttttgttgctttttgtagctgttttattgttgttgtttaatagtaattttcatgttgttctctatgtgatggaaaattatttttgagttgctttagttgttctttagttatttaaacatagttttttttttttttagttgtcattaggttgtttttctggttaatttgggttgttttataatttatttagttgatttataattgtcgtgagtttgttttctctttatttttagctgttttcttattttttgctaagagaagtgtaatttttaactttaaaagcgtaattttgtaaataaaaattttaagtcataaaattgtacataagatataaaaaataatatttttgaa

SEQ ID NO: 185268 - DNA, 2838 bp, Cannabis indica
gtgtttagcataaataattttattttattcaagtatttttaatttactattttaattatttattaattaaaaatatggtaaattattttattatatatttatgatatatgtatttgattatatatgatatattattttattttataatttaattatttttatttttcattttattgttgtgaattattcatttttatttattattattatatattttaatttaatttaagttttttttcaaaggaaactaaataaaatagttcaatctattcttaaactaagcacatgattactttcagcatagtccaatattgtccaatctaatccaagcctttccagtccaatcaaatctaatcttgtgtaccaaacgaatccttgatacttaaaataacaaattactattgaaccctaaagtattttaatataatatatatttctaaaaatctcactacaaataagataattattttttataccggggttgaagcccctaatgaatacaatatgtgtctatcacaaatacacaagtgttacctcaattgtctcttgttctaagaaaatgctactagatgaatgggctttagcgtcacttttatactacaactgatgatattaagttgaatacaattatagttgagatacaacatcgatgcaaagcttgaaataaggtgagggtgcatcattcatcaccaagagataaattgacgctccacaactttaagttgtgtaattttgcatttctaattagtagtggcgattaagaaccaccaatattgatggattaacgtttattttttattcaatatcgacagtgatttagtgacactaattctgacacactataaataatgaattttctcaatatttcacttttatcaatgaaaagcctaaacctcattgtcttctcctcatgtttttggtcatcgatactccattttcgcttcaacagataatgattctttcctcaccttagtttatttctatatcttggctctaaataatttctatttgttgtatattgcataattggcttatatgttatgtattaattgtagctatacattgaattcataggattcctacctaatatacatattataattctatgtatatttttaataaaatctaaaactttatttatgacgaatcttgcacaatgacatcaataatgtgacttggaatagagtcaaccgaataactatgctcagcatataaccatgaagctcgggcaagcccatgaatcacacgattagcaaaacgtttaacaaaacgtaagcaaacattgttcaaatcagaaaaaattctcttgcattcctcaatgcagcaaccaaagggagaggtagtagtcaccgagcttcgaaaagcttgcactgttatgagactatttgtttcgacggtgacttttgaaacctttgacgcatttatccaactgagagcttccgtcactccaagagcttcggcaagggtagggtcacaacaaccactccaagacctagttcatgccttcaagacgtaacctctagcaatacagagcacccaaccataaccaaatctgttattatccacaaaatattgctgcatccacattgatcttgtaattatctacctctagaccacaccaatattgctcatccccttcaccactctaaatcgaatatgaagagggattgaaagttttttcttgagcaataagccattgttcaagatcacattttgcaagagcaataacatttttgactgatttggtttttctattccatactttgttatttttatcctgccaaattgcccaacagagcatagcaaccaactacttctccacccaatcccaacggttgattatatttatttatttatatttgttgtatagggttgctaaggtaagaattcacatagaaattctctgtaatctgacgagattttgaagataataaggatctcgaagacacaaaaaatagggggtcacatgcttgaggattcctcaacgcttcggctagtaatattgttgacgagttcttactattaaaaactataataatgatatgtggtcaatagtgacgtggtccacagggccacgagataaatttaaatgaggattcattttacaggttcaaatgatatagtggggatgaaatgggttgaaatgagatgaggtgatggccatctctttcatttttgttgattttcttttataaatttgcttactttttatattgttgtgtatatatatgttggaatttattttacgatgattttatttagtatcatgtatgttgataattaaacctaattatctaacaacctcttacgtccatatttcgagtattaaatatggacatgatacttggatattaatcttgaatattgtttgttgcactcgtcactgtattttcttgtatgcatggtaaacaactgtttgaactttattttcgatactcttaaactatttttaaaatttataggatcgtaagtaattacaatgtacacaatcataaaaaaaaaactatattaaaaatagtggcatacctagattttttttcactatggggcttaattgtcataaaaaaaatatatgtctactttttatcctaggtctacatcaacggaaataatcctacaactttctcccatatgttttttaattattaaaattaaaataaatacgatataaatacttaagtttaactaacagctgtaaataaatattaagtttaattttttatggtaataaaacctaagttatatttttgagactaaggtatataaatgttaattgttaagtaaattaccacgtgataatttctgattagtccaaactatttaatttttatttttttt

SEQ ID NO: 185269 - DNA, 3159 bp, Cannabis indica
ctctgtaattatccctgcgcctgtctccgcccccatatccacctctaccaccaccaccactgcaggcatgtcaacaatgtgtaaatatgcaactagtcacataataaaatgatagaaactaattcaatccagcaaaccagataacaattaaagtgaaatcaaatacaaagagacatcaacaaatcataagtccacccactattccataacagctgataaaggccattctgttttatttcctcaaaggaaggtagaggtttccaaaggtagattcacatgggttatgaattatttaagtcatttttctttaaaatgtttgactgaagatgaggcttttcatatttttcaatgataaaatcattgaaagtcattgctaccataataaatgaattcttcaaaaataccacgtcttctaaagtgcgcgatactaatgaagttaagaaaaacagaaccctctcaaaaaataaaatattgaaaaggtcctttgaaaaacatattaacagaggttcaaatcaatgaatttctgaaaccacgacctgggtgggtgattgttccagtggaagagaaagtacaaaaactttaaatcaataaacatactgagtaaatacaagaggagagtgaagaaagatcaagatcttatacactaaaagaagtaacaataataatgttttcaagtcaaagtatgcatgctaagctcttaattacatatgggataataaaataagaactcaaaccaggatcagatgaatagcttagactgactcaatgttcacatgtgaaaaaaaagaatgaaggggcaagctaacagggggcacttgatatagaggtctaataaacagtgagagagatattaaatgcataatttaaaggttgatacccatgctcaaatgcaggctttggcgccgacctctctgccattgcaacactgattttaaatcctctcagatcataatctgaaagaaaaatcaaatgtgagtataccagaaactttgtaataacaaaataaagaacagatgatgctcagtaaatactgttgtagaagcctccagcagaatgtgcggcagatggatcctcgtaggccaaacaagcatctcctttgttgtttcccgcatcatctgtgtagattttgatgttccaaggccactgatccttgtaaccacgtttttgcttgatccttcccacctgatatatatagaagtgaaaaccaaattaaattattaaagttggtttggctttaattttttttttcttttgaacaatatgatttggctttaattttttacaaaaaataagaaactaaaaagcttcatttttattcagcccggaggaaagaggatgccaaaagacacctatgccaaaatcccttattgtgttttcacataagataagagagtttcttagatatctccaagtcctctctactgtcatctacagtaacatgataataaaatcatcacgcagtaaccataaaaatgcacattgaagcggatagcatgaattctttttgggatcagatatgcaacacaggttcaaaacaataactttcacattgaataaaataacaatgtgaaaagttctcaacacttaaaaatcaaataagagaagtgtgaagtatattacttgtccaatgcccccaaaaagttctctgagttcttcaattgtaacatcaggcggcaaatttgagatgtatattctagaattgtcacaagtatccccacagttgtcatcacactgtttcaccttggccggggtttctgcaggagcagagccataaccaccacgattaccagcaccaccatacccaccaccaccattgtgaccacctgaaggaccacggccaccaccccttgcatcgcctaaactatcaccaccataaccaccggcactaccaccataagatggaggatatgaggcaggtccaccagtatagcttgttggaggaggaacagcatcagttccataattggcatttcccccataactattataggatggaggataattcccacctgccccacttccaccataagatgggggcgcggcaggaggagcctggttaaatccactatcttctctgccttggctaccaccataggaaccccctctactgcctccacctctactaccatcataactactccctttacccccttcgtaactaccacttctacctccatcgtaattagcatttctacccccatcgtaacccccacctctgccaccacgacttccaccatatccgccaccactccctcctctactgtaaccaccactcccacgatcaccacccccacgatcaccaccaccaccgcccccacggtcaccaccagctccagcaggggagggagcaccacacttgttacactcaactcttctagcaaagtttacatttgcacaactacattcaaataaaatcagttttagtacaaagtatacgtgaaaatagaaaacgacctgaaccttttgatatccatccaggatagaaaatgatcacccagcaaatatacatgtacatataaacaccaagaaaggaattacctttgattaggacaaacccaatcgccatctcggccgctcccactgcgaccgcctcggcccccaccgcctctacctccgcgatctccttgatatcctcctcctccaccccctgcaattagtataaaaactttaaaaccttagacaacataaactgcaaaaacagaggatatgaagataaatacctcgtccgccaccgccataacctccaccacctcgaccgccgcctccacggctgcctccgccgccgtaaccactatcaccgccctttcctccataacctccacccccgcctccatatcctccaggtccaccgcctccatagcctccgcctccgccgccaccaccatatccacctccaccacttcctccatagccgtctccggcgtcttggccgtacatccctgccatgaattagggttttttatttggactttcacctcagaacttgaaaacaaaaatagtgagattagggtaagatatttcccgggcacgcgattaagcgaggttgcatttatataggatctagaagggctgtgcttttttttcttctatagaaatactattttgaccttctgttatgcaaaaataacaaatcggacaactattttattaaaatatcaa

SEQ ID NO: 185270 - DNA, 3967 bp, Cannabis indica
agagggttagagagagagagggtttggaattgagtctgggtctctggggaagaagaagaccgagagagagggagagatgtcagacctagaccggcaaatagagcagttgaagaaatgtgagcctttgaaggaggcagaagtgaaagctctatgcctcaaagccatggaaatcctcgtcgaagagagcaacgttcagagagtggatgcccctgttacagttagttttctttctcttctcacttctctatctccgttatctattcgattgaacctcttccttagcgatttaattacttttttctgcttttgggttctaggtttgattcttttgtgtagttttatctctcgttctttagtatttggcaaattgtatagtgacattaaaatgtcgaacttgttgaatttaaagaaattgattgttcaatacgaggttattactctgagcttacaacttttttgttgggggcttatgtactgctatttatatactgagaaagtcaatggaactcgttgttgtgtatatgtacggatatgggaatgtaaagcaaaacatttggtcattctcaaatttagggcctcgatgtggcttttccaagtgaaaaatgctcatggaattgttttgctatagaggaaagagagtggtttcgctttggcaattttatcagtctgtttttgttcaaatatatgtaaatataagtctgtatgattaaaactaaaatatacaatcacatgactttaataaataccaaaagagaacgtttaatgatgaccttatacgtctgtgtgtggatatgtatttattgattttttaaggtgaatgtttgtatgtattagagactttcggttaaccgaggagaatggttcaataccatatgttttggagcatttccattgtagttcaggtgttgttgctaaacaagattttttttaacagatatgtggcgacatacatggtcaattttatgacatgaaagagcttttcaaagtaggaggtgattgccctaagactaactatttgttccttggagattttgttgacagaggattttactctgtcgagacatttttacttctacttgcgttgaaggtaatacagttaaaacttcaggtgatctgatggattagaaattcttgttattcttctattgtcagaagatttgtttgatctttgatatatttcatttgaagtgttgatcattttgtttttcttgctctaaaaaacagtataaatttcattcttctagagcatagttttctctttaaagtgtggctagacatgtctgcttaatttcagtagatgactattctcttatttatgtttgggaacttgggattccaaaatgcatgttataggtgaaaaacaaatcttcaacctctactctgtctatatggttactgtacatctataaatgaatgttcgataagttaataacctcaatcaaataataacaccattctgtcctaagttgatctaatactaaataatcttgctaaatgcataagataattttttatctttcatacctctcagggctttacgaaaatataaattaatatttgatcgagcacataaaataaataacatatagggttcgtttggtacgccgtattacaccgtaatgtattgtatagtattatattaaattatattttatgtaaaattatatgtggtattaatttttataggcacctaaatatataatattttagtataaattaaagtttaacatagtattatataaaaatatgatatataattcaattcaatataatataatacaatacaatacaacctaatgcgacgttctaaacgagcccataaaggtcaaaatattgaagagcttatcttgaaaacttccctgttctccatttaagctggtttccaaaatatgcacttaggtctttttttatttaaaaatctaaactgtactacacctcaatattattattattgttgttattttgtaaagcacatcgtatatataaatattatatatatatgtattctcagtttgaagtatttatttacttattcgaggttgcttctacttgaaatcatcgattggagaaatgattaagttgtatataaatttactttttagctgtttttttttttggtatgtacatgttagcttcaacattatatatgtacgcatcttaacatttgtacaactccattgtttttatatatgtaactcataaacaaatcttggtagagtaataataataattcatttagcaagaactaaaataatatatcattattgtcttaagagggttaatcttggtggaaaaattgttttagttatacatatcatttgacaaagaacacctaggtacaaaaaggaagtcaccatagcatgcttgccatttgatttctattagagacgagaccacttgatttccctgttattgcagttggataacctcatttatttattttatttcattgcaatgcatatagggtcctctttactgtttaaaaatcatttcagttttctgagttttccttgcaaaatattggcatgccgcatactaatttctttatgcaaatatacttgatcaggtgagatatccagatcggataaccctcatccgagggaatcatgagagtcgtcagattacacaggtaagcttctatgaatgggcatcttggttggtgctaactacttttgtttatttcatcattgcagtgaagcttagggcacactcatatatttactgcttaccctgcctaaacaggtatatggattctatgacgagtgccttcgtaaatatggttctgcaaatgtttggagatattgcactgatatattcgattacctaaggtgtgctgcctacttctttcatacaaaagcttgcagcatctttttctctgtgaagcaaactaaaattatagattggcaaactggcaattgagttattaggagatgattcgatattagcagtataattatatgtatatcatttgccaaaatattttcgatgaagtaacattgatacagtttgtttaggttgagtggcataaagctaggtattagactcaaatatagtttctggagaaagttgagattttatttatcagtttgattcaattgtcaccttaatattctcatactatttgttagaagctacacttttaatttgtttgttctttttttttgaaaaagagactgaggtcatccgtcagagactgacctactcccaaattaattagggagccttgctcatggctaaggaacatcgcggttacaaataaaaataaatcaaggaaaatcaatcattaacataaaatcacttaatgcatacatatagaacttagaggtaagtaagattatcttagtgcaagatgaggttgttcttttggattttaaatgaatgtccaaagattaagatatgtcactaaattgtcatttttccatgtcaaatatgtatcaaattatgtgattatgggttaatgaggctggtagaatgttcaaattgttatcagatcttcagttgaagccacctctttccttttagacactaagcctactggcaaacttgacttgtgggcttactttggtcgcgcttttatatggacttattagatctcccttttgttaaaaatcatgggtgaaagctggaaacaatttgttaaggtttaggaagtaggtgttgcctgtttcttaggtgaaactaaatgggattgcactgttgtactcccaaagcctcatttcttttcattttcttcaccgaaaagctttgatgatagcatgaaatattgctctaatgttcatcttttagtaaaatttattccaggacagtgacaaaataattttcttttcctttttcttatggctcaaatctttggtaatatattgcagtctatcagctctcatcgagaacaaaatttttagtgtccatggtggtctttccccagccatttcaacattggatcaggtctgacaatcacttttaaattaat

SEQ ID NO: 185271 - DNA, 7271 bp, Cannabis indica
actgatggaatgtattgaatcaggattggcaataaagctgggacaaatcgtgtcctttaattgtggttgtttctgtggaatagattcagtaaaagagcagagtttcggctgttctctgcaattcaagttgttgacataaagtaattatgttgaggagatgaataaaaagtcagttggtgcttcaaagttactgtacaactgcattgaagtgggattgattgagattatcagattggtatctgatgatcacagctagtgtctacagttgttgtggtgactgttatgaagaaaatctagtaggtttggtccgagcagctgtgttgcaacagcctgtgtaatcgctctatttggtcattgctggtatgctggtatgcttgttattttctctaagggaaatggactagcacctttttctgaactgatttatttcaagtggtcataatagtcactggtgctgtgttcgttggaagcacgtttaaaagacttatgagacttagcttgttactaaggagggtcctttttgaaagtgcaagtcaagtattatattgtacgggttgtttcgtgttggtttaagtcagtaaatatggaaacttttgttcatggctagctccttttgctgtacctgcttttctgatttctgttggatatgttgatcctggaaagtgggcagcaaccattgaaggtggcgctcgttttgggtacgatctgttagcattgatgcttgtttttaatttggctgctattttatgtcagtacctgtcggctcgaattggtgtggttactggaagggatcttgctcaggtattgtttatgtctactgaatctttattaaagatataactatcaggtgtattagattggggaggataaattgaccagctgattttgctattattgtgaagattgtacattaatgggttgtctattgtgaagcttaagcttatctgtcttatttagtttcatttgtttaattggtccactatacagtggactggttgaggagtcggtgagcactctctctgtatcaactggataaatatgcttggacagtttttaaccttattatgtcaacagatatgcagtgttgaatacgacaagtggacatgcttattcttaggagtacaaacagagctgtctatgatattgttggacctcaccatggtaattatgtccttgataactaatgtattgatgatgtgctctatcattgtctcactctcttttcacctttaaattatggtagaattctaatagcatctgtaatttgtagtacttatgtaattactcatttacttttaatctttgatgtatgattgttctacttttactaggtcttgggcattgcacatggacttaatcatctgtttgagtgggacttgttcacttgtgtctttttgactgccattgatgctgttttatttcctcttttttctaccctgctggtaaggatatttatggtcagtgcacatttatgttataataacatttttcgctattgtctacaaattttttctgtttccttccattttcaggagaattgcaaggtaaaattcttgtgcatatatgtagcaggcctcatattgctttcgtcagcttttggagtacttgtcaatcatccggaaatgactctttcaatgagtgtgcccataaaattaagtggggaaagtgcatttgctttaatgagtcttcttggagcaagtataatgcctcacaatttctaccttcattcttctattgtacaggtatttatctgtgtcggacacaagtggataatattctgcaaaataagctttgctatgcacatgtagatgccttttatgtatgtcaattgttgttagggttgataacttcttgtcggtgactcagtgtccacgtctcttgtacttcgtgtcgttattaggttcagtttcagaatcttttcaatgaaaggatgtttgacctgattttctcttttcttttgcatgtgttattgtgcatcgtaatgtggaatttactttgggtgtataaattactagcttatgttttattttcacccttgtttgggtctttatacatgtaaatttcaccctttcttggagctttgattgtttcttgccaatgatgcaatgcatgatatcatcataggagaggagtagtttttgaaggtggaagctattggtgggaaaattcatagcctctaaaattttatgttgattatcatgtcaagttatacctgccttttaccttattcacaccatttctttatgtacagagctttctattattaaaaatgagtaatgatgtgtacactcacacaaacttgacacacttacgtgacaattgacttttaacaagtgggacccattttaaatgaatacaattggttaatttttcttcacataagagtgtgtgaagtttgtgtgtacatgtgtgattccttgatccacaaaaatttaaccttgaaaaaatataaaaaaatgtgattgagttatgataatatgttttgaatttctctcaacatattagatctgagttacagaaatttgttctttttgccccacaacttatgttggatacatgaaaattattatgctcactcgccttattttcacagcaccatcaaggaccgtcaaacgtttctaaggatgccttgtgtcacaaccatttttttgccatcctatgtatcttcagtggcatttatgtggtgaattatgtgctgatgaactcagctgcacgtggtttctacagctcaggcctcgatttgcttaccttcaacgaagcattgtcgctagttgagcaggtctggatttttttccatcaggatcttttcatgttaaaacttgacaattttaatgaacttctttaaaaatctttctaactcaatacaggtttttaaaggtccaatagcaccaattgcttttctattggttctgtttgtatcaaatcaaatcacagcattgacttggagcgtgggtggtcaagctgtgttgcatgaattcttgaagctagagattccgggctggctgcattgtgctacaatcagaattgttgctgtaatcccagctctttattgcgtttggagctcaggggctgaagggatgtatcaattgcttatattcactcaggttttagtagctttgctgcttccatcttctgtgatacccctattcaggattgcaacatcaagcccgataatgggggtccacaaaatttctcagatgtttgagtttctatcccttgtaacatttattgggatgcttggcttgaaaattgtttttgtcgtggaaatggtgtttgggaatagtgattgggtagttagtttgtggaatgtgggatgtagtatgtcagcttcctatgcggttctcctgttcattgcttgtgcaacattttgtttgatgctctggctggctgctacaccattgaaatctgctactgattttggtgctccggtgttgaactgggatttaatgaaggttaaacctgattcatttacaaacaaagaggatattgacataaccaagagcagatatcatggagaggcacatgttgagaaacaagagccctcaccagtcttagggaaggctttggatagtcgatctgatagaattggtgagagttttgattttaatttacctgagaatatcatggagcctgatcaggatattcaattgagcactgtagaggataatagttctattaatgcgtattctagctcttcagtgttcgatataaaggagtcttcaccagtagcagagacagttgctgtctcgactgtagtgagtgaagtttcaaatatcacagtaattaagaacaatgaattaagatcaggtacaaaggaccctgttgaaaagattgttggagttgaagtagatgtacaagctgataaagatgatgacgagggagacacttgggagaccgaagaattatccaaaggggttcctgggacaccatctacgcaatctgagggtccaggatcatttaggagtctcagtggaaagagtgatgatgggggaaatggtgctggaagtctttcaagacttgcaggactgggtcgtgctgcaaggcgtcagctagccgcagtacttgacgagttttggggacaactatatgattatcatgggcaagcaacacaagaagctagggcgaaaaagctggatgtgctatttgggatggataatacaaaggctgcctcttcctccttgaatgtggataccactacaaaagacatttctggatactttccattggttagaggatctgatcctataactaactcgagtttgtatgactctcccaaacagcagagggtgcaaagcaatttagattcacaatatggggggccgcagaggggacagttcccatcagggaccaaccacatgcaaatgctggataactatgtgcaaaatagccgtaatgctcttgattctagtgagagacgatttttaagcgtgcgcaacctaccatcttctgagagttggggagattatcaaccagctacagtgcatggttatcagattaaatcttatgtcaatcgattgggaaaggaaagaagttctgatcacttgaatggtcaattgcagtcaccagcctttaaatcctctgccattggttctggaaaccacagagattcatttatattcgctacggggcagaaattacaaaatgggttaagtaccagtcaggcctccaatttgcagaatctactagcatctcgaaatagttcactgcagactgaacgcccatactattctcctggacttactggtactgctgagaatgtggtaaactcagccaatacgaagaaatatcatagtttgcctgacattcatcgggatctgcatgcctctgataagattcctcagtggcagcaaagtctcagtgggtttggatcatcacttggcagaacgggttatgaacaatcccagtttgcaaactctggagtgaggacaggagctcctttagcatttgatgaactctctccatcaaatgtctacgggggtgctctgtcatcaccactaaatactagttatgatactgggtccctctggtctaggcagccttttgaacaatttggcgtagctgataccaatcgtattgttgataatggagctggaagtagaatgggtactgtaaatcaagatgctgcttcctttgcaaatgcagaggctaagctacttcagtctttcagacattgcattgtaaagcttctgaaactggaaggttctgactggttgtttagacagaatgatggggttgatgaggatcttattgttcgtgtggctgcaagagagaaatttctttacgatgctgagaccaaagatacgaattttgggactcacatgggtgagaatcagtactcatctcctgagaggaaatattcttctctcaagaacatggattcaagttatccccattccacattatcctctgtcccacattgtggggaagactgtgtttggaaatctgatttggtagtaagctttggggtctggtgcatccatcgagttctcgatctctcccttatggaaagccggccagagctatgggggaaatacacttatgtactcaatcgccttcaggtaaatattgaatcccgtactttatacaatgtaaattcgcaataccatgaactctacgatttattggtgataatttctctaccatgaaagtagttattgtttttcacaatacatttccaattccacaatgaatagttaaatatcattcttccgtttatgctgaaagatttcctgttgcctttctgacctatttatgtactagtttttattatctttgaaatgtggataatgcattcttagcaatctgaacttacatttttcatcaacaggggatcattgatgtggctttttcgaagcctcgaacgccaatgaccccttgcttctgcctccacataccagcatcggcacaacagaggtttagccctcctgtcacgaatggaatgttgccaccagctgcaaaacctgcaaagggaaaatgcaccaccgcagttgtgcttctagacacaatcaaggatgttgaatttgcaatctcttatcgaaaaggccgaacagggacagcagctggtgatgtagctttcccaaggggaaaagaaaatctagcatctgttctcaaacggtacagacgaagactgtcaaacaaagtgatctgtgctcctgaggggtctggttcgcgcaagatgtcaacttctgctgccccttatgtttcttaactttgaactgttctgttcacctctcgactgtggtcaaatattgagctatatgattttgggaaatagctcatgttcgaatcttcaactctggaattgaatatagagtggtcggtcggtggtgattgtattcggaatcttcctctcattatgtatcaaaagtcaacaacagctgcaaaagttttatttgcatgtaatgttaatgtatacataggataagaatcactggacatgtaatttgcagcagaattaaaagaaatgggttagaaaatggtggtggaaaaaggaaagaagagaatagttgataatgccaatttattagtgttggttgcttatgtgactgttctttacactaacataacggcatatataaaagaaaaaaaaaaaaaacaaaaaaaaaaaaacccaggtttggctttcttgtgtttcaagtttcaacaccgcgaacatgctacatttgtctctgttttcttttgtccccaattttctatagtttcacataattttatatattacctcgaatagtttgacgccattgctttaagtgaaggatttatattcaatgtttgtgttttacttaaagttctcactttacgtaaattggataacataatgtagtttttagctaacttgctaaggaaaagaaaagaagcattggtggttgtgttcactatttcagattcagactattttgtatcaacttctttatgcactgaaattaaacaaaggacatgcaaaaaactgaaattagaatactagtattatatatttcctttggcggttattaccttggtttcattcttctttacattttgtccatttcaaaactatttagtaattaaatcagacatccataagcttatacataataatactaggtatagtgatttgtattgattattaagaggtgattgcagaggggtttctttttttatgcatcgtcgttgcaattgtacataggaccgaccggtgggaactgggaatgagtccttcaaaatggcgaccattaggcacagtttgttttaagttgttaagtaaagagtgagaaaagtttatatgtaggaga

SEQ ID NO: 185272 - DNA, 6245 bp, Cannabis indica
ttttttttttcttttggttttgttttgttcttgaggttcctaattcgatttagattttgttctttgtccgtgtgaattgttgtgaagatgtgaatgtttagggcttttctaccttttctcgccattgacgacaatgttttataactctgtttgggatgtttgcatgtacgaattcaaatatgaatgtacaatcatggaggcatggattttgactgtagttttctgtaatttatgattattatttctttaaatttgcttaattgaaattcgtttgttcaaactccttgtctacgttaacgatgatgcacttgaagcatattatttgcggaattgaagatccgaacctgaggatttcatgttgttttcttcgtataatttgagttctgagtgaaattttatctttttaatgcccaaaagatgatgcatttaaaacagtttcttttgcggattgaaagtccgaacgtgactaatttttgttgttttccagcatatcatgttaatgcataaattttactatttattaaagttttttctgaagttgaaacaaggttaagctgttgtgatcactcacttatcccacacccacccaactatctatctcatttgaacagtttcttatttcatctattacttggtgaatctgattatgctttttcattttagccttccaggcaaactattctggatggtgttcgatggctacaggagtcgtacatactttgctggaaatagctgaaggtgaaaagttattattattattatttttttttttttttgctctttcttcttcttgtttttgcgatttgtgaaattcttcaactttgattactttttctcaagctaaagacaaaagtatatccttctagtgttattgtaatgctgaatttcttctcttcagggttattatattttatttttccaaacatatcaattttgtgtgtgaaaaccatattacgaaatgttagcataacaaatatggtatcacgccacttgcaattgcaatatagaagggggaatgaatgaaattagagaaggacttagcattttttttaatcctagtgtctacagcatactcagttataactagtcaggtactcataggatgggttacgatgatgaaggaaaataagagttaaatctatcgagttcattatattattgtgaatgaagggtaggttaggatggctgggtgttaaagatctcaagtagtgagatgtagggtgggacaatgaacctggttcgtaaggggaagacgaagaactgtgatttttctttgtgttgtgtaatcaacttacttactgtgtgctttgtatttttacctgtacaattgtgagacatggattaaatagctcacatatcttgtattgtataaatgcagaagctcaatactcaaccaactgaatttctggcctactaataaagatgaacacctgcaaatgataccattatgtatggctcatggtgagtaactttaacattcattttttttttagaatatttttccattttatggttctgtacagtgttcttgctttgtatttcaatgcaaattttcagtgctgtacatgtaaattattttctatgcctgatcagtgatcagatcaacactcaattacaactctagagaaggaaacctgttttggtgctttttaatgtgttcaatctcctataattggtcttattggttaactttatgtccagctcattgagagtgctcactgaagtcctcggaatttgaaatggtttgtaacaaataaaaatcactaggtgttacatttcagtaatgttgcagactatgttactaggttatatgttttgctaaatgcctgaaggaactttctttctctttgttttattttaatcaggttgtttgttggaaggtctttatatatgtgtgtgtgtgtacatatttaaatgtatataagttttgatctgtgtataccccagatgaaatctcattgaattttctatgatgaatttaatttcatcagtttgtaattgcattacctgataagctcattgttgaaatatatttctctttaatgcttgatcacaatttgggaagtgaggattcatcctcttaggttttattttacttccaatgtttggattatagaggtctaggcacttaaatattcgcattcttgtataagtattatggaaatgatggtacatatattgcacttaaatattcacattcttatataagtattatggaaatgatggtacagatattgcaacttgaggtcatagatatgaaatgagctgtttacctggagtgttactggacgattgccatactcaactgtccactggtgtaaagttctggcccactaaggacgaatactttcagtctattctttatgtatggacatggtgagttatttgaacatcattttacatctaatgttttttcttcttctttaatttataatgttcgtaatacatttttgtaattaagcaacactaaaatccaattaatggtctgcacaaagaaagtattgtcttagcccaatcaagacatgatttaattattatcataatacttctttcaaaaaaaaaaaaatcatcataatccaaagtttagtatgattgattacaaattgatgtatctttgcatgaattggcgttattgttgtatgcactatttcaatgtaaatgaaacttcactatgatacttgttgattgattctgtacctttgtggcatgtgcttcctagccgacttagcatgttgaatggtaaactgaattactgtatatgcagtttttcttaacatgttatttgaaatgtgcaaatgatatggacattatttgtctatgcaaatgaagcttttctctgagatcatataagatgatgggttgcatacattcttatgtaatttgctattgttgttaaaataaaaccaaaataatcaagtcaatagagtccttgctataacaacaaaggagaggaaaaaagttcataaaaacatgcttcagtttctgatcatcttgaattgtgacatttcaacctgttaaatccattaatttttataatctacagttgcatttagtttttactgtattttggtttatattcacaactgcagcaaatctactcaagttaacttctatcttgttttgggcagatggtgtttactcaatgttaatgacgactcttcagatgagttttacagagtattacagttttgtaatgcctgccgaaaggtttgggagcttcaagatgttagaatctagcaagcctccgccctcgaagaaatctcgaaaagagcggactcggagaaagtcgtcgggattgacaactcccactgtggttatggaggaagaaatttggaaagatttccctgaagacctttttgaagctgttattgcaagacttcccatcgtcgcttttttccgctttcgatctgtttgccagaaatggaattccttgctgagttcagaaagtttctctgaacagtgtgcccaggtccaacaagacaatccctggttttacacaataacccatgaaaatgtgagtgctggagccatttataatccttccctgaaaaagtggcaccatcctaccattcctgctcttccaacagagaccattctttttccagttgcttcagccgggggcttagtctgttttcacgatattggtcataggaacttttatgtgtgcaatcccctgactcagtcacttaaagagttgccagcaaggtctgtcaaagtatggtctcgtattgctgtggggatgactatgaatgagagttcaactggcggtggttacaagattctatgggtgggttgtgacggggagtatgaagtctatgactcacatagcaactcttggaaccatccaggaaatatgccctcgaatattagattgccactgtgtctgaactttcggtcgcaggcagttaacgttaatggcaccatttacttcatgcggtcggaccctgaaggagttgtgtcgtatgatctgttcacaggggtttggaagcagtacctaattccagccccgttacatctgagtgaccacacacttgctgagtgtggaggccggatcatgctcgtcgggctgctgacaaagaatgccgccacttgcgtgtgcatatgggagcttcaaaagatgacgctcttgtggaaggaggttgacagaatgccaaacatctggtgcttagagttttatggaaagcacattagaatgacttgcttgggtaacaaaggtttgctcatgctgtcattgagatcgagacaaatgaaccgattggttacatataatgtggtgagtagggaatggctgaaggttcctggctgcatggtgccacgtggaaagaagaggcaagggattgcatgtggcactgcctttcatccatgtctgactgctacggcttgattcagttctgtgattcttacagctgaatgttgagttgagtcttggagtcttctcttgccgcatcataaagggtggctgaaagcttgaacattagtgtgtttcagcccaatttttcattattgttttaattaagtagacatataaccaacatttgtggcaaaaattatttccccccttttgtggaaacttgatgaaaaacagtttgcgttatttacttcttttaatttatgtattctcgtattaatcttttcctaggaagataagtacttgaagtcttaatatcgtcaccacgaactacgaatgaaattagttttgaagtcgtagtgatactagtttgatattaggatatgtagaaaccacatctacactagcgggcatatcacaaaccattcacaaatatcatcaaaataataaaccatagatgaaaggtaacaaaatgcagacaacagacgaacaaatggggtctgtttattaatatatatttaagctcttcataacatgtgtaaccctctggtctcgtaaaagtatattaacttcctaaaacaaattaaattaaaccaaaaaagaaaaaaaaaatgtagaagacgataagtaacacttcagagtacggtccgcgttgcaattatgccatgcctccggttgtggcagtcctgattatctgaaagagagctgttacagagaaacaataaagttggatgagcaataactttcactaagaaaacaaaacaatggtaactggaaaagattgttttaatcaattaagtaagcaatatatgagattgagtcttacatgatccaataacaacgaaaatgaagaacccaagaagaatagggccaacagggtagtcctttcccttcttggcggtggtctcaggcacagatcctcttctagttatgttcttatcgaacttctccaccttcctatctgatagacgccttgatgtagtctgtacacaacaaccaacaaaaaaatcacattaggtcacaggagcgaacctaaaattacaatgtgggaaaggtcatttttcgaccccaaatttacaccgacaattatacaagttattagtttggggaattctccatattgaacaacgatccatgtaaatcaaagctcaaagcaacccaatttgcaccgctaatacgaaatcatgtgacctaaattacaagatctatgaatctaatgtctaaaaacactaccgacattatggaattcaaactgatctgccctaattaactaaataataatcctaaacggaacatataaactgaaattctctatcaaatagatcagatcaatatcaatttaaattaatcagatcaagtggttaaaaacacctatataatacaactcaaccgaatatttgaacattatcagagatcaaagtttgaaactttaccatggttacagccgcaataaaatagatcctggttggagaagaagagagccgcaggcgattcgagtttctcggtcttatttctctctattttggatggatcaatctttgagaaacgtgttctgtttgttgatttatagcagtgtgaggcaccaagtcaatttcgtcagaccacgtaagtttgtatacgtgttcttacattattcgtccttctcataccatattacttagctggcattacgcgattcaagctgagctggcacagactatgttgtttaatttttagaaaacttcctgttttataataggacttcttcaagggtgcacccaattttataatttttctttttagcttttttttttttaaacaatttttcttttagtttaaacgcttttgatatcaattttttaattaatttttattttaacaattaaaaaataaaatatttttaagatatatatcttat

SEQ ID NO: 185273 - DNA, 2456 bp, Cannabis indica
gtttttcatttaactatttttaggtgataatttctcattcactattataattattttgagaattttaacaatattcatgacatagaagaatacaaacttttaaaacagctcattgataacaagttagtcttaatactttgaaattatagtatatatataatactatttcttccaacattttgtagctttctttctcccaccaatagttgaatatttagcttcgtgtaatttttattcaagtgggtgttatcatttttgttttaaacaaatgaatttggatgatttgtactattattattattattagttgtttagtttataggtgtcattcttattataaaataaaataattaagttagtcgcttctactacagaggctcgttaaaaagaaaaagttgatttaacaggtgaaaaaagaaaaaattagttaccctacttaacacataagctaaaaatctctttctaataataacttaacctctaaacctctattatttatactgagattgttgaactcttaaatgtgaagtaaaatgttgagctaaaataatatgatggcatattaacagagaagagaaattattgccccatgacattatttctatcaactctacaagacatgtcaccttccttttcacaaaagggaaaaaataaaaaataaaaataaaaataaaaagactttcttgacaaattctcctaatccatttacaattcttttgttttttttgtctcaatgaataagctcttctttttttggaagaaggtcatgaagaggtggtgttgaaagtcaacgttattggccactagtgtcccatatcatttcaagaatattgagtttgatcacaactttatgtatttttttttccttcatcttttttctcaaatcggtttgtaaaaaagttagtttgcatatttgccatcatatattatcttctgctctattttgacttcttagattccttacttaagaccctacttgtctgctaagggtgaagaagaatgcatcttcattatctttatgtcagagacatggaaatctcttgtgtttagatttgtattttcttctactctgttcatgtgtatgttcaaaattaccaaaactaaatatgcccatcggaaacaaaattatctttatttgaaattggctttgcaaaaatgactatgattattattacccatttggaaatgataaccaaatagccaaagaaattaaaccaacaacaaaaaagttatgggatctcaatcatttcccattctcttagtttaaaagggggcctaatttaactttgtgaccatgtgacaagcctgtgaaaaagtgaaaaaattacaaaaaataataataaaaaaaatctttcactttcttttacttttcttctttctccaatctcatagcagagaagatttgtctctgcttttttcatctctctttttaattcaactttttatgagtgacgctaaacccacaaaagcttgattgttaattagtaattattgtaaaattagaaacaaattttgcaaataattttttggttattacacgtttcaattgcaaattacgccataaattcaataattcatatgactttctcttctagcaaaactaaccaaccttttttttcctttgctttcttctaccacggatcaaactatgataaatcttaaactagtagttcaacttaattggctaaaagaaaaatggaaaaagttaaaaaatactataacttgttcatgaattcaatcccaaaaactaaaccatcaacttacactgacatttttttaacttcccttttttgggttttgaaaattaaaaataaacaataataaaattacaatatcaaaccatttgcaatggcttgattagttttgagatttgtagtttcataaaccggaagttcttctctgtatcttccaatcccaacaaggtgatctagctcaaagagatcagaactcgaatagctctcaccatcatcatcatcatcatcttcttcttcttcatcatcagcttcaccattaacatcacagaaacctctaaggaaacttcgagtttctctttcaacactcttcttattattatctttcctgggctcttcttctttcaacgatgagcttctaacaaagcctctaatggctgacaatggcattaaacttgggtcctgttcataagcacatttatcttcgcctagaatcacattaacgggataaaaccttacggaccttttggtagcgccaccatttagagtgtgtttggctctagaagacgtcgtcgttttgctcagacaagacctagagaaagtggaagcagtggaacaacccgacttagaaatattctccgaagtcacatcctcaaccgctccaacataacacatttttgcctttttaacgttgcccgaattgaaaatagagttaataaaggtggctatacgacccccaggcgaaatgggttgcttcactttttt

SEQ ID NO: 185274 - DNA, 2741 bp, Cannabis indica
tgtgttgaagcttatcctgtatattcccgggtttacatcatcaactacgctcatcaattgaccacttcgtccatcattatttgttgtcgaagaccctagaaatgcccaaccacccgtgtatgactttccaaataagggacgaggttgaggacccttccaagtctccaactgcacctcaataccagctgctggagaaccccgagatacatccaagacatgagttgtaatgggtggtcgtgttcgagttggatttgggtttgcacttgttttcccaactgatgcgtctgaaacagtagtagcagttagatgccctccaataacgcttacgcgatcttgtaagtcaaataacaaaagataaattaatagaattctcaacatggggatgggacaatcagcaaaagttaagaaagtattcagtgatttaaaagtagttctgaaaaatttaaactttttttcaatcagacattgatagggacacaagcttgttaaacttcaacatgaattttacagtgaacagcttcactttgtatgcctttgaaagaagctcaaatccagtagctttgtttcttataaacgaaaaatcggcttacattctgatcttcttctataattaaaattcaaaaggagtgttaccttctgctttctttgaggcagtttgatgaaactgatcaccccctgttgaagaaacattttctttagttgaaaagagcttcgcaagtcgcagttctgttatcttcatctgctcttcagctgcaatctcaaactcaactataggcctgttcgggtaacgtttctgcaaaaaaaaaatatataagaaaaagaaaatctcagaatcttcatttgtttttgcaaattctagcataaccctcctcaccaattaatagaagcaatacattctccattgcctctacatatttttctagaacaaacctatacagattacagaaaacaaatgtacaatcttattaaaaatgaaaaaagcaccttcaattcagtaagtatttcatcagtgcttcttccagaagcacatataagaaaaacaaatccaaacttctccctgtacgagcattccattcataaagttcctgtaaactccaaatgaacaagaatcaagcaatgaagacactgttgatatttgaatatacatacatatatacacacacatacactcacccacagccacaacaaccactccacctgaatttgactagggatttttttttatggattaaagtttatattacaaaaatctatcatcggattaaagtttggtagttacttactgtaatataaaatttacaaatcactcacacatgagcaatgtagagcttggttaggcttttgacttatacactcacaagtgttgcaaaaacagtcattatgaaaagttttattagtaaattaacttgctaaaatcttttacactatgctatcataaatttacattgtggttattttgccaatttaaggccttttctttgatagatttaatcacactaacacagtatttactcaattaccaaaatctatcgtcagattaaagtttggtagctactaactgtaatataaacctcacaaatcactcacacatacatgaacaatgtagaactcggttaggcttttgacacccttgtacactcacaagagttgcaaaaagcagcaattatgataagttttattagcaaaataacttcctaaaatctattacactatgctaccataattttacattgtggttattttgccaatttaacattttcacgtccacaacaataaccactccacctgagctggactaggcttttgacaccctttgatcggtgcttttacaatacacacccttaaaaagagtgcaccgatgcacccttatctgtttcgacattcagaaaaactttttagtccaatttatttttatagttgtgtatgttatttaagacatcttgcaaaattctaaaaattcgaaattatttacaatataaaatacagtgttcaatcagtcttttcacaagcgtataaaataaaagagttgtaacagattctctttgaaccctatttactctattgttagagtcttaaatttctcgaaaattcttaaaattttataagatatcttaactaaaattggactaaaaatttctctcagataccgaaatagataaaaggtgtatcgatacatcctttttagcaaggttcattgtagaattttcctatcaaaaaattcccatgaccaaaatccaaaatttgaattgaaaaccataataatttacaaaccagtaaggtagagctagtagcagtagctaaagcagtggattgctctcccttactccacctacaaaacaaaaccacaatcatttttctctttctcagatcaattaattagaaatggaaaaaaagacaagaaagaaggaacccagatgtggattttgagataaactcaactgagcactagtggaatgagctgaaggagaaggagattgtccgatctgaggatgagcagagaaagcttggagccaaccatggacatcgaccttgttgaaccagatatctcgtgcggcggcgattgcttgctgaagagaagagaaaggagatgcctttgccaattgttgggcgaatctggtgcttccacagcaggccaccaactcttcttctccatactccatttttggtctttccttctttctttttttttttggtgaaagaaatattttgttagcatttagaatgaatagtataaaaaaaaa

SEQ ID NO: 185275 - DNA, 4099 bp, Cannabis indica
tttttttttttgctaagaaaaactgcttccattaaactgaattaacgatattggtgagtacatggggactcacctcccaaaagtttagaaagccattacaaacattatttaaaccccattgagcaagcaagtgagccgccctattagactgtctaggagcccaaagaggggaaacatcaaaagaaaccataagagattttaccagagcaaacaatctagaaatgttccagtgaggagcaatgtttctgagaaatgccatcaccaaaacttggcaatccgaaattatatccattgcagcacaacccagtctgatcatcacctttaatccccagtacacagcccataactccccatgaatgattgactgaaattgggttttagaggcgtacatagcaagaatgtgaccattctcatctctgatcaccactcccaccgcaccgattccatctttgtttgcaaaatccacatgtgcccgtatccttcccggtctcggaaccagccaccgaattgccataatcccaggagggtccgtcctgtgagaagcactacgctgcttactcccacagtgctgcaccaactcacggtctatctttcgcttcatttcatcaattgtccaaatcgtattattgtgatacttgtcattcctaaaaaaccacagattatgatacatcacaacaacaaacattaagaattcctccttatcattctcagaaaccaaacccccaaaggaccgagggaataacctccactttaccacctccgcaccagagtgaagagggaaatccgaaggttttatcgcccatttactagactgccacagactttgagtaatggggcaatgcaacaagaaatgagcagacgtatcgttaccggtggaatcacacagaatacagttaccaacattgttgccgaaaatataacttagccgtgatccaaaagggagacagtcagttagaatcttccaaaggaacaacttgagtctttcgtgaataggcgacttccaaagagccaggcaggttttatccttcccaaatctaagcgaattgagatcccaatacgcttgcttaagagagaaattccccgtgggagaagagtgccaaatgagagagtcaaaagggctcaattcattgatgttgcaggaacttaaggaagtggcagcctccggtctgaacagcctctcaattctgtcagcgtcccaaacttcatcatcagatctcaaccagccgagtttctcctcggaaacaacaccaggattcagatgttgaggcccaaaaataaccccatcagcacaagtccaagagcagtgccaaaactccacattggaaaaacgtcccatgatccacaagctttgccttctaatgaattctctagtcttccaaatgcctctcaccacatgggaagcacccgaaccaagaccaccactccaaaaagaatggtagtaccaatacttcccaagaatgatgcgacaccagagagactgatggttagacaccagaaaccacgccaatttggcaataaggcagaaattaatgtcctggaattttcggatgcccaatcccccacagctcttgggcctacaaatcgactcccagcttcgaagagcaagaaaccggccctctctcaccctccccgtccaccaaaaccttctcgcaagagcatcaagagcgtctgtaatggttttaggtaggagaaagatggacatcgaataaatagggatagccgagataacattcttaattaggaccgttctggcagcctgcgatagaagcttagctcgccaaccatccatccgattgcgcacattatcaatgataaactggaagtcttgtctccgattcccagaaacaaataaaggattgcccaggaaagtctcatcaccttgcattatattgaatccgagggcttcagctatagcttccccaacagccgtatcacagtttttggacaaaaggatttttgatttgctcacattaatcctttggccagaccaagaacagtatctatccagaacttcaacaagagtgtccacttcttgggagtccgccttagtaaagaaaatggtatcatcagcatacattaagtgggagaccgaggggctattgtttgacacacagtagccagttaattctcccaacctctctttttccagcaccatccgagacaggatttctgagcatagaataaagagatagggcgagaggggatccccttgtctcagaccccgagatggagaaaaagcttttgtgaggcctccattgacaaggacttgaaaagttacagtggttatacattccattataagaccagaaacccaatcactaaagccaaaggccttcagcaccgttttcacgaaccctcattcaaggcgatcataggcttttgacatatcacattttatcccaataaacgcctgacgaccttgcctttttcccatatcatgaacaatttcatgggcaatgattgaattttccgctatccatcgcctcttgacaaaagccgattggtagggggagataatcttatccagcaatatcctcaacctattggccaggatttttgctatgatcttgtagcatacattacagagactgatcggccggtaatcatcaaatttataagcctccgtcttcttagggataagaaccaggaaagtccgattaacctctttagtgaaactacccgaagtgaagaattcttggacaaactttactgtctgagctccaactgtctcccaatgggtacgataaaacttagccgggaatccatcagggccaggggacttcagggctggcatatcccaaaccacagcttttatctcctccattgtgggggtcgccgacatcattacattctccgaagggagaatgctcggattaaccagagaaaagatctcctcaccaatcaccaggttggaggacttaaaggattcaataaagtttgagcgaaagtaatccaccacttgtgctcgattttccatccagtgaaccccatcctcagaaacagcccaaataaagttctttttccgccttatgatcacagaggcatgaaaaaaacgggaattgcgatccccatctctcagccagagctctctagatttttgcttccatatcgcctcttgacgggcttcgatctcatcaatttccatcatcacagcactttctaactggagattctcagcagaagggcttttattctgaatctcagtcaacaccttctctaagaattcaagttttttcttgcaatggccgaagcactccacattccacttacagagagccgtggctgtgttgcgaagtttggtacatagaatatagctttggaagccataaaccatctgctgccaagcttcattgaccacccgactacatccttcgtccatgttccacgcatcaatgtatcggaaagggactttaaacctttcagactccatcacagtgttaagaataatagcagaatgatccgaatgtctaataggcaaatttttcgtacctgccttggggaattgggagagccacgaagttgagcatagcaccctatccagtttctccctgatgagcttgttccaatcttgaccattagtccaggtgaacatcactccagagccccccagttccacagccccattatcaaaaatgaagttacgcagacctctgccctctccatcacacaccggtctacctcccattttttcctcctggcacaacaccgcattcatgtcccccattaccatccatgcctccccatacaggtgcatgtttgtagacatagaatcccagaacgaatctctctcacttcttttaggaggggcatagatgaaacaacccacccaaggcttgaaattacgatcagccccacatcttacaattattttatccacactagaatgaattatttgaacatcccagcccgctttccagaacaaagccaggccaccagaagccccaatggaagaaaccgctagcccatcaagaaaacccaattgctgccaaataccttccatgtccacattgtttcttttagtctccatcaaaaacaccagatccggattcacactgcgtatcaaagaacgcagcgaattgactgcctgaggcttgccaag

SEQ ID NO: 185276 - DNA, 1744 bp, Cannabis indica
gaagactaattttagatttccgaggtaattatgtaagtacgccacctaaatctgtaggtagatatttattaagcaataaaagagtcgaacctcgaacggtctatataaaatgttcatccaaatcaatcatgttcctatttatgtagtacgattttggacgtaatagccagatccaataacagaaatggattctcagctgtttgaccttgatcaacactacatcgtcgtgtttcccttcatggctcacggccatctcattcctttcttagccttggccaaccaaattcaccgaaggacaggcttcacactcatcatcgctacaactaagctcaccctccatcatctccggcgatctacctccagcgaagatgatcacgaacactcaaactccggaatccatttcgccgagctacccttctccagttccgaccacggcttgcccgacaacactggaaccactgagaatttgtctcgtgcccaactaatcgacttcttacacgcttcaacatctatggaaactcctttccgtaacttcatccacgaatgtatcggtaaacatggacgccctccactttgtattatctccgacatgttttttgggtgggccgtcgacgtggcacgtagctacgacaccgtcaatgtcactttccttacttctggcgcttacggctctgcagccttcatttctatctggaacgaactccctcaccggaaaacagagtctgaagaattcgaggtcactgggttccctaaacggtgtcggttccaccgttctcagttacattactttttgagagcagccgacggttctgattcatggtcaaaattcttccaaacccagttgaggcttagtctcaaatcgcacgccctgttgtgtaacaccgtcgaagaaatcgaaccgctcggactgcaaatcctccgggattacagtaaacgccccgtttggtgtgtctgtccgcttctccccaaagctgtgttaaacgacaagtcgttttcaccttcttctctttcttctttcagtttttccaaagagagtatgtcagccaacaagttgttcgagtggctcgattcacaagaacctaagtctgttctgtacattacgtttggttcccagaatacgatcggagcaacccagatgatggaattggcaatcggacaggaaaaaagtgagaaactttcatttgggtcataaggcctccggagggttttgatttgaaaggagagtttaatctagagtggttgccacaagggttcgaagagcgagccaaggagaagaatcgtgggttgttagttcggaaatgggcgccccagttggacattttagggcataagtctacaggtgcgtttctgaaccattgtgggtggaattcggtgatggagagcttgagccagggggtcccgatcattgggtggccattggcgggggaacaaaattacaattcaaagatgttggtggaggagatgggtgtgagtgtggagctgagtcgaggaccttcggggaccattgctggggatgaagtgaagaaggtgattgatttggtgatggcgagagatggtcaaggagaagagttgaagaaaaaggctaatgagattattgcagatacgagaagccttgaaagaggagggagaaagtaaagggtcttcttctcttaaagccattgatgcttttgtttcttctattgtgaaaaatagacaagaaaatgtcaagaattaatttggatatgaatcatatcatatgataatt

SEQ ID NO: 185277 - DNA, 7119 bp, Cannabis indica
aaaaaaagagttagaaaacaattcagttgagggttaattgtagatcaaaaaaataaaaccagagtcaaacaacataataataataattataataataatatattgggttttagttcaaacaagtgacactggttttgtagatactgtaggtagacagaatcagatattgaagtaacagactcaaaaaaaaatatgaaactggaggaaagcaacccagtgtattgagctccagcaatgcatgggccatgtgttgatacatttaaatcattttcggtgtactgatgacaaaaatcaattcaataatacagtgactgcaatattttataaatagatggtagctgatggttagttgaattcatcggttagaagggaccaagttgtatgaatcaagtctaaatgtcaaaaccagctccagctgacatacaggatcaaataccaccaaccaaaattttgtaggagtaaaatgagtacataaacacaaataatagactcaatatatttattgtgttaaatcatataagttcagcctgtaaaagtattagtgctgcttggttagccgatataggtgagagaactgttgcttcaaaattcagcagaaccactttgatttgtcttaaatcatttgaaaggcataaaatttccttctttataaggataccagtgaatctaacgaaggttggttaatttttatttcgagtttagactccagacttttcacatagctactatgcgtaaaactagtgagaagatacaaatggtttgtaaacaaaatgcacgtcttgagataatagtaagccctttacaaaaaaaaaaatataaaaagtaagaaaaagaacaaaatgtgaatctgtgatcacaacaaaaaagcagcagctatcgacaacataggacattgagcagaaatgaaaaataaactaaagtagtaacaaacatttttctcaccagaaggtaggcgtataatagctggagctatagcttgtcctgttgaactggtaatttatcctaaacactgatatctcaaccataaaagaataagtaaaaatggagaaaaaggaggaaaaaaagaagatcaaaacaatcaacaccagttgactcttacacaaaattaaatattgaatagatgataatgcgtatacgatatggaaactgtcatatatgacactgcacatatggtattcataatcgaaaacaaatatggtattttacatgaatcaagtactgcacaaagaaatgcattaagtgtagaaactgtcatacacgaatataatacttgatggaccaagaaaagtatctagacaatattcaccaggaaaacatgcacggtagacaaataaataattcaggaaatttgagcatacgaaaattattttccagatgaattaaaatctggatccttgttaaagacaggatgcttgacttctgaaaatgaaagaattttgacttttaaaataaggtgaatataatgacagtaccgtgacaaagtatcaaaagcaatgaccagaatagcaacaagaaccaacactcacttacgctcttaagggaaaaaaacaaaattcaaagagccattgaatccaggggataccttcatacttttggcgaaacatcaccttaggatggcgaggtgttttcatcctttgcttccaattcttctggtaaagtgctctcatctttaacttccaattttactggtgaagtgttctcatcctgtgctcccaattcttcttcatccgccttacttacaaaaacaacaccatttgaggaactagaatcctcttcaacgacagcttcttgcccatcattttcctcattccccgcaatctcctggagagaataaagatgcaaacaaaactccaaaatcttatccagggatagaaatgagagaatctcaaattttaactacagcgaacagtgatgtaaggtgactaacattgataataacaaagcacattttatttacgaatatagcatcctgatcagccaaatgcacacccaaatttacataaaaaatatttaacagtttatgagaaagtatgtgcaggcaagttgtatgtgtgtatacagaagctttccgctcgtgaatattaaaaagataaataaaaaaatagtgtgatgtttgagatggcccagttttgtgatatactatcataatagaatattagcataattatatctatgtataaaacaatggccctatgggttagtaaaaaaaacatggtcctatggattcaggatgatgagaagtgaccagaggtataacaatatttctctattgtcggttaaagaattttagctacactacaaaaatctctgtaagaggttagcatttcgtacctcatgaacatgttgtccattttcagttggatctttgttttcatcaatttgcatgctcttaaaattctcaaggaggttggtggttgatttttgagcatagatcgggtacagttcagcaggaggataattgcacctggaaattgtatccatggcaatccactatcacgaacaaataaatgaagactagacagcataaacggtttatcttagtgcatacaactttgaacatcaatcatgcacaataaaagatcatagagaaaaaacaaaagtcaaatacctattttttccagtttctgcttcaagggaaagagaaacttcccagtcgtcaaacaaattagggtattcttcaggatcagctaatgactcagcagctttcttattgacctgcattcattagcaagtacactaaatcataaattcattggttcaatgtgtggaactgaaaaaatggaatgatccacaatgtttttatatttcagttcgtaccactttcggtcctgtgcatgtctcagtgacatgatccaaaatctttagtaatgaataaagtatgcagaaatctaaccttgtttaggtcatctctccaaattgtgactatctctgacaccttgcttggaaggtaagatcttgccattaaagcagcttctggtattcggttactgcaaggaggaagtcaatactttaaagcctttattaatttgaacatggtcattatgcagattattcagaatcatccacaatagaaatttagaataggaggattggtacttaaatgtggtcaacaaagaggccaatggggatgtcaatttcttaaattaataataacaataatataaaaacagagtgctacatgcagtgtggaagtatacctgtctatcagcagttggatgcactcttccaattttcccagcatgaataaacaaaggaatgccacattgttctttccttgctctttggcaagggaaacaagttttagtataccttgagcatctccaatagaagagtagaaaagcaacaacccactcaaatccattccatgcaatagacaagtttcagccaattcaaactgtacaaacgattaaggcacaggagattattcgtaaagaaagaaatacacaagctactgctgatgtttattcatgacagccatatgatgcatgaaaattaattcaagtgaacaaacagtaaaaacataatagaacgtaaaattgcaaaaagttggtgatataacctgattatttgcaatcgatgctgcaacttgcaacaatatagtacctcaaaatagcaaatagctcacttgcttttgtaaaaacgaaatgaaatatgataactaaaaagtagacaatttatcctaccaataatcagttttacctgccaaagtaacttgtcaccatgttctggcagaaagaggtcaaagtcatgaaaatacaattctatagtaaatatgctcctagaattcctacaataatttttttcttcatttcaaatttttggtcctggtagttcgatctggagacctttggccccaaggtttttgattctatgggcttccgaaccttggaacaagcgcctaccagcactttccaacactcctccttacctctagaccacccgttggggtttgaaatcctataataattatttagtggtcctaataatgcagtataatagacacctcatttttttaaagacgtaaaattcattagtgtaatgacttgaaaatgcaagaacactttttaaattgaaatgtaaatcctcaaaaatgcaattatgtttcaacttgacatcgagaaatgattgaaagtaggtcaccatcagaaatttcgaaaccatagaactctttgtactaccagcttcaggatacaatattcatgttaaagaaagaaatgtctcttgtgcatgagtaatgactaagtgacaatgcgaactaattaaatatttttaaacaaaatagatatagatgcagaatcaaagtggaagctttactcttgtgccaaaggctcatatgaaaggggagaccatattaattactgctcataaaaagtaaaggaaagagaatacctgcccactggacatagctaattctcccagctgcttccacttggattcactttgggctttggtagcaatttcctgaaagccaaacaagataatgaacttgtaaacaatagaacttagatgtagttgttgtgaggaaaactttaccacagttgctcattagagaaaagttccactactgaacaatctggcattgaaaataaagactctacctttgcaatctcaagtctcccaagctgtatagccagatcaaatttgtaatcaggatctgtagccacttctagtgcatcttccaacatccctcgagattccaaaaaacgagcaacactaagaagcaaaaatatagtatcagttgcatttcagaatgctttctatcaagacataggataaatgtcagttcagtggacatattcatcaggataaacttgggttgtttgtgcccctcgggaatgttatagggcttcagttctacactgaaatttgtgcaaatgaatatttgctagttgggatcaaagttgctccatgcaaacaaaaattagaagtctcttcagttggcatccaaagtccaaactaggcgtcaaaccatattatggggccatgcatattggtcagactagaaatatatactaaccaactagctgaagtaataattaccagcagaattttacaatataaagccgactcctgtaaactaccaaaagaaacatttagaaaaataggcaaaatggaaaataatgctcattttatttattacagtggagcttccttttcacaggacatgaggttgtactttagcatactacgggtacatgattctgcataataatttgcctatgcaaacaggtgtttccttacctattgaattgttctggaggaatagttggtaaaatttgatttgtgcgatctagatctccacgcatcacaagagttttgtattcaatcaagctgagaagtaaagtgtatcccatgacactacaaaataaaaagctcagattaaaacttgaaattaatcttgagaagtcaaatgtttctagaacagataacaataaacactcacttgaagtctttatcaataagataaactcgactttgattggccagataacctaacaagtacataggtcggtccaggtggaacaaagttgtcacctaaaatatcacattaaaatgatttagcaattgtttttttaatcacaactagcactaaataaagatgttgctgaatttaaagcttgttcacctctccgccgacacagtaattaagtcgccaagaagagttagtgtagatgaaacaatcgccaacccaaattcctgttctggcacgatcatttacttcatgaagaagctcaaaagcatcctcaacaccttgttcatcaactgaacttccactatcaaaatatgatgatacaacatctcgctgccaaatagaccatttagttaaatgtgggaccccaacctcaaggcacttcaatattcaaaaagctaaaacatattagtgagtccaaatagcaaagaagtgatcttacattgtattttagtacgtagaatgatgaatcactaactattgccaccaaatcaccactatcagcccaataaacattctagaacagtaggaaaaaaaatcagaagtaaaaattagtgaacatgatgatataggcgataaacaactgacatacatatgaaattgttcatactttcacattaacatcaatccgcctgatcaatctgcattcaatccagtcgtaaaagcagatgaagtcattagagcacattgctagtaacgttcccccgtacacgtgttcacataagaatgtaggtcgaatacttttcttctcctaaaaatgccatttcagtaaagctccattaataaataaattgttaaacatccaataccaaaaattgaagcaatctcagatttcaatcatctttggcatcatgcattcagcagggtcaaacctggaatgtcttgctaaataatttgatccttgttgtactttctctaactgcatattctccttctgatgaccaggcaaattccagtgctgagccaaaggatctatttctccaagctaaggctgtatatataatgtactcgccatctccacaaacaacaacaaacctcccattgggattgtgttttaagctctgcaccaaacaaaattataacacgctatttggtatgattgcaaaatatgtgaaactagaaactgactttacattgtattattacaagctaaaccattatagcatgcagactataaaactaatcatctcattttatgttgattgggtactcaaaaattacataggacgtattagaccaaaccaataagtaaatagctagagttatagtagttaagacagcaaatacaattagtatgaatgaacaattacgtcagtccattgttataataattgatcatcaacaaccaaacacctgccttaaaaaaaatacacctagaaaccatggatgataagatgatggtagaagctcaagatatagagggataaagggcaaaatttatccctctttttcaaatattcttgagtggatactttaatagaaacctaggtaggaaagaataattgtcatagcagtgtacaaactttcaaagataaaagctaatatcttaaattcgtcaatattcccgtagaaagggaatgcagtaagaattgatccaatttacagtggaatgctctcttttatattttgacaagaaaaatcattaatat

SEQ ID NO: 185278 - DNA, 7779 bp, Cannabis indica
aaccaatctacaaaatagggaccagaaacaatcaaatagctgacagattaacagaagtgctaaattaactagaaataagctgacatctttcctacaaccacactatcttcccaactttctacaagaaaagaaaagcctggcacaatcaatagcatatgctcagaagccaagcgtaacaagaatatctcactgaccaaccatcaccaagatggtttgtcttacatgttaaagcctcatcaccgcagaagacaatttaagttgcaagatggaaagaattaactagagagaataaaaccacactatctcagaatttctacaagaaaggaaaagcatgacaccatcaatagcatatgctcagaagccaagcgtaacaagaatatctcactgacaaaccagcacaaagatagttcgtctcacatgttaaagcctcatcaccgcagaagacagtatatcagctagacagggttcagtttaatccagaaaaagatatggtcctccaaatataatggctcaacaacagtacaaactaccaacagaaacaaactgatgcctttcctacacccacacactatcttcaaaacattcaacaaggcaaataccaaaaccctaagacaatcaagagcatatgctcggaaaccaagctaagtgtaacaaaagtacaaagctatctaggaatcacaatgacaccatacctacaatgataactatcccccaaacattctagaaggaggaacctagatgcctctgaagacatgcccaagtgtaacaaaagtacaaagctatctaggaatcacaatgacaccatacctacaatgataactatcccccaaacattctacaagaaggaacctagatgcctctgaagacatgcccagaagccaagcgtaacaagagtatttcattgaagaaaccattcaatatggctaccccttagatgttaaaggcacatcaccgcagaagacaaataaatagcacatgcatataaacttgaacggcgagcatttactgcacctcaattcctaacttgacattctattttgttaactagagaacaaaaaaatcaggcccaaatcatctatgaaaatgacatagtgattagtaaaaataaaaaaaataaaaaaatccaaggagaaacatgcattatacctgatttttgacagcttcagccatcctaccgaactctttcttcataacagacttatgaagcaaagcagcaggcttgttctgcttcttggtcttagatgttgcaagcaacacaccttgatctttaccagcgggttgaacagtgacagtcttcttgttagacaagcctaatagaagaatccaatcataagtcatctaaaaatatttcgaataaccaaatgttccagctttgaacttaaaacaaagaaagcaaaaaataaaagaatttacatttcatcaaataaactttcttatcattaaccccatccattatttgaacattatatgacaaacaggtttaagatctcatcaaacataattaacagtttccagtactctacgaattgacaaacattagatattaaatcataaaacaaacgcaaacgaaaaagaagagttacacaaaaataaatctcgtgaaccaaacaatgagcaacataatcaaataaaacggcttcaggctaaacaaagacaaggcaagtaccagagtgcttgtacgagttgagattgcacaagttgttgctctccttgctgaactgcacacttgcgttacctctcccgaattgcttcacgagaaatgagttgttgctcttaacgatctcccagatcaattgcccaggtacggtggccattgcttcctgccctgcaacacataataaaacattagatcatccataacaatcccatcaaaaccaccagttaagaactttgaagaagagaaagaacctctagggtttttacttggggatctatcggcggatcttcgaaagagagtgtgagagcagttagaagaagtaggcgccgatgttaggttttatatactcaaaaaccctaattgcctcgcgctgaagccctggaagtactttattacattaaaacccttcgacgaaaagaccataatacccatgctcaatatacatttttctatacgacacatcatttgttttgaaagtgacaagtataatgtcgcttgaaaactcagaactgtagttaaagagtataaacgacatactttttcttttgagataatataaacgacatacttgaaaagataagcagatggatctatatcccctaaatttggaataaattgagtaatacttttttttgtattaattaatcaaaaatactttattttattaaaatatattcacttttataagtgtgttgcttaatataccatcaccctccatagcacataatttacattaacttaggagtataacaagaacatcatttataaaaattggtatatcttaaaaaaatataaaaatgaaggtaaaaagtaaaacatataaagtaaagtgggtatacaatgtaattgtttctccaactttgccattatttatctcaaaaacgagttatcattttagattttatattttgcaaaaattatttattggattttctaatttgataaatgacacattaaatctagtattttttaaaatattactaaatagtacactaattaataatttgtcaaaattaaactaaataataacataatttagaggtattatgacaaaacttattattgcatttgttcgtattataaattatctttaagttagttatattaaaaaaatatcaaaatagatctcggggtcttatttatactattttaaaaaatacaatgtctattttatcatttaacaaaacagagggttcagtatcatttattttatacaaaaaaaaaaaattaaataacatctaaggttgttgtgtagttattgctattattattatctttctttttttttttttttttttgagggttgtgtaattagtgagttatttttctttagcaaattatgatttttgtcttctcaattttgatattaggcaggcaaaatttctcttcgaactattgagaatgagattgttagatttaagaacttacgtccaattttattaatgtaacaattgtacatgtactaaattgtgcctttaaactttgatatctaccaaatcgggtccccaaattttaacatatattaaattatgcccctcaaactttgacatgtactaatttattcctttcaaactttaacatgtaccaaatcgtgctcctcgaacttttatatctaccaaatagtgtccccaaactttgatatataccaaatcatgttccctaaactttcatctatgccagacttttgttagtaaaattagacaaatgttcttgaatccaacaatcttaatagttcaggaaaaaattttaacagtctaaaaaattcataacacatgatttggtacttgttatagttcaaaggtgaaaattctaattagcttttttattttgtcaaaataaatagtgtcacagtgactactttcatgagacttttgtttctttataatttattcatatcgtgtcactctatttatttaactataattcttatttaaataagatatttgtaaaacattttaaaataatattcgtaaagtaaaaaattaatggaaaattctacaatgcaacccttaaaatagaaatattaatgcacccctatctgttttagcatccgaaataattttttagtcaaattttttctcttggtcatgtacgttatagttatttaagacatcctgcgaaattttaaaaaatttagaaaagtttaacacgccgaaaattatgttcaaacagtgtgttccacgcgtgactattttattttatacgcgtgtaaaatagactgtttgaacattattttctatattgtaaattattccgaatttttcaaaattttgtatgatatcttaaatagctataacgtaaaagaaaaatgaaaaaaaattagactaaaaaatttttctggatgccaaaacaagttaagggtgcatcaatacaccccttttaaggggtgcattgtagaatcacccaaaattaattatctgatttttaaaataaaaatttcttttcaccgtagtaatatttagaaaaatgaaaaagaaaaaagcaaaacctcgtttgctcctccttctcacaatagagagaagtcaatatagaaagtgataggaatttttttttccaaacaagcttcttattcgaaattcgaatcataatagagattacattatcttaaaaattaaaattacattcaaaagaaaatggaaatagttacccaataattaacttggattggaagtgcagtagtaaatgtagttattaacctcatgaaataaaattcaccgaaaaaagaaaaaactaatacgaggtcgtcaacaccttgtattagattagataatctttacaacctcaactaatgttacagtatatatacagagccataaaaaaaacagcctccattaatcgtaatactaccagttttctttctacaaactactaggaaaaaggtgtgaaattgtacaaatggaagagagggaagcaaatgctgagagaactgaactgaatccacaccccaccatttctcaagggtgaaatcaaatccatggctaccaaacccaaccaaccatgtagcagtcctcccagcagcacctattacattttctcaagaagacagaaccaactttcatgaaatgcctgctgctcttaacaacgatttgtttgtcgtgccgagccattcactgcttcgtttattctgctaaatactaattttaggggaatgcaagctattacaggcccctttggtttcaataccactgctttcctctcttcagatttcttgttacctgtcaatgaagatagtttccttatctttttgggcaatagcccagatttctttgttttggttgatttacttgatttagaccgccgctgcaaaaccatatgatgctttgttggaattcttccacgtactgaagtccgcttatcataactcactcgaccaccaccttccaccggattgcgctccactctgctcaatagagtatcacagtggccatcctccaacgcctccacagcaagagggtggcctacaatagctttaccattcaatttactcattagggaaaccaatggaacatgaggtggcctatagttcgctttcacctcaacttttacgtcatataatgaggaatcagatggaccatttttggtggaaacatctgacatccgatatctagagtgaaccgtaaaacgggattgacgataaggaagtaatctttgaggtggcaatgagccatcttgcaaatccttcatttcagcagttggccctctcgcgttcagcttcatttcagacagatttttgccccagacatgggcaccatctccctcatcttcagcaactggtttggacttagcttgtaaaccacaggtgttggaacctgaggatccactaacgccattgcaatcaatttttttgtctaaaccctgaggaaatccatccggttgctctgtacctgctgaatagacattggattcatcatccatgtcaacatgcttttttgactcttcttttctatttttattcgtttgtcttgaattcctcttgcctttcaactgccactttgaagtgcctttctctatcctctgctccatatcagtatggacagcttctgaactggtagaaacagtctcgttaatgccctcatttctcaatgatacagcttctacctgactactttgactagattgccttttcagtgcaccattttgaggtttttcagataaacaagaaacaactacaggagaaacacctaacaaagaaagaaatgaaacctgtttcagaagaaaataccatgcaactctacacaaaaccctataaccactgttcaatatacagttacaaaaaagaaaaagaaatgcgagaaagatatgtgtagacctatgagtacttgaaatgcttaaaatgacatggcataattattcatgattcatcatcaacatccaggacactcgccttgtaatgatacaaagatgctcatgaggatatgcatactgacacagctcaaataatatttgttgatgtatgatctgaaaaaaaaaatatggttgatgtaggactccactaaacatatacaaaagaatattgaatacaactagctacaaacaaaccaatctgacatgtacacaggtataaaccctaactcagtatttcataaagaatctggaaactttaatgcagcagaaagtagtttggaatcctcccaagtcataacaattggcacatcctcatcaaccatgtaacaaacttaacatggacaaaaatctggcaaactcttaaattataaacatctacatcgaagatacctgcagacttcttttgctctccacagaatggcacctccaataacctttcagaagaatcattctcaacaaattcagataggctggaattttcattttctttcagcttgttgatatgggaagtatcacaagcgagttgtgaagtatttaaagaggtcccattctcacatgaacctccattacagtctgcattgttgttggccaccacagagagacttttccttgattcagcagattctagagcagaaaccttgccatcagataatccctgaagaggtgaaccacatgaaatgggagcttggtcacaactaaccggaacagaaaccatagctgtactctccaaaacctttgtcagtggacgccggcggtttttctttttcaagaactcatggacatttgctactggagttctctttcttttcaaagaagaattacctttactaccatttgcagtacttccattggacacacagttcccattgtttgaatctgagagtgaagcattgtcttgttgaactagctcaagcagacctccagcctggacctttctttttgaggctgcaccaactcccagatcctcaagccctctcattcgctttactccttccgttccatcatcttctgaatcatttggtgttctcctccttccctgcacagattgcactttagaagaactgatatgattgggctcttcaaaagatataccagattgagataattccggggctgaatctgaattctcttttgaatcactcacataatcatccatagtgccattttcattggcagaatgagacatggaaggtgattccctggttgaactaccaatctcaccacccaaactatccattataggactacagtccatacgatctttccccagtcgagtatgctcaatctcaagagcatggagaatggcgtcttccctccgtgcatattttactgccttcttattagaactagctgcagacgcttttgctttttcaatacagtcatcatattctccacatcgaaaagctttcactctcttcgatttttcaaggttataccaatctctgaaccaaaagtaacaccatcagatcaggtttataacgaagcataaatttaaagcaattcatcagatgaggacacatctaaaaaaatgtgtgacaatgttcatcatcaaataaaaaacataacaaagttaataaaaatggatatgaacatagactgttaactttcatcactattttggaagaaatgtcattcaaaaactggtacatatcacatatatctacaaatcacttaagaacacaaacaacaacattatcaagtgagccgaatataagttataccgatgaacaaagtcaataaacaatcaaaactaagttctcattcaaaaaaaaaaaaaa

SEQ ID NO: 185279 - DNA, 1512 bp, Cannabis indica
aatgaaggagctttcgggtttgtttttgtgtcaaccacataaattctaccagaactgtaaaaacaagttaaaaccataatcaaaaccaagaccgatcctgagcttaagcagactaggcctaaagtgaaatattacattagtccaggtactataagaaaacgacgatcagcagaggaatctccatggcacgaactgcatgaattccatcctgtatgatgcaactcatcacctaaatatggcacagggtagcctgtggatgacttttgaataagtatgagaagttggatcaacatccactgttgccaaagtaatcaggcttttgtgttccagtcccttaaatttacaccatcaaagaaagtttgagctgagtaaggtaatccaaaactagtaaccaaaattggcagaatgatgaactcagtaagtgatcatacaatcaatataagtaaaatcaataagaattctcatttttcttatgactaaacttgtaatttgggaagcatggtcaatctaaaaactctaaactatggacaattcaacagaatattagactgagtttttcaaatttaatttaaaaataattttcctatcatatttaatattatagaataggcagaattatttgatctgacagctgagattgatttaggggtaattaaggttaaaaagtaaaaacgtactctaacactcatttaatgtaccccgagacttatctaatgtactacgaaatacattccgtaaaagtacgaaatcatatccttaatattatattccatattttcaaaaacattatctaacaatttgtaactattgggttgtcatttattttttgatttgttcaaggaagaatgggacaaataacacacgtagataaagactgactgggccccatcaggcccattaaaaatttcagggcccaatttatattccatttcttttttctccttactttttctatataataataataataacatgatgatgtaataataaaaaaaggctttatttaacaattttttttttcctgaaacggatattatttaacaatttggaaatatatcattatattgtgttgtcaattttttttaacacttgtcagcaacaccaagataaagactaaactttatgcctaggctcattaaaaatttaagtaatttacaacataaatatttaaatttaatatataattaaaaataaataatttaatttaatttaacgataataatatatttttgactgttaaaattttatttaaattaaaaaaattaataacaaaattattatgtgaccattacttaatagttagacgcatttaaaaatttttaaaataaaatttaatattattacatttagaaattaaattagattgaccgagtaataaacactgtaaattattctaaaaattccaaagcctaattattacatttttaatttaattattaaatatttctccctacttttccattataataatttttctttaaaagaaaaaagaaaaatacgatgattgtgatt

SEQ ID NO: 185280 - DNA, 5052 bp, Cannabis indica
tttttttgctttttctttttttggccaaagtcgaaaatggcgctaatagctctgttcatctccgcaaccaagctcgccggaatcttggtcacagtctccgtcgccgccaacgccttcacttactctcgttttcgccgcaaaagtctccgtcccttcaaatctcctctcgacgagtcctcccacatactcgcagacttcaatgtcaacggtaactaatacgttcatgccacagccactagctacctaggttcgccaacttagagaaagtttactccttttattcatttttcattaatttcttgtattgggtagctgtagattgagtattatcgttcatggttttggattgagtggaatcggtatattgggatgttgtttggaagcattcatttctgctcatttaaatgattattaatatacttattgttgttggagaaattgaaattttgacaacacgggcattcaaagttcatttgaacactcaagaacaaaattgcaagtaatcacttagaatagcaagtacaaaaaaagtaaaatttatgagagtacgtaaataatgtaaaaagcacactaaaattatagcgaggtttgagactaccccactatgaaaagaatactctttgttttcttattactgatgagtcccctcttgaattgaggtgtttcacttcacatacttataatatagtgtgggtgaaggttacaaattgtggtcataatgtgactgttacaataataattggcctattgattgtactaattacagttgttatagtatcaacatattacgggtgatgtaggagacatctctatttttcccagcttaaatgtttgattgtttattttcgttgattggtgtgtgtttccacccttgttgataatgtggattttacttgatggggtccctttagtgaaatcattctccctctatggacactttacatagaattgaaactgattttaatctaggattctataacaaatttcccaacaaaaattggggttctttttagagtttggtattgaaaatctatggatctataaattcatttcggacatttgaattttttcaaactgtttcgttttaagaaccaaaaggatttgtgccaaaattatattgcttgcttttgttgttaatttcacaactgggactttgttattgtgattttcaaggtttttgttgttgttgttgttgtgtgatgattgattgtagatggtgaaaaggagtttttctttgggttggccacggctccagcacatgttgaagacagattgaatgatgcttggcttgaatttgcggaagaaagtccatgcgagaaaacggagacacaagatgaaccagtgcttgtagatgccttaagtacagctagtggtgatggtggctcacagccaaaggtaacttcttcatcaacttttgataaagttaatcaagaaagtaagaaaaagaagcctcttaagttagctttggaagcaatgataagagggtttgaaaagtataaagaagatgaagaagaagaagaagaagaaaaaaagaaagaagatgactctcctgcttcacatgaagaatgtcatcataatgtagctgcatggcataatgtcccacacccgtaagcctgagtcttttgacactatgtcttgtaattatcaaacatgttgagaaagaatgtgttatgcttattcatgattcttttgtcttgctacttaatatgacataacatgagagaacactttgtcttaaattggtttcagagagcaaaggttaaagttttggtctgaaccagatacagaactgaaattggccaaagatactggtgtcagtgtctttagaatgggtatagattggtcacgtattatgcctgaggagccaatggataatattaaagatactgtaagttggattccaagttttcaaatatagaattcatccattgttatttcattccattatgaagcttggtgtagatagtctttttattatatgcatatgtttatttggttcttcttctgttatgtaatggactgaatttgatgttgtcttgaaggttaattatgctgctttggagcgttataagtggataatcaacagagcacggtcacacggaatgaaggttatgctcactcttttccatcattctctaccatcatgggctgggaaatatggtggatggaagatggaaaaaacggttgactatttcatggactttaccaggttagtctttcgttttttttttttttaatttttaatacaattcttaagatgttgttctacagtctttgatatgaactaattacccctgtctcatccatttgaagaaaagattggagttgatatgcaagtactcttttgcattatcatttgtcacttaatcatgaataagacatttatattggtttttctaaactcttgtttttgacatttcaggcttgttgttgactgtgtatcagatatagtggactattgggtaacgtttaacgaacctcatgtcttctgcatgcttacttattgcgccggtgcttggcctggcggtcatcctgatatgttggaggttgcaacttctgcattgccaatgggtgtataccaacaggctatgaattggataacaatagcacactcaaaggcctatgactatatccatgaacgaaggtatttctttcttatacaagctctgttaaaataatcagtagctgtaagatagttctaaaccatttgtggacaaagttgattagattggttaaattaaatttgggggggtgtaaacaacattcccttttgtcatatgtggttcactaactataaatttataaacttctttgtttctttccaaatatggctgtgtcttccctccatcagcatcttaccaaatcccatagttggagttgcgcaccatgtctcatttatgcgtccatacggtgtatttgatactgctgctgttttactggccaactccatgactctcttcccttacatcgatagtatttctgagaagttggattttattggcattaactactatggacaggtttttcttctaccaaatatggctgtaacttcagtgctcttaaatacaagccttaaacatttgaacactaacattatctgcccaatgatcaggaagtcttgtctggtactggattgaagctagttgagacagacgaatatagtgaatctggacgtggggtgtatcctgatggcttgtatcgcatgctgcttcagtatcatgaaagatacaaacatttgaatgtgcctttcattgttacagaaaatggagtcgcggatgagacagatttgatccgccaaccatatcttttagagcatctgctagctatttacgcagccatgcttaaggtttgacacactaaactgattaaagttgtcaattcagttagtgtaagtggttgataaacatgtttgaattgttctgtagggtgttcctgtgctaggctatctgttttggactatttctgataactgggagtgggcagatggatatggtccaaagtttggacttgtagctgttgatcgtgcgaattctcttgcaagagtaccgcgcccttcatacaatctcttcaccaaggtcatctaagctgccctacttatcttgctcaattcaatttgtttgccatagtgttaagataacaaggtctcacaatcgctagccgatatggttttttagtttaaaactgcagcatttgtttcgtgtcaatacagatagtgaccacaggtaaaattacacgaaaagacagaagaaatgcatggaaccaacttcatagagctgcaaaggagaagaaaacaagacctttctaccgagcggctaataagaatggtctaatgtatgcaggtaagaaaaccatgcagccaattttggttttttggtctctataatcacaactaatcttcctccattaaatttggccattcttatatttcaggaggacttgatgaacctatacagcggccatacgtagaacgtgattggcggttcggacactatgagatggaaggccttcatgaccctttgagtcgcttatcaaaactcattcttggacccttatccctcataaggaaaaagaagaagcatgaggaggaagaagaagaagaagaatatgaaccattggttcttcaacctcttgagctgagtgtttgattattttactaatcatatctcttgcttgacacttcttgctcttagattttgtaaccatttgaatttgtcaccatgctaaatgtgtgcttattgttacccttcaattgattcaattgcttatatctattttggaagggttgtgattatctatttttaaaaacatagtaatgcaataaaggaacaagattatttaattttttttttcattaactaataatatttattcattattgttttatgttgagaaggctttttggaagaagaaacgggtatggagattaatttagtggcttaaaatatgttttgttgggggttcatgaaaataaaaaaaattggaatagaagtgtgagaataataaagagaggggaagtttatttgcacctgtacatcttattttaataattttgaatgatggggcttcatatttttctattttagatgcgctatgtagtagggtgttgaaggcttcatattttcgtaacgagagtgtgttgggagcgaaatgtggttccaatgcttcttttgtgtggaggagtttagggtgggggaagaaagtgataataaatagctatcgatggcggattggtaatggaaataatattagggtgttagaggattcttggctttctaggcctctgcttcctgaaccattatatgtggttgatcttaaattggccaatagtgaatattttgatgaagatgatgctacccttatcctttcttttctcaactttaacattgagattgaggacaaagtttcatggcactatagtaagaatggagaatatgcaccaatcaattgatcaagcaatagtggaatagtggagaaatctataaaaaataagaaatctcacataaagtgaaaatatttttgattggaaagtggtgcataattggctgcctacta

SEQ ID NO: 185281 - DNA, 3122 bp, Cannabis indica
tgagttgttgaattattaataaaatgaaaaaaagaaagggttttcagataattttaacttttaaatgaagaagttgatggatttagttaccaaagccatttacactttagtacagactatataatcattgaatatgacacccaaacttgactaaaaaaataaaaccacattgtataattgaagaatcaattctaatttcacataataatacaaataataattttatgaaaatatggcttcgtatatggtactattattgctacaccacatcacaccatattgatcccaaattaatgattggttagataacaaacattaaactagaacaatacaaatgcccagctaatcaaatatcacgatgtgacttaaaacattttataaaagggataaaaactttttgcctaaaattgatatacatatctgtatatataatatcttaattaaattttctttttccttttttttttttttttagctattgttttaatatcttttgtacatgttaagtcattaatctactattaattcttctcctaattctgtcttttttctctttgtaatcttattcagttagatggtcacctacatacacagacagcccaccaaaagaagaaagtactcttcacattacttcttactcaatcaataataaataaataagtaaaagcataaataataatatgattgccacgtcatctagtgagcccaccaactacagagaaccaaatcaaaagccaagccaacttgtacttcatagtctttgaaactcacgggcccaatgggccccaactaaacccaagataggacccaacccacctcatattttggcttatacaaaaattatttcataaacataattaatatcttaaaaattgaatggatatgatttatggatgctctcattattgatcgataatcatttttaatagaaatagaaggaaacctatattgggtctctacctattttcacataaaagattcctcaaaaaattcaattttctttcgatgctattattataattatcttgcaagctaagaatcactcacttgccacgtgaaatatttcttattaaaattaacatcacatttctttttctctaatttctctaataagtatatttttttattattattattaataagctgacttattcaattagtaagtaagtaactgtaactcttatcctcctaaatatcgccctactatgtcgcaaccccatatcagaaaaattcatgaaaatgggatcttacttccataacaatacacactatagccaaattacttaaagcaattcgttcataacaagcaataaaataaacaaataaaattgacatgatgaatggaagcaataacaagcaaaataatgcaaaatagaagcaatcctaattttgagacaaaaaaaaaaaaaaatagaaaaagaaagctttcccaaccttttttttattattcaaagaagaatctttagattatttttatttattttttccaagaataagtaaaataaaaggtttctttcttctctttacaatcaatttttttaagggaaagaaagtgaactttccatgccttgttgagctatatagttgattaattagtgatttaagagattaggaagaccacaactattagagtccaaaagagtgccttgggtatttacatgtttttttaaacccgtaaactaaaccaccttcttcatctctacaatgcttcttggtagttagtttttagttgttggcctatccaatctttccgaaacaccaacaacttctttaatatatatattctcctatctcaaaacccaatacacataaaataattaaataaaatcccttataataattttctccatgtatcatctaattaattattattacaattattaaataattaaatagcaccattaccaatgctttttatttagcccattcttcccactactaatataacggaatacttcttcattctcatttttcagaagagaaagctctgttttctgttttggttgaaaagagagctcaaaacagagtaaaaatggcggaaaccgtaaagatcatgaggaaatcagtctttacttttcttcaaaactacaaccatttcagttcaacagctgctctaatggctatgcctttctccgcttcaattctcctatcccaagctatacttccttcattttcttcttcatcttcttcatctctgcttttcaccatttacaatcgtatacaagctctctttgccgccgctggattcccagcctcgtcggaattctttgccattctcaacgagaaacttgctcagacaatctcctcttccgttatcactctccctttcaccctaactttctttcttatatgcaaatcttatgtaattgaatcacttagaaaccctaaattgaaatcgagaccttccttatccgccgttttcggcaatttcagtcgtatcttctcaacttacctctggaactcgatcctaatcctcgcggccaacgcaaccgtcttcgctctcctcttcctcgtcttcaattcgctcgaatcgtttggcctactcaaatcaaccaactcagttctctttctctccgcctccggagccgttttttactcgattgtgctcgccaacgccctaatcatctgcaatttgggcctggtctcgtccggcatggagaggtcctctaatggaggcggttacttgtcgactctgagagcttgtgttttgattaggggaagaacctcgacggcgttagctttgactctgcctctaaatctggccatggcagccatcgaggctctcttccaatacagaatcgtgagatcccttactgcagtattattatcatcatcatcaacaacatcttcgttttggatggttatggagtctctgttgatattctacttgtactcgattatggtggttcttgatacagtcgtgaattgtcttttctacaagaactgtaaagccatggaggaacaaggaagactattttgctatggtatcaaaagatgatgatcacgacgatgatgcgtatggctattacgtttatgacagtttgaagactctggatttagaacaacttccttagtattttttttttctttatttttctcttctaagtctttctgggtaaacc

SEQ ID NO: 185282 - DNA, 3127 bp, Cannabis indica
ataataataggtactttgattgagctcgatcatggtttttctatctgggtttggtttggctttgagattaggatcatggtgctttacttttgtatttttggatgacaagtatgatctcttaataaccaaaaaaaaaaaaaaattaagaaaaattgactattgattcaataaataaccaaccgttcagacaagaaagagggttttgttattacaaattgccctgcatatcatcatcatctatggctctagacaatcttgtcatggattgtgtattaaaatatcaaaattttctctatcaaaaaaaaaaaataaaatcagattttaatcttaattttttttggaaagcaatttatcaataaatggtgtgtttatagttgtacggtacatccgtttttttttaggtaaaaccaaaaaagatattccagtttcttttttaagcttacaaggttattttttttcctctttatattttttttaatgaaacataaaaggttggttataaagaaactgatttagaaatcttcaaatgatccaagaaacatgtgaaaaaaatgtcatttttaaggagtttatcatatcatacttaatttagccttataaaataatgttcagctgataagtgaaaacttctagctcaatcacttctttatatttggaaacaaatatttaaaacactagtttcgcctagtctcctaaaagatagaggtataatttggtttggaatttgtgttcttgctgcagctaatcattttgtctttctgattttttcagctgagtgattattcctcttttgagggtgttctgtattgcaagcctcactttgatcaactctttaagaggactggtagtttggataaaagtttcgaaggtgatgagtcactaatttcccctaatcaaattcttcatgttgaagcttaatccttactgtgttttatttatttgtaggtactcctaaaactgttagagacagaacagcaaatcaggtacaatgtcttgttattatatgctaacttatctatttcaatagtccaaatcacatttggtacttgaaataaagcatctttagttgcaactaattatgatttaacttttcaggttactaacagcaaagtttcacgcttgtttgctggtacacaagaaaagtgtgttgcttgcaagaaaacagtttatcccattgagaaggtaaagaatttagtatttgatgtttttacataattcagatatttgttttgccaattctgttttctaagacaatcaacttaaatttcaagaaactataagatgtaactgaggggtgtgtgtgttttcaggttgctgttgatggtacatcataccataaaggctgttttagatgcacacatggtggttgtgtgatcagtccatcgaactatgtagcgcacgagcatcatctttactgtaagcatcaccataatcaactcttcaaggcaaagggaaacttcagtcaacttgacaagcatgaagatgtgaaaatacaagatgttaaggtagaagatgtgaaagggatgactgagaacacagtgcctgtggtggccgagtagttgatccgtaccgtgatctgcctctgatcgtggattttctcgacctaaaacaaaagcaaattgtttctagtgtacaagaatagtctttgtttgatttgagttttccgttttcctttcttttttttttaaaaaaaaaaatattttgttgttaaattttgaatgtgttaatgagcgagttttaataaaacatgagtgttaggcaaaaatgtcttatgtgtttctgatttgaggcttatcaaaaagtttaaagtcttctgtctgtaatcatttattggacagaagtttatgaatgatggatccaaaaaatataagcataacaacatcataatgatatctcaaccaagggggctatcagctatgagtttgtattcatgtcttaatttcttgatagatgaactaagaaaaacttatttggtctttcagggatttatgtgattagtgtgcctatgtctttgttatttgtctgtatcaaacatgggtcttctgacattatatgtttgtaaaccacacaaattgctcatttttctattcgctttaaaacatacaagcattgttgtagattttcaaacacaatcacaggctttgtggtccgaaaaggcaatattcaattattatttttaaatgaaaccttgaaatcttctatacacatttcttgcaattttatgtcacattttaacatatttgcctcctttattgtacaaaataaatatttataacaaatttaaaattataatacatttataaaagcattcttctaactctatctttttttccttctaactagaaaaggagtaactttaccaatcacgtaactcagggctatgggttggcaagctcaaagttacgggttcgagtagctcttatgcttagtaatagagagagaatgctctttagaataatgagaatagtagtgcttagttggtcttctttaagtttctctcgaatgccattgtactaagatttatttgtgctatccgcgtttccagaggggacacgtgcaatttctagacggttttagctcaattattccaggcccaatcacaggtccaaccaagataatggattggatccattaatgaagtcaaaccttctagatattgaatagatgatttgttcagacaagtttcacctcttgcacagtgtatctctggatggcatcatacaaatcttctggatgagtgattaatgggtatccagatatctaacttcgtatcacaacaatttattgtcaaattttacaatatcaaagttttatttctaagataatgtttatgattcgtattttttgaataatgaaataaaataattgtcaaccaagtatttatgtgtttttattattcacaaaagtaggacacagtttgacaactatcaacatgatgtagcattcacatcagcagaagatcaatgcctaatgggctggacttcactaaatgaactcgaagtcaatgaattatctgtatttaccccatcagtgggcaaagtttacatacaagaatcctaacactataaatataagaaaatcacttcatgcaaagagttagaagccattccttgagtgctcaggcaaa

SEQ ID NO: 185283 - DNA, 1994 bp, Cannabis indica
aataaacgaaaacatgacttcttttttcggtgtcaaatatattttattccaataatttgtacgatgattataataatacagcagagtaagaatttgtaatataccaaaatacaacacatgcacgtatacaaaccccatgcaagcaacgttgttacaccgcctaagattattatatgctccacatgcataaacttgatggtgatttaatcaattgctgcacctttattttcactaacatttgaataataataatggctagctatgcctaaaaagaaagacaaactataataaggttttattatttgtgtttcatggagaaaaatcaccattgtctccttcaccatatccggaaccatatccttcaccataacccgaaccactaccatagcccgaaccatttcctgatctaccaccaccaccaccacctccgccgccgcctccaccaccacctccaccgccgctaccacctctaccgcctccacttccatatccactcccacttccataaccagacccacctcctattcctgagcctccacctccacctcctcctctgccgccaccaccacctccaccacctccattcccacccccacttccgtaacccgacccgctaccgtatccggatccatatccactacccgacccagagccattagctcctccttccccacctccacctccaccgccgccacctcctcctcctccaccaccaccagcttttcctcccccactaccatagcccgaaccacttccagacgccataccccgaaccataccccgacccgagggccatcggcaccaccaccgccgccaccacctcgaccaccaccaccacctcctcctccacctctacctttagttgccttcaatgatctagcagctaaggaaaggtccacaagcagcaaaatcaagaatgtgacaccaatggccttggtgctacccatttgttcaatgcgccctactaattaactacctaatagatttggtgatgaactaataaaaattataacaaaaaggtttaagtgaatttgttttaggaagctgcactacaagaacttatagtgttttgtgtacttattatgagatgtgaatgttagtttaaggtataagagtctctatttataggcatatattgtatgtgaaacattcatgcacacactttctttctagtagcttccttgtagttctcgtggctctaataatatattatattatagaaaatgacatatataaatatatatagttagaatttttatttctatttacattaaattttattagttttattaaaatttaagttgattggataattttttgatgtgttagtatatattgttggtgatcactaattaatgggttagtatctgtgtgtaaagtctaggtgaagtatgagcgtgggcttttgtagttaactgaagtttttgatgagcagacccaatctaactaaagttatgtagctaagtccctctttaattctataaatacatattgtcccatcataattgtatactttttataatcagataatataaaactgcttctgatttatttagagatctagggaagaagagttaattgatagtattgtcaggacccaccttgagctaagatgaaggaggcgaccgtcttaggcctcccaccacaactaaaaggttgagaattcaaatttcaatagcctcattttactattacactatcaaattacaataattattatgaatcaatcaaatacacatacacataattattatatattattattgtattttataagttttatattatatataaatagatcttcaatttattattaattttgctaacatatatattttataatttggaacgtgtatatatatgtgtatttttggttagtggcgtgacatagtggtggggtggtagagtgtggtagtgacggtggtgccatattgtgggtgatgatgtgattgtttgttaaattcccatcttcttattgtttcttatatatgtat

SEQ ID NO: 185284 - DNA, 2560 bp, Cannabis indica
tttttctaaaagttgtgccaaatatgtcctacctgcttcttcaaattaagcaagtaactccactttgagtattccttctaatatcaaatccaattaaactcgataacaatacaatttgctagtcaagggaatttccctctttctatagttctgtagtgttgagcacataatacacttatactaagtattttcttattattaacataaatatatatgtggaattggattgtgttcagtgttcttcaaggaagcgtaagtgagttttgcttccacaattgcaaatcagctccagtcataattgttccaggcaaaggtatacattatataagcctaaatatttatcaaaattatacactatatatgatcattcattttgataaatatacagtttagatgaatgattaaaattgtaatcactaataatcatatcctctgttgatggcagatgcaggagacgagtctttggtctaaaaaacatgtctagtcagtctaatatagctagggagtttttgttttgtttttaagattgtatttattatgggttgtaaagaagattgatatttgttttggcattccaatatgggtgtccatcattatgttttagctttcaaattaaaatgtatgattggtttcgttaatttgtaatgatatttggtggagttaattagtaattctttttcacaagtaccccaaattcactaatttgttgtattccacaaatttatttctttttaattatgtcacattcgttccacaagttctcattcaaaaatttgggtaaacatgcagtcttatgtttttgtggcagacgttcaatttggaccgttaaataccaaagaggactttgctgaaaaaaaaaaaacaaaccatatggcattaccctatttgtccacgtgctaatgatgtgtggcatgtgttgaaaactaactctgctgtgtatctgtgattagtgatgatagtgattgggttatctgttagataaagatgaaaattttacctaaaaactcatttactatgttgaaatgaaaattaaaattttaggtcagttaatttggtcggtttatattatattttacaaaaatttaaattcaatctgcccgattaagaaaaaagaaaataatttatattagttatgacacagttatttcttgcttctttttctctaagtgctttctaagatcaccatgcttatcattaagcttctgtcttaagtcagtagggggatgcttgcgatttttcctacctctttcctcgggaacctgatacactgatacgctttttcggtcctctcggtcctgagggccagtgctctctcgagagaactttaccctctgcggaccttttcctttcgggaaatcagagtagactttttgcggatattgacttttttattcttttcgtggaataatgtaagatttctcttagggttccctttagagggataccgtatggggctcagttccctatttttaggcctttgggtgcttggcgaggactcttcctgtgtttctcctggtcccgaaggcacatccttgggatgcacgtgaattccagccgtttccattgccttctgcatgggaccattcttgcatcctcctattttgttccttttgcgcgaccagttcagcctcgtgatcagccgccttttgccttaggtccagtagttcggtataactgccatcgtcataagcatcatacccttcttggttttcttcgtactcctcgtcatttgtctcgtctcgctcttcagagtccatgtttactcgtgaggctacttcttcgtccccagggttttaaggatcttgggggggacgaggctggcgtgtatggtttcaagtctccaccatcatactctaaatcttttgttgtcgttctttggacaatgcttcctatagctctcaatgaaagcactaaaatgttgaccgaggttttcagcaaccaaatatttaatgcaataattagagcttaaggttaattaatgcgaatatttttatgtggtttaggcattaatgagtcgtagttcacgagtctctgttattaataagtgggtgtttcttatagagaatgtttgttgtcttccttttttccgatcccctcactaattttattgaggggtatttatagcaattggtgggaagaagaaaagggtttacttgtcttcaagtgctatctatgggcacacacaagttcccaaaatgtacaaaatagggtatgcataacctacatagtaggctgcctaggttttaggtgagctttgccttcatcccttcttgattgatgtgattctacataatggagccgtcactagctcccttgattatcgtataatcgcccaaagttgggtttatagtctgacacatcctctatgggtattcccagacatttttcctatgctccattaaatgagaagtgactgttcagctccagcctcgctggtccagaggagttcattcgcccttcacctctcagagaagaagtggagctatttcctcatctccgggagcttacccttggaccattgttagtggtccttctagaggagatttggttaagtgttttg

SEQ ID NO: 185285 - DNA, 5938 bp, Cannabis indica
tttcctttttttttttgcttttcacatttgttatgtacatgccgtgttagttagtttttattggtcatttctggctttgggattttgaaattcttggatgtcctgtacatcttttgagtcctgataggattccacatggactaagtatgggattgtttggtggtaggccactgtagactctaaaagggggttgtattgttaggatcccacattgattaagtgtgggattggttgatggtatataactacttgggcaccgtcctcccttaggctagtttttggaagtgagttctactagttagttgtatcaagtccatggttagctgtaattataaaatgtgtagattgtactcttattgaactcattgtacttaccttgattctcaattactgtgaagaggtttgtggtgctagtgtggcatccttcttttgtcggttgtaaatatttatttattttagactgagtactagtttattatatacctcataaatttggtatcttcaacactcgtttcagctgttatgttggaagggttcagttctagtaattcaggcactgttattgttctgtcttttatgtagggccaagtgacgcacctcttgcacctactgcttttgaggcttttgtaaaagtgccgaaattcctgcggcctcatactcaaatctattgcacaaggtattgcagttaattgattctagaggacactagttgatggatgaaatgtgaaaatggcttgccaacttgagttataatcacgaattagtttattacgattatccagactatggcaactccatcttacgggtgcattctgtttcttatctgtgtcaacttaatctatgttaggctcttgtaattggaactattttcaaattttaaagtggttcttttcttttttggatttgagcacattggacaatgcaatattcccaggtttattattgtgtaatggtagcgaatggcttttgacttccattccttctttcttatcagcttaaatttttcacacctacttttgttttttcaactgtcatatgtaccaaccatccctaggtcacccacacagttcaatatttgcatgatttagatttgtgatataaagggcaggctcttctcctctcttctaggtcattatttgtggtgaatacaagctgatactaaaatgctctgaagtccgcaaggatgcaccttttgtttgtttactcatttatggggtggtaggcattgatgtttcaacttttgcaagacagataacttcaaattggggtttcctattttcagtgaatgggtgcttgggaatcgagaggatttagtcaaagatattatttctgagttacagccggaagatggtgaggtaatataactgaaacctggctttgatgtcgactctgcaatctactttcttcaagaaatcgttctagtgtaaatgcttttcttttcctactgttgctacagaaaatatttgatcaaagtaatctttgcaatcagcatccatcgtcattttaccaagcattgattatccgcatgatcttatatgaagcaaaatgaacctgttccctattttactatactgcatgtgtatgttactgaagcaaagtgaacttgttcccacaggaatggtggacttatgtgtgcatgggaccatctgaccctcatccgaattggcaccttggaatgcgaggtacacagcaccgtgctgttatgtggcgtgtatggaaagaaggtgggacaggattcttgtactggggtgcaaactgctacgagaaggcaacagttcccagtgaagaggtaattcttggcattttatcttgttccatataacattgtatttatgtgtatgaacttgttaaatacttcatatgacagataagatttaggcgcggccttccacctggagatggagttctattctaccctggtgaggttttctcgtcatcacatgtaccagttgcttcactacgattggagcgcattcttagtggcctgcaggtcagctatagtgaattatgaatataggtctttggacctgttaaactttgctggtaatctacgtctaagtttgcgatcaagcttttcttttaatgttttgtaggacattgagtacttgaaactcttttcttcaaggtatggcagagatgaaggattagctcttctagagaagacgggtgtatacctgggccctgaacgttacacacatgagcacatgcccattgaagtgatgcgcggtgagatttttaatgcatgtcgatcttgaaattgagatcacttgtagaaatgatcaaacacccattctcttctctgctggagaaggataagtttagttgggttcaggtcccgcattattctgcatggaggccattgccaacacttgccaatcaaaacatcggcaagggagatctttaacgtgtgcatatgtggccaatccatgtggctccaattagatttcaacatgtgttgatcttgttgatttttcgtttgtcgtgttcttttattttgtttcttcttttgaataccctttcacaaaactaccttatggtcttgggtaactttgttatttaaatggtatgttgcttaaaatagtggtatagctggaaagctcagcttgttagattttgtctccaaggctaatgtaaatctgtaaaaacagtgtccttggtcaattgctttcctagttttagctccacgttagattgccccccgagagacaggtgtatcaatactccccttttataagccgttggtgcagaggttgtattcatgacaagaattgtaatctcttatttaatatttatttctcatattaaatattggccttgtgtatgctaaatatttgggtaaaacattaggggctggaaaagtttgtgagagatttcttgtacttggaatctttataaaaagattgaataaataatagatggagataaacatttgcagcagtgttttcctaaaacttaatccaatcataatcaccacgatgataagtgattttacaagatttaatttgcagaatattttttacttctttttcgtagggggaacaggagcactgtggaagttagaactatccgttagtttttatggttctaatgtaaaagcttaataagcctggctctgttggaatatgtaattaattcttggggaactaatagacgaagccaataaaatgattaacataaatattgcatcagctaaggtctgtggtgatggtgacccagagttccgatgcttaaattctgattagttgcactttgttgggatttccggttgggagttagaatgatcctttttggctcttatattgcagcaggtcatgactacgacgccagagaagctttgactgccctagtcaaaagaaaatctgacaaaggatttggatgggaatagaggtttaagaagagtatcttatcttgggcaacagtatcgaccgatggtttcttcatttctgttatatgctttttcaaccacatgggtgcatttatacaatagctttaagcagttaatgttcattatcatcacccttttttccatttggtatatgttgtggaccttagtaagcacaacgccattttcctttccttgatctttttgctctcctttagttctagttctcttattatttgtaaatcgaactccaccattccattactatccttttgagaaactcttttttcccttttttttccataaatattaggaaaaatatgataaataatcgaatttgtattaggcaatttgccccactttctcaaatccaacccctacctttttcccacttcaaaaagaataagtagccattgactcatgcatttttacaggccgtatctgaccccacagtctacacaaataccataatcgcaaaaagaggaagaaaattaaaagaaaaggttggagtttagagaggaggaccaaagcttagggggcctgtactactcgagattcaatgtggacttttgcatcatattggaatcagaaaggaggcagaacagcaagtaagagataatcaaattggccatgattacttctgggcctggtctctactttcctttttgacatttgtgatgcctcataaccctccagctgtataatatttttggcaatttttttttttttaaagaatttgctaaaatatattattggtgcttagcattttgtttagtactcaatggcagactcaggattgaagttgagaggggattgattttttttttttcgtaatttaggaggttgcataatttaattttctacaaaatataattattaaaaattgatacaaacttatatttatataatattaaatataataagtaaaaaagtaacaataaaattattgattttcatggttaaggcactaaataaaaataagactttaaattctaagattatttttttaaaaaataaattttaaaaattaaaaataaaaatgtttaagtagatttaaacatttgacctctatatatgcatgaggtacattaacaattgaaccaaacctaatgctttgttaataattataaaatttaattacaaatatatattgtaattaactaaaatacatatatattttttttttcgtaattttttctagtaggcgagtgcccctcttgtttctatgtagattcgttcttgatatcactattagtgtaattaagtagtgagtcatatataacttaaaatttttttagaaagtatcactaatcaattctaagatgccacttataaaaaatgataagtaccaatgtgctccataataatactcttttttataggttgcaattctccaaaattggtcactaatgactatgaaagtgacattaaaaagataataaaacttgccacttgataattgcttcaaattcgaactaggtaggataacatctacaatgcatagctttctagttttcctttttttaaagctttaaatcaatcatttctagtggccaattatgtcatatgggtgtttaaacgagttttatgactgaggctagtttgaaactaattggtgttacatcattatatgctatctatttttccaattacccttcatgtatttttggggccacaatttctttacaaagaaacaaaaatcttatccaccccattatctcacaccctctaccacaaaaagtaaaatacactccgatccaatttcacgtctcaaaattctcagtggagaaacaacatgaaatgattctctttagtagtaataatttgcattctaatttgttgcccataataatttggatttacaatagttaacttgatttgtagtattaaagattaaataaagatgagggctaaatattatgaaagagacattagtctaggagtaagttatatttagaatagagaacttaaaaggcgggctcaatttctctcattttgttaacctatttgcatgtactaaagtttgaaattacaaataagtttaccaattagaacccatttacattaacaaggttaatcactcaataatcgaataaattgcaaagaatatgcaatgaacacacaactgtttggtccatgacccatctccatgagtctgtctaggagtgttcacggattggtttgatttggattgttaaaataaatctccacatacactgtacaaatcaacattttaaaagaatacaaagcagaaaaacattctaggtggccttcggcctctatcaacctacatacaaaacacaaagttagttgcaaagtttgttaaaactgttgcaactaactctatgctctctctggttattcaacaacatataaatacatgaaaattaaacagattacataacagatcagatcagaaattgggaggagaagacttacagagcttaagtcttaaagccctaatttttagggctcggagatccagacccaaagcagacaagcatacacagaagagagaaaggaggagattagttcatattgagagagagagagaga

SEQ ID NO: 185286 - DNA, 3850 bp, Cannabis indica
atactgccattaactaaaaacacataccttgtatttaagtgtgaacatgcgagcttgacgaaaatcagctgagagccattcacctggccagaatgttcctagctttcctgcttcctgatcaatcttctctactaagccagacttggtcgatgacttgtcctcggaaatgcgccatgtcttgtaaggacccccacggagcccatggataaaaacaacatcaaaaagaggtgtctctactgattctgatctattaacatgtgcatctgaactagacacgtcgtcatcagttgatggtttagttacagatttatcactgttcaatagctgtagtctcagaagaaaatgactcctttcgaaacacgtctttatcaatgttttcaggacacttccaatggggtagttcaggattgattaaatagattatatcatcataacgaggacacggtttcctctttttgcagtatccgatttggagataccatcatttgcagattcttcatgacaaaatatgtttaacagtgttgccctagcataactttgtattttaagatcactgcagcccggtatcttcccatttgcacaactctcaagccatgaacaccaagcttcatctgctaccatgattttttggacctttggaagaagtgaaaggatagtcaacagcctagctgcatgccttcgaatgtgagcagtaggtggaactcggacactagatggatcattattacctgattcagatgacttattagggacatttccatttcgttcctgtggctcatggatcttggaagcatcgtatgctgttattgcagccagtttctcatagtcatcagataataaaaggcgtttcaataaacataagaccccataatcagttatcttttcctggcaagaaaagtcatcagaacaaagttcagccagtgctttgatccccttcagggttgccacagcagaatctgccacatcaaacttggggacagtatccttctttaaatttttagatggccccacgagaggttccatggaaaaaagatctgctagtggaaatgcatctatggattcagtggttgttaacagctgatttcctgctagattaacaacagcacctgctaactggtttacagcttgtgcagcagaaacaatgttcgattgatcaatttgcgtctgcaaaagagtatataatatatatttttagtatacttgcaatgttaaacttgaaataatagtatatatctagatatgcttttagaaaattatttcatcataatttgaaaataatgataattgactcaaagtaaagtaggcccgaacaaatatcatagcagaaattaataatgaaaagaatcagaccttcactttgtcatttttaggctgaaaatttcctttagctgatgctgccttactagcagccagaacttcagaaagcagaatagccaaccacccttgggacattggtatagaatatggtccatggtcttcaagaatgcatgtaagaatttttattgctgaagaacgtaaggaatctgaggaatttttttcaaaaacccatgaaagcaatatgccagaccacttttggctctcttcaagagaaaaatgcatgtgcccagaacacaccaattctaaggctttagccaatgcttcttgcacatttttattctttcttgtccttttagcagtgtctctcaataaatgaagacccttctccatcactttcttttgtgctctttcacttctttcaatagaaaccgaaaatgctgacaaagccatctgagccagaggaatatcctcatttttacttgcctgatgaatggtagaaagaagagtagaactccaatcagaaacataatcatttaggggtagattatgatccactaagagtaaccgagcaaccaaactcccatgccatttcacagatctctcaggtgccattaaagcagtcatgacagcattcccatcttgatccagctcttctattagagatctattaccagccgatgccattgcccaattagctagtgcccatgcagcaaaaggaacagcaacatgttcggaatgcaaatcatcccacaacccaggaacaacagcagaattcaggttggtttgagcaagggaattctcgtgcttatgttgcaaaactacattcttcctagtactttctaattccatttgtctaggaatagtatttctcaactccaaaagttcatttgttcttgaaaggcctaaaactgttgtacccccgagaactttaatgcctatccccttcattccccctccaccatctccatcatcttcatgttcaactgactcatccagaaacattccgccttcttcaataacttgaatggcagctgcaatatcccttgttgcagcatttccaggcaatgaaggcttaaaaacaatattttccgaactatcacaattggatgtgacaatatccataatggcagccacaagcatgctcctgcctttcaaagaatcagaaacatcaagtgaactacgccttgactgctgctcccacagaaacgcttgatattaatggtaaaacactatgaaaagcatctacaagatcaagaatgaagcttttataaccttaaccccaaatctttaatccatgaaattggtagtgtctattactgcagcttaaccaataaaatgatgacacgattatgttatgtgacatctacatattaaaccacattaaatttaatgcttctataaactaccaatatcgtgcagcccatcataagcatggaaccttagcacgatcacaggcctaatgcagagtttacataaaatataaatacactattacatcttccttcaagacaccaaacatcatttcctaattcgaagttcctacgaagttaaagatacattctaaacgaaagatttgtaggaaataaacttaataagggtatgaatcgagacaaaatatatgcttctatttcaaagttttcaaattagaaacatactttttcaattcatcccctatcaaacacatttcctcaaactttcagtctcaagtgcctcatgaattgtgtataaaacagcgagcttctaaaacgttggttggtactaattgacataaacatttcaatgtcaaaagttcactaaaacttgttctctcaattcaaatttgagcatacctagtattactattaacccattaattctagagtttggataattgtgactcggttaacaaataataatcaagaaattgaataaaaatctcacctttttcgacctctgaggttggcacgagaaaatgaacctcaacagtttgggaacagcaccaggcctcccaagcacagcctctgaaacattaggatcagaaattaagtacgcaagtgctctggccgactcggcctgagtaccaccggacccatctctttgaacagcaaccgactcaagcaaccaatcaacaacagcaccaccactaccagccccaacaatagcagccctacgactctcattagcagaaacaatatcggccaaaagagacgcaacccttagctcgaaccccgacgtacctcgtgattagccgaagacaacaccgacctaagcgattgccagagaaccgaagcagcaacaccggtttgcttaatgtgaacgaaaacgttattgatcgaatcaccgtatttgcgaattccgtgttcgatggcggccttatgatcacgatcattatcagaggagagaaatgcgtaatgcgacagcggcagcagcggcggcgagagaggagaaggtgagatgttattcgcgagagaccggaggaggagtggcggtggacggtggttggagttggcgggaaatttggagattgttttgggttgattggatgggattcgga

SEQ ID NO: 185287 - DNA, 2024 bp, Cannabis indica
aagaaaagaaaaagacctctccctttttgctttgtaaaatctctccctttttttttgattttttcaacctctccttaagattcagaaacctattcttctcaaatcatactaccctccataactgttggtggagcattatgataaatgttgttcccaaagtagtaaggcccatcggaaacactgtcaaaagaataaagtcaacagtagacaaatacataaataaatcgcaccaaagggtggaattattagtaaaaaatataatagcaaagaacaaagaactagcgtttgtttgtttcctcaagaggcaacttgattggttgaaggcttgggatatgatgcttggcttcctcaggtttcaagtttgatcaattgatccttatttttttttgtttaatgagtttgatccttctggtgagcttaaaattccaccctttggtgtatcccgggtcatggtgttgggccacctagttgaccctccagtatgtagcctggctgggaggaccctatgatctggtgaaaaaaaaagagctagtgtttgttttgcatcacattagttaccatatagtggattctataggaaagcttttaattgtggtccttatgaggaataatcctgtgtaacaaagtcttcaaatgactgcaagtctacaattggttttgcatccagaatatatcaattacttgagatattcattactggttagagaagtttgctgtttttttttgggctgttcctgcatatgattgtgttttgtcaaaaaagtatatgcactgctattatgcagttgttaatataatttttattttctctttttgtcttgccattcaaaatttacttaggaagtattagatactagctaataaatacactaacatacaaagacaattatagacatatcttgtaagttgcacatgtattgcacattgtgttatttgtcaattgaatttgcattttgtatggttgagattgttgcttagttgagttttaagttgcgcatctgtaatttagttactatttaatagatattctcattcttctatgacattattaattactcttgaatcattgggtcgtgtattctggatttgacagagatatcgtgaagtgagcaaacaaaggctcgatcgagcaattcttatcttctttcagcattttaggaagtcttatgtgggtgatcaggctatgcattcctcaaaggtaattctttgccccccgctggcagtaagatctgtctatgttgttatggcgaacatttcttttgagtctattctttctgttgcagcagctatatgcccggctgtctgatcttcttggacttaacgatcatctgctcatgttaaatgttattgttggaaagattgctacaaacctcaagtgttacacggaggtgaaaaactattacatgcacactgtagtgctgtgtatttgttttatgttttttttttataaactcttctatgaactttttctttcagagtgaggaggtcattgatcacactttaagtttgttcctggagcttgcatctgggttagtaatgtttacacagttgattttgatgagagccttggggccttatttaattaattaattaatttatttaaaatttgaattagtattcttatgtaccttggtttgcagcccccgacacttttttttgttctcatgctaaatttgttgtgcaaaattgacttgacaggtacatgactggcaagcttcttttgaaattggacacagttaaatttatagttgcaaatcatactgtaagtccaatctaaatatgaattatatctgctttcgtttatagtcccatgatttttggaattatgtgttatcattactttaagatttctccatctttttcttaatccagagggagcactttccatttctagaagagtatagatgttctcgcagcaggacaactttctattacataattggttggctagtatttatggaggacagcactgtgaaatttaaatcttctatggatcctcttttgcaagtactctctctctctct

SEQ ID NO: 185288 - DNA, 1963 bp, Cannabis indica
tacggggtccgacgtcctcgtcgaccacacttccggctgggtcaaggctctgataccatttgtaacgtccccgcttcaagcctccattgggcccttacacccacggaatgaatggctcttatacacgagtacgtcactctggctgcttcctggattgatgactgaccctacagaccaacacgagtgtttccagcgtgctttgtcctcactcacacgcttcctgggaaaacttcccaggaggtcacccatcctgaaattgctccaggccaagcacgcttaactgtggagttctttcgagatgggctaccgaaaaacaagatgcaccttgttgatataggtagtaccaatcaatccatttaagctctcttcaactgtgtagtcccatacctacacagtctcagaatcatcccacttgaccttcccaggcggtgtgggattgcacagcttacccggtatttccccttacggatcacgggactactgactgtcacaaaatgtctctagacttctggcgccacttatcttctttgcatttccaagccaaggaaagtttctcattcaaatccaattcttcctcgattaaggcttctctagctgctgcttttgagtccaagagatcctttcttcaaggcttctaatcaccgtgtccatctcaccaaagaagttcttcttccacttagccaaagcactgcgagtattgcatatattacgaagtaaacacttactcgttattggcccctcacagttctaaaccttcttaattacttcacgacaagattcatcccaagtccaagcatcaaaaaaccgaaaaggaatatgtctctttttggaaaatagacatatatccaaaataattggtgcatgatccgagcaagtgatgggaagattgagtactccagcctctggaaaagtcgtgatctaattaattgaacctactactctatccaaccgttcacgaatgagcccatccttaaacctcttgctgtgccacatgaactttccacctttacatctaatatccactccaccagtatcttccatgaattctgtgagccattttagttcagtgtgcgtgactctcctgcccccaatcttttcctcgggactcccaatacagcttagatcccctataaccacccaagggatatcacaattgcttactctcgagctcatatcactccaaaaactactcttttcagaggagtatggggtaccataagttgcacacatcatccaatgatctcttgattgacaatcccacaccattgcttcgaaagaacctctactactacttattatgtttaagttaacatcttgctcccacattagacaaaatccccccgccaaaccgatcccagggtggcacactattctaccgaaacccagaactcgggctactccctccatattctcctttcccaatttagtttccattaaaaaatactatctaccttaaacttccccaccaaggccaataaagcttgaactgccgattccttggccaatcctcgatagtttcaagaaaggacaatcattgggaggtggggggcttgataagggccgcatcctcgcccatacagaaaacttcagaactttctactcgtacctctaccaaattcatagtttcctctaagtttctcactatattctcctccaattctcctttcttggcaccttcttcttctgaagtgagctctgggatcttgatctcatccttcttttcttatcattcttcgaagatgacataggaggacccacccccactttaaaggaagaattagaatgagtaggtgagaacgactccataacaggcaaatcttgggagaattccttggtattttcttctgtacgaggaacaaaaggcattaagtttagacttgcctttctctttcgggcctgtggacatgggtgcacctgctccgtgacatccaacgaatcatgaaaaagagttgggacaagctca

SEQ ID NO: 185289 - DNA, 3269 bp, Cannabis indica
acaaggaaaagagcaactaaaaaccgaatttataaggtaagaatccgaatatgaatgctcaacaatcttaccataaatgaaaaaattattttgtcaactaacttgctaaaaaaggactttacactatttttaatgatatgcattattcaaaaaaaaaaaaaagtctcaaaatccaaattttgtcagcaaaacctctaatacccgcattctcttagcatttaatcattttcatctatttttaacagttaactactaagctgaattgtttatgcgatgtttatgcgaatttaatgtatacgtggtacaattttattggtccaccaaatttaattatttcaaataaaataaatagacgaataaaattgtaccacgtatacattaagcgtgacaacccaccttgacagttaattggtaaagtatatatatatatatatatatttttttttttgtcaaataaaccatatttttctataaattgtataaaatccataaaatacagtttggtttttttttaggggggggggggggttaaaaagtcgccttactttttatatcattttataattgtggtatacataaattattaagtaccggtggaagctagaatgtagttccacgtgaaactgattgatttttttggacaaccgatcgattgtgtgtgtgaacatgtgtttgtgtagctactaggaaaataaaagctgaagcttttattttgaggaagatatatattttgatctatcaagattcagactctctaaagttaaaggaatgtttttctcaaaatttattttgaaagatatctttccttgaatgcaatagtagactatttcattaccacaaaataaatacccgtgggcacagaagttcttagctgatcaaaaatccagaaaatgagtcacacatcacaccatccatgtcataaattcacaagcaagaatgataaatgggataactactaccaactatgattctcaaaaaccacacaaattaaagtagaaaatcatcacaatattattattactaaacataattaattagtttgtcaatattatataaggggtcaaaatgaactgaaaagaaattgcaaaattaattagtttgtcaatattatataagggggtcaaaatgaactgaaaagaaattgcaaaattattgaaataagacatgattataaatagttatatattgcagatgtgaatgaatcctaatactttacttgattgtacggtcaacgatcaaccttggcgaacagaccttctaattctctgcatgtgttccctcaaacggattgggtgatgggaaaaaccaaattccacgtggaaaaataccattgggctgtgagatagagatagattccggtccagtgggtcccttggccatctaaccttagttatgtgcgcttggtctgtcaaagttaaaagctccgacaactcagcgaagaaagtggggcctgtcaaggtgtaattatacggatgtgaatgacgtggccaaagggtgaccaaaatttcccggtcccggtcgttgggcaagtcctggccacttgtttgagtggttcacacacctcgcgtcgcatcaccgcgccatcagtaacgtgaatttacaataaactagcaaagaccaaagctgtttgggaatgggaaaggagtgcaaatctaaaattgcccactcttatccattgaagccaattttctggctttattatcagtgttcagctgtagccgaagcaagctaaaaggctttctgtttgagtaattttcttcgtgaaataataaagctaattatgatttttgtcatctgaattttgacatgtattaaatcatgctctttgaacttttaagatcgttaaaaatgtttcctgaactattgaaattatttgatttaaagatttttgtctaatttcattcaattttactatttcttgattgtttatgtactaaaccatacttctcaaattttgatatatagtaaatcatgtcaattttaaaatgtactaaatcatacccattttatgttagacttttttactaaaatttgataaaaaaatctttaaatccaatcatctcaatagttcagtaaacattttgaacgaccttaaaagtttaaaaaatataatttagtacacgtcaaagtttaggagcaaaattcctaattagctagccaaataataaattggatagtgaacctttcttttttgagtttgtagtctccaattaaaagcttgaaacttaactcattttattacttatcatttgtattgaagatcaagtaaaattaaagcaatttgagataataagaagggtgatatagaatatattagtatagaaaaacttttaacaattgcttaaacatggttagaggctagagctaagtccaacgtcgtacaagttggaatattttcattgtttgtggataactaaagttaggagtcgataataagtgtactaataaaacatgatcagctcactcacaatatttgtcggagagctgtggactgtcgagttgggacaaaactgtccacgacaaaaaatgcatgcaaattacaaagtgtagaaaattacgatcaataaaagaaaaaaggtctattattattatgtaattaggtaataaaatctaaagaaaacaagaaggaaaggtactagtcaaatgagtggctaagattctttatatatatcacataaacagatcctattctcatcacaactccatcactttcttcctcatccaaaaaccaaacattatatggctgcatctgttaatagcatcaacaacagactcactttagccatggaaagaactggtcaatggtacggtgcactacttattactcttcaatttattttctttaataattaacataaagaattgatctgttttaatttattaaattcatgatgatgatgatgatcttgtgctcttaattaaagggttttctcccaagaaattccaactgatgttctcgtcgtggttggcgaagcaaatttctctttacacaaggtaacatattatttattacttctttctttaatatacattttcttaatttaattaattaattaattatttgtgttacagtttatgctagtagctaaaagcaatcacataagaaaactgatagtggagtcaaacgaacccgatttgaccacaatcgatctttcggacatacccggaggacccgagattttcgagaaggcagctaaattctgttacggcgtaaacttcgagatcacagtccacaacgtcgcatcactacgttgcgccgccgagtatct

SEQ ID NO: 185290 - DNA, 2953 bp, Cannabis indica
tttcttctccatattcagcttgtaaagtttgaatttttccaccttaacacttctacatttatccaccaaaagaagctccccattaaactccactaaattcttcttgtcaccattcccatcagaaatcacagaagcaatttcagtgacattcaaagtagaagaatcaactaccacagctctcccaaactcatcaacagcaaagaactttcctctgcaataaataacatcttggtatgagagttgagattccatgtcatctatagtactccacttatcttgggatagtttcaagtgccataaaaccccacctgccacgatcatcaaagatgggcaatcaagatttggatccaaagccactttgtagtgacagtggttgagattattagagtattggagagtgtaagacttggtcaactcaaagacttggaattgtaacaagtttagtactttggggagcaagtaaggcaaagggtgaacttggaatggtgagagagggtttatgatcatatggtggtgttgaccaagttgttgactttctttaatcttgactatccaacaccatagattggaagagaaaaggtacactgtggactcagtgaggagtagaggagaggattctctgatatgaagaggatccaagaaagaaactttggatggtaaaatgattctgtttttgtaaggaagagctgagagtctccatgatttgcagactgagctgaatctggtaaggtctgttttggtgtggagattgatgatgatgatctctaataggtcattgggaagatcagaccactgtgttatattcattatattctctccaaaaactatcttttttttttcccactctttcgttgaataattatacaagagtatttatatacaacaagttttggggtcttgccaaaattgacttctccattaagttttttttttttttttctaaaaacctacaaaaatattggaatttgagttaacttttacaaaaatactgtcacacataatttttttttaaataatatatttttataaaacaatagtagaatacaaaacagaacaattaaaaacaacagtggaacaactaaaaaacaaccgtagaataacagtgaaaattaaacacaatatacaatattttttgtttacaatttcctttttactatattatatagagaatctttttgtttactttttatttttttttctgaaaagcatatagagaatcttttcactttgcattggtttcactttcaagattgatgagattgtacatgcatgctaaactaattcattgtgtatttttggtaatacgaagaaaaaaaatatattactttgggcatgtatattttatttaataaagtgttaaaaaaaattgtagaaggattttagtaacttattggtaccacttagactcatctaggaaactgttagttaaaacaaataatttagtcagttaattacttgggtaccttgtctatataaggttttgtgtactacttctctaggtgacgatttagtgtgtgattttagatgaaaataatttgtaatggtatggagggatgttaaaagagatagtgtgtgtttgattactatactctcaggtgagttaatttgtaaggtataagatactattgttaataagattaactttataatcaccccagtattccttcattattaaatacttctcggaattagtcaccacaaaaaaagtgatgaatctcgttaaactggtttatgtttcatttttgattgtgccattggagtactacacttcttgttagtttactacaaaaatctttttccataaatagtgaacacatcaaatctaaacatagtaagaaaggaatcctccaatacattggattagtccaaccataatccatttggaagattaatacaacttacaagcacgatttagtacacgatttagtacatgtcatagttcgaaaaaaaagaaacaaaaatcctaattagcttaatgaatatgtaacaaagaaattcaaaacaacataagaaagacagaattatacattgattattacaaaggcctaagacaactcacaattgagcttcgtcttgttcggcgtggcggtggaggaggacggtcaggcgggctgaagatgttagtgtattctgggtgttgattcaccggtactaaagtcctgtcatccaagttgtaaactttgaactgtggatcactatagattatgcaatttcctctacacccaccaaaacacttggcagatataatgtatgaacaatcttcacccaagaacaatatttgatcacctaagctataaaactcaatccatcttttctgatcttgattgagaaagtaaagcttgaatttttcaaacccaacaacacttgttctatcaaccaaaatcaactcaccattcaactcaaccaaactcttcctatcaccattattaccacatgaaatcttagaagcaatctcagtgattttcaaagctgaatcaatcactacagttcttccaaactcatcaacagcaaagaactttcctttatagaaaataacatcttcataagagagttgagagaccgagtcatctatggctgtccacctatcttgtcctaatttcaagtgccataaaaccccagttgctacaatcatgatagatgggcaatcatgatttgggtccaaaaccactttgtagttgagattagagcattgtaaagagtatgacctggtcaactcagtgactcggaattgtaatgagttgagtgagttggggaacgagtcaggcaaaggttgaactttgattggggagagaggattaataagatgatgatgacccagttgttgattttccatgacctttattatccaaccccataataaagaagaagccatggatttgatctgtggtggagaaagatggtagactgtgaaatgggttagaagaagagaggtttttctgagatggggtggtcc

SEQ ID NO: 185291 - DNA, 1491 bp, Cannabis indica
attattttgtcattgtcccaaggtaaatacttcatctctggctggccttattgcatagttaacacttagttagcatcaaggtttggatgtcatcactagtgttcacaaaggtgacatgtttggactttgaatattaggcccaaaataagtatatctattaatgcttttaagaaaaaaaaaatcactcaaggttaattcaagcaatggataatatataaggaatattggtcatacctctgactgtgataagccatatgaagtgctcctaaagcagtccacatcaggtcgttgagctccatcaaaatgtccaatatcccactcataacctgattactagcatgtaaaaagtctttaaacttcaaattctgagacatattaaacactacaatccgtcacaggaaaagaaaaactaatagcaagcatttttttaagagcactgacaaccttacaaagaaaaaaagaagaatactgacaaagaaagaaccatgtcctataacattttgattattacattccttaatgcaatcatcattttttttttcaaaaagagacaggtaaaaagaggataaaaaaaattaaaccacaaaacataattagaaagctttcaatagaacccctatacatatagaattatatcttaagcccccaaaatgaggtaatgtagtgcagaataagtctccattttttttagaagatcttgaaatgtcaggccctcaaaacctttgacgaagaatattgcatcatctgcaaattgaagatgactcactctatcttgatttttccccattgagaagccactaaaatgaggaaagctatttccaccctacgtccaaggacatccacaactatagtgaataaaaaggaggaaagaggatctccctatctcagaccccaagaaaaatctttgccctatgtcttccattaacaaaaatcaaataagaggctgaagaaagccacaccctttcatccatctccatttcaagccaaaacccttttctccaagtaccatgtccatgtagtcccaatcaacatagtcataagccttttcaaaatcaattttaaatacttaccatttttccctctgcttctgtattcttccatagcctaattggccaccaagacagagtctaagatttttctaccctccacagtggctgcttgagtttttgaaattgtgtttgcaagtactcctctgagtctcctctaagtctaacaaataaaactttggatatagacttgtacaaacttgtgatcaaattggcaatagtctgttaccttgtagctattcaaatttttaagaatgggacaaatatatgcttcgttagtgttagcctatataaccccatcctctaagaactatccaaaaacatccattgaatcttccttcactacttccaaattcgcttgatacatagccattatgaagccatctggtccagggactttgactttcacccaatcacactactgcattttttatctctttatttt

SEQ ID NO: 185292 - DNA, 2781 bp, Cannabis indica
ccagatcggcacactgctgtgagcagagccccagatcacccttaccaagagcaacccaactcaatcggagcaccacagctgagctttcgctctccaaacccaacgtgacaaattctacaatctcttctttccgccttaccaaaatgcactttcatctccaaggctccactctccaaatccacctctgactcggaagaagagcttatttgaaggtcagtcaaaccttcaatgtcactagaaaactgggaccgacctccggccccggacccaaaccgcgaatgccaagactggtcgtctgaatcttcgtcggagagtggcacctcactgcctcttcctcctcctcttgctacaacagaagggtgacgaaatcgacgatggcgatgatgatggtggtgttggtgttggtggcactcttgattagcctcagtatcatcatggtgggttagactcccatcaacagctgacatctctactaaaacccagaaagagaaaagtcatgaaatgatcaaaagaagaagccttgtagaacaaagtttgagctcgaggccttcaactttaaagggttaaacttaaaagagctttgagcttgaaactattatgaattctaagaggtaaaacagtggaagaaaaccagtggttgtggggtagtaggagttgttggtgtgtgtttttttttcgctcctcttgtttgtcaaatatatcagactcaatttctctctctgtcttgttctgtatctatatgaccaagtctacatgtgtaaataaataaatatccatcaatacctctttcatctctttttaccatctcagttgcatgtgtcagtttcgagcagtgtcttcgaaaaggaaaacccaagaaaaactacagttggggccgcatgtgggggggctagtatacggcatgtgttcaaggatgaacctacacactcatctttttttgcagtgacttgtaggactcactcagaaaggaaagtgaaacggtgttgttgctattttcttttattattattattattttaaagagagaatggattgtgggaaagtgaaaaaggctaggcatgcggcataatgagtgagttgattgatagttgcttctttctagtgctgctagtgctatttaccattgccacatttccttttcttctctatctctatctctttcatttcactttaccctatattttttttagccctttttcctgtaccgttttcattttcctcactttaccctttagttctttatatcccttttcttaagtaccgtttttatggtcttgccttttccttttaatattggctttccatcttggtaaatgagatgaagaaccgacaaggtatttgacaccaaaagatgtagcttgataattacatcatggaaagttagtccccacctcaatatctagatctgtttttaaaaatgggtaaaatttcggttgataaatgagaaagaagaaactacagacttaattcgaacaaaatattatgtctatgcaattctctgggttttttttccttctctctttcccttgttgttgataatagaagggatcgatttgacaatgctaagttccaataacttaggcctacttaagttacactttctaggagttattctcttgtaaacttccagctgggtccccttcggttcctgctacacaatcacctcacataatttgcttggaatcccattattagatccatatctcttagaaatatcagtttcaaacattgtatggcaaacaaaccacttccacatataagtttgtataaatgaaattaatacatgtaaagtaaatagttttcagggaaacgatactgaaatatccaaaactaacatccagaactaagccagctatgacgcctaaagctggtgctaaagcactgttattggatatgaattctgaaagaacctggtgccatctaaaacaaacagtactaggaccggcaaaagataagaaatctcatagaaaaaactattcttgcctcaaaccagtccattgacaacaatttgcatcgccaaaattcactaatttcaaacaacgaggatgctacaatggtgtgtaaggcaactgagctaataaaagataaataatcaaatccaaaaaaaggtacctacaacactaatggaatttcatcaagctgcttgggcattatcttttgaaacattttctgaaggtttagccaggcttggctcactccctaatgatttggttaagttcggaatgtacttccaacaccgtttgtggactccacttattttcttgggagcatcagccgctgctaagcctgcatacaattcagttcattaacatcatgtatttgaaaacagaagatgataggaatgactcaatattgaagtgttccagtcaaataggatcaagtattatagtgccagttcttattgtttcaaaaatgtaagatgaacaccatcattagagcatgatgatgtttctatttcacacaaaaattcttcagtttctatgtggttccaaacgatttgaaacttaaatttaacaaagtcctcaatgtttttttttttaacaatagttaggtcagtactttttctctatctctatacatatcttctgatttcttactctatacagatttaccttcatcaacgtatacatatgaacagcagatgaaccaatacttcaaactttaaacaaagataaggaaaacttccaaagcttaaggaatcactagcccatctctccaacttttcaaggaatgggatgaaagctagaaatttttttttttttttttagtttttagtaagta

SEQ ID NO: 185293 - DNA, 3391 bp, Cannabis indica
atatgattattagagttcgtatttagaacaatttagtttagtcaatcgtagttttcaagatttgattactctttgtttgcggtcttacagttcaaaaagaaaactacagtcaattagctgttagagaaaatatcacttgcgttgattggaaccaaagttgcaaggtgcattttttcccagcattatacatgaaataagtatttctcaggacattatctctataaagcaaatcccttataatacaatacctccctagctgaagaggaacataacctataactccaaaccaatgaactgcaatatccacataaccacatcttcacatttgggtatctccctttcagctgggtttacgaaacctaaaagggaactgacaccaccacataataatctttaaatatcagcttctatgtccaaccaagtttcaatgataactcagagtcaaattcaacactgccactcctcatacttctcaactaccagaggcagcccggggttttgggctggtagcaacggcaactgaggaaacgaatttcgacacaagaacggcctcattgcttacggcattggaggcagccacatcttccatgcgcttccatgttgaatctcgcttctcctgtgtttctctgtcctttacttcatcttcttggaatctatccaagcattcatcaaacagagcttgatcagcatctgagaatatctttctcacattcaatgtcagactttgaacagcttgattccaatgacttcttgtatttctctccaaagctggtagaattataggcaaaagtacttggcggttctggatgatcaaattccttatatgatcattgttccacaaaaataatgtacgttcagctacctgcaatgcaaaaccaagataaaaactcaattcagtacaatttgaagtgatggccacacatacacattcaacatataatacaaactacacatcgaactttgcaatgcaactggtaatcacatgcaaccatcatagaactacatatttcaagaattcgtagcacaacatcctaactaagttattaaaatagtcgagtaccaaagtgcacaaacttaaccatcctctgcaacttttaaagggtggattttagttgggaattctcattttccaccttcagttgacaaaatatatattttttttttgtaatattaccgtcataataactcactcaggtatcgcaggctaacaaaaatagcacttaaaagtgtacatataacaaaatacaaatctgtagtccatggtttggtaacagacacaaaccaaatgaatattatgtagaatgtccttacatcgcccaaatttcatttcaacggaaaatacagaccttgacatgaaccacaaagtaatctataagaaagaaacgactgataaaggagactttttttattcttagaagttccatgaagtaaagattagtggcaaagagaaaagatgcaaagattagtgatagttttaaaaatgtaacaaaaaggcaatgattcatgaatataagagattaatgggtacctgaaaatgaaagctgttgaggcagcgaccaatttgacgaaataaagggaccatgcagcgttgaaattcagctggttgggtggcttccagaatctcttccaattcagtaaggaacataacctcttttgaactattagtaacaggccaatacttcaaaagacctcgaatcacagtatccgcgagcttgacatctttctccacaaactgagttatgcaatacgaaagctgctgatggtacattgccacacacttgggtttgtggaggggtatcaaagcacggacaaggaacagcttgtgctcttcctttaaaggtaaagcaaaaccattaatgatgcttcccagtatctcaagcaattctgcaatcccattgtgcttttcagtctcaaaaatgaaacgatagaagatattgttgatagctttcctgatgtatggccgatgaaccatgaacttcccataaattcgatgaaggatagtctttaagtaatctctctctctttggtcctctgagtcaaacaagtcaagcaatcttagcacaaacgagtggtcaatatatcttttggctagcttggcatcagtctcagttgaagcaacaaatctcaataggaattcatacacaatttgaatatgaggccaagcaggttccatacttggctcctcctcttccaagtcatacatttcaagacccttattctcgtgattgaaagatggaaacgtacgaaacaaattggctgccaccatcttcgtaatctcttgcatcatcacctcattgaacttggaattataagaggaaatgtaatccacaagctcaagtaaagtttgcctcttaacatctttctctttaagactgctcgatgggtcactgaaatcaaatacaacacagcacatattcaatttcttaatgaacaaattctgcttctctgaacttggaacgtctctaaagctcggcaaagcctcatacacccctgaaacaaacaaaggacccgcttgggttgttgcacttccagaagttttcttggcttgattcgatttattgccgagtgttccattgctagaccttgcattggctgagctcgaattcgatgattttgaggtagcagaggtggatttcgagctgttactcgaattgggtccattggacgtgtttatggatgaatatgcattgactcctccatcaccatacgaatcaccaagcgatgattttgagggttttcgaggaatcttaccaagtaaattttttatcatatccacaaaaccctaagtacttacgtttaagaccaatataaccaaaacttaatctaacctctaacgaccgctcaaatcactgtcatttattttattttattttattgcaataaacaagacaaaccataagagccagaaggtggaatcttattacccagtagctaaaaccctaatcagaagctcgagccaaacccgattatgtttctgtccatggaaagcctcacaatttcaaacgaagaatattttgaattttaagtcaaaataaattgaaaatttacacatatatacagattacagatacacatacacataacaaaacgtaacttacatttacgacgattgatgtaaagggtatatagaaagtgccagaaatcgagggaaaatgcgagaaacccctagaaatctgaactgaggacttggtctccgactatatctgatagataaaccctttacccccactcaactaaattttccagagagaaggagaaggagagagtcgagattttacacaactataaccaaaaaataatgttatattttaataaataaatgaataaatacacatcaatagttatagaaataaaatactgaaaatggaaatgccttttctctctctctctc

SEQ ID NO: 185294 - DNA, 6020 bp, Cannabis indica
aagatattttcataattgaacagtaaaaagaaacatcgggcctccactttcacataaagggaagagaaaatagtacctgaagaagatgccttaaaaggcaatgcaatatggtctgagcttgaggagttggctcaaaacatggaaattctgtacaggctgaaaatgacattctttgggaaacaccaacaacaacaccagcatttggaagaagccctaaaggatatacctcacgatcgaattccagctccggatccaactaaagaataatattgagttacttcacaaaccggagtaaatagaccaaacttatagcttcccaagattacccccaatttgtaagaagcatataaagtttcacaacttacaaaaccttatgttgtttctttaaaaaaaaaatgaatataattttccataaaaagcttgaatgtgaagccagcaatttagtaatgacctcaccttgaaaataactaaaattgcacactaaatgggacagggaaatttggaaaagaaaaacaatactaagaatgaagataagcttttactatttgcaaaacctgctacatctagcaccaaaaaaaagcataataaagtttgctatatgcacgtacctgtaagaaatcctcctgcttaaaaggatcggcacccaaagaaggataccaaacctgtaaaaataaacttccaaccagaataaatatcagacaagaaaagaaacagaactaaggcagaaaatcacttagtatacgagatctcgcataagatcaaagataaaatactgaacttgatgactcattacctgcatccctctatgtccataatcaaaccaagatacttcctcaattaaatttgttttctcttctgattgaccacaagtaacccaaaataattcaacagaatcagttagttccctttcacgtccatcatccaaatcaagaagagaaagctccccatttactctcattatcaaacacctagcaatgcaaacattcgttataactatgtatctagctatttgcagacaatacaatatcatttaaatcagcaatacctagcaggctctcttgccaggcaatcagaattagagccagtgtgattatttgaaatacactctcttggaagctgatcagggatgaagcgcattgacgctggatggctctttgcagtcattatcgaaagttctcgtactgtagaaagctgtttgtcattttatcacttaaaaatgtatgaagaatataatcttttacaaaattattcacatatagaatgcaagttaaatcaaaaccatgcggctatcagcaaataggtaataatttgaaggacatcttaatggaaagtaactgcaaagcattctttacctgtaaatctggagtggtagatggtgtcaattcaccaactaattttacatggaatatatggacatcaaatgggcgataagtgaccagtatataatcttgatagacatccatcaccattggtttggcaagcaatgattttcgacaaagcaaggagctctgatcaagatgatatctagggtaaaaaagcaattcatacctgaaatcataatatcataataacagtatcagcaattcagttatgcaaaattaaccctcccaccccaccacaaaaaaataaataaataaaagaattaaataaaaaaaatttaaaaacagctcaacatcacaaaattaatagggtaaaatttattatcaattaacaagataggcatatgaaaaatgaaaatactagatgtacacaataataaacaataatgactaagaaacagcattgcaaaattttagtaaaggaactaatatgaatagctatctcacgtgttagaggagtcaatgtagttgcagacaacaacaatcttccccatccataacaaaccttgacactgaatcctctgttcctgcgtaacatcgccaaatactcgccacttccttaaacgaatatcatatatgattaacccatgcaaaccagcaacagctaaatacattccatcttggctagctgccacatgttgaactggccaattttgggaaatatatgatacctgaacaaaagcaaaaccatgttagagacattaatttatattaaaagtaatgaaaaccaaaacagggtaatgtatcaaagttgtgttttgaagtcattactggaaggttaagatgtagcattttaagttcatcagtatcttcagactggacaacaagcaatcgatcatcaccataaatcacttgacgaacatatgttgagccagaaactcctctattgaggcaacatttaccgaaagaaaatgcaacaattctctccgtacactgttcctcgagggtataaagcctacatccatgttcatcccactgcatcattgatgtgccactcattaaaggttcatatttacactcccggttaggcttaaccactggagaggataccgaacttaaaccaacttgacggactgttgacatcaaacgacaaccagaaacagaccaaactgtaagtcctctcaacttccaacccactgcaaaagcagagttatctggggtccatgcaatgcagctaacaggcccagtgtcatccatagaatatctgcaaattataaatacatcagtcatgaactatctgacaaccaattcacatagatcatagtgtagggtaccccaaacttacccccagtcatacaaagacacagtacggataagtgatgtagattctcccaaatcatataactcaacaagccctctcttggtaccaacagcaaggatttgttgctccgaagcaactgaagcacataaagcatcaccagaaccaagctttctttcagcttttatatcttctacttgctttaaacctttcttgcttactgaacatgacaatagttgcccattggagaataagacaaatagtaatctcattggcaagcatagctccagctggacaatggtagagtttctgggaacattatgcttggtaatcaatgattctgaatgccctccagtaataccattatccaaagaaagtgatgatagatcaatcccattgacatcacgtggaaaggaatcaagttcaaaagccccgtaaaactggacatgaaagcaatgtaaatcctcggcacttcgttaaaaaagttgtatatcatttaaaggactgtacatcagaaaagaaaaaaaaaatccaacattgtaatgaaacatttcattacctcccccttccaagagatgctatacaaggacccattagaaagtccaagaagcatatgtttggtatcacagacaatattgctcctggagagggcacattacaaagaaaaataaaaaaatcaagatcacaagaaaataattttcaagacaaatatctgcaaaaaaatatgaaacaaatagctactgtgtgaaataaggttagcaacaagataccgatattaattaattacgaaagctatgaaagttatgaaagctatgcatgtacatgcagaagttatgaaagcttaggatattcaacataaagtcgtatagattaactttacagaaaattcaactttacaaacagatgctattaatattaatttccaattagttgaaatttagaataacaaaataaactctggattccatatgttgataaatactgtaaaaaaaagtattgctccctatgagtagctactatcaatgaaactttaaaaaaaatagaaatcaagctctttaggtgagaatgggaggcacgaatttcagtaattatgaactatttatgcctctagtttttgtgaggtttgaccttataaacaaaggcccaagtctagacttagggtttaaacattaaacagaaaaaccacatcatttaaattttgaatcaagaaatgggttgaaacgttctataagaagaaatccagcagctaaacacatacagagagcttgggatagattttgaataacaatttgtttaagaccctagctcttgaagacgaaatagctagtacttaaactggcctattttaacattgcgcctgtggtttgcttatgaatcaaattgttcttttgagtcaaagaagaaagccacttacacagtcaagtctttttgtgcaaatggcacttgctcactgataagtagagatatattagcaagaaacaatccagagggttgcttccctccaacttgtatttttttatctgtaaactggaccttgaaaagttgaagaacgaaagaagatgtctgccaaaagaataaataaacaaaaccaagaatgaatactagaaataacaagtaagaaacctttgcacaaaaaaaaaatcttgccaactcacaataacaaattaaactactgtctacacaaaatcaatgaaaaacttacaagaacggcaattaatttggtatcaggactccatacagcttgcaaattctctccttccttcttcagtgaatttgaatccctcttgtacttccccaatctaactttatgctgagtaatatatacaaaacaaaaaaagtgtcaaatctctatgaataacttgaactaaaccatttactttcaaagaactacacttctctttactctttcgaaagagaaaaaaaatagaactacactcaaatatacaagtgaaagtgtacccatttccacattataacagtataaccgtcaactcctcaaaatacacacattgaactgtgaaaaaattatacaaatacgaaactatatttcggttaaaaccactaagaaaagacctacagctcactctaaaacaagcagtttcgacatagacatttccaaaactcatcttccacataaacgaaattatacaacgacttgtacccatttccacactaaaacctcaattagcaattcctctataaaccatcgcaaaagcacaaaataagacacacacccatatatagaagttgaaagcgaattcaattagccaactaaatttcctatacaaacacacattaagtgtacctgagaagagctccatagctcgatgtgggaaggagacacaacgagcagcaatcgattgatgagcttgaggtatatgatccgctgtgatgaaggagcgagaccctgttcgagtgggataacctgcggccacccatatgccatatacatcttcaaattgtgactgtttttggatttggaatcggatttaatcagaaaaaatggatcaaagagaaggccattggattatacggaaagggatctgagtgcatttgcctgcccaattcaggtggatctcgtcttgcaactattcacaactcctttcatttttctttttcttttttaattagtaaaataatttattttctcgaaaattactgccttaatatgttttgacgtctttgacttttggggtattttttttcttgacgtggatggagtaccgtaagaccactgcacccgcaccgcattatatatcaactcatcctttttttactaggttatagaaaaatagcaactaggaataatatttgttcagttttatttaaaaaaacttattattgatttttttatcaaaaaattacttattatatatatgttgtacttaattttggaaaaaaaaataatattcatcacccttcatctcgtatgaaatttaatagtataccacttctacgaatagcccttaatgccgcatcttaacagagaaaactttaaccaagcgataaaagacgaaacaaaataccacatgacaaagaacatgagacatgcgaccacttttttatccaagaaaaggtaatttacttcaaaatcctaattcaagaagaattctaacaagagagttaaaatatttttgttggaaatataggaatacgaaggacaagatgatatcttttaaaagaaatgtgatacacgaatactaacacttctctagtgtcaatggttgcataatgagaacattccaaagaaaaatggcacttcaagtaaaataattcatacatgtactaagacttaaatcttaaatttaaaagtgcacaaaaaaaggacaagaatgatggtacacaaccagtgacactctctacatgttagatgtttgtttaat

SEQ ID NO: 185295 - DNA, 9469 bp, Cannabis indica
tctctaagtgtaattaagtagctagataaatatgcaaaactattcttttaactatgtgtctaaaatctaattctctcttagcttttcaaacacgcctttagttttaacatatagaaaaagttttaaatattttttttcattgtagttatttaagattttcaacaaaattttaaaaaatttaaaataattgttcaaacattttattattcttttgttttctttaaaaataaatattttacatgtatataaattaaaatagataggcatacaaaatactgtttgaattttatttttaaagagttaaaatttgctattacctttaaattatataggatatttaaaattataaaaagaattaaactaaaaaattctcctaaatgtaaaaaaaaaaaaaatacaccaatgcactatagaaatttccaatagtatttaagacacgatgagatgaatatgtatgaaagagaaatgctaaaggacacccatagtgcgtaatattcttgtgacgtgtaatatcgctattagtacaatttaatatcgggtcccacatattttactttaataaaaattatagagaaccgttaactaattataaagcgtcacttcataaaggtgctaggcacctcagtgcgaattatcaatgctctttatgaaatagtgtggataggagtgttcatcaaactactcacgccgtgcaaactgctccacaacataaaaaatacaatttgaaattttgtatggtgcggttgtaatttatatttttgccagatggtgcagtgcattacaaaaactgcatttacggtttagttagaagaaaatgttacaacctgcatcactcaaacacctctagttggactgtggaatgggtaaaagaaagttgcaaaacataaaaaataaaaaaggtaaattggcaaagcacatttcttgtcaaaacaaaagatggtgacgcaagcagcgatggaaggaaaatatgatttgaatccacgtcggcatcgacatggctttgtgggtgcgcattgcgcaatcaaataacgttggcttcaagagagagagagagactgagccaaaactagaacagaaagcggaaagagaaacagtctttcttttcttttctctctctactttcttccctctttcatgcaaaatttctcttctcgtaacaacattttctcttctcccaaacagaccctctcgaggtattttccatttcttttatagttttaattatttttttgttttaaaaatagagaatctttgtgatgttgtgtgaggattgatcatgggagacacagagagttgtagtagcagagccgctgatttttcgttgactcaaaatcgacagcacaaacagaaagttcatacttacaatgaagttcttcatcgactcatggacttaaacgtggctgagtcaacgattcctggtttcgaggatgaactctgggctcatttttatcgtctccctgctgggtatatccaaaccctagctcttacgtacatatatacgtatgcgtatgctaaaaatatatagaaatatgtgtatacacgttctgtatatttataatttacaagtacaaaaaagctgaaagattatttgtgtgtttatttattaatttgttacagttcaattcgtggtaacgtacggtatggtgtatcctctgttctcattgattagattctttgaatatttttggccaaatatatttaaataataggatgttgtcattttgaccaggtgtggtattggagaatctttaaatatcgctgtatgtgttttatttatttatttatttcttttattgttgttgttttcttgatgctattcggaatagaattacggtcaccatagcttgtttgatcgcctaaaaaagttcaaattagcattgaccaagtctaattaaaaggcatgaattattaccagagttgtttattatatcttatcttatctgatcatatgaagaaaatgtatatataaaaatatatacattttttatttgatttggcactcttagaatgcaataccaatttattgatgttgtttagctttttaaaggtatgcactggatgtcaatgcggagagggcacaagatgttcttatgcacaaaaaattactccagttggcccatgaccctgctactagacctgcatttgaagtccgtcctgtcctggtatttgatgcacaatactagttttttgaatttgtcgaagtgggaaaaatataacacttgaagattttcttttagctttttgtactattattcttgtatttgtagatcaactgtaaaatccatttgtatatttaagctgttaaaattgacactgagaattggttctggtttggaaaacaatttcataattttcctttttcctatttttatataatgatgtaagttatctcagtttaagtatatcagtattaaaggtttatcaagtagtgataggctaaattggattgcttatatctctcatgcaggttcatttggcttctgatctaggtgcacaaagaatagtggaaacgccatggtcttatgcaagaaaacagaggtattttgctaatgaaaatggtaacatagtgatttattgtgtagaatagaatgtttgatgtttttttgtcatcctcttactcttttttaatatgtcagcattcaacctcaacaagcctttgatttgtcacctgacctaagacttgcttttgaagccaaccaattctccattcaaaagttggatcatactatgaattctcggtaaatagtccttagatgtctattgttattcaggaaacaatcgatttttctacggttattctttttctagtaagttttatttccaactttgtaatctttttgcaggccaatgcatgagattacaatttccacaaatgacaaaccgaaacttttttgtcaggtggctttttatttgttttgtaaggataatgttttggtttacttataatctttgccgtcattgttggtggtgttgacaactcaacatgccttgtaattcatcatattttcctatgtacatttttagttgacatctttactgtctgaagttgggttgaacattcaagaagcacatgccttttcgactatagatggctactctttggatgtttttcttgttgatggttgggcacttgaggtattttcatacttcttaaggacaactctataatggatgctagcttttgtagaaagaatattcaattgtttcaaaaaaaattagtaaatttaaatgaattttaaagcttagtgcttttgagttcttttgattattatgttcctaaatttctgcttcttcttttttggcagtcttaaatagcttaatttttctattttgaacaacttgaattgttttgtaaatgtgtaggaaactgagcagcttaaagttacactagcaaagaaaataccaaggattgaggtaatgcaacttacgggtttgacattgtgacagaaaatacctttgtatttactacttgaaactagaaaaaataatgatcttttttgtcttaatgaactaaaaacaaacaaagggttcgtgttagtccttttactataccatcaatgtggtattagacccataatctaattattcattgaaaatgttaaatcaatctatacgacgcaatgattgggagagaggatgttttcaggaaaatgattttctggggacatagaagagaagaagtggaaggctatctttttttctttcacttaataagttgttttcatctttttctgaatagcattttaactaacatgataaatagtgttgtagttctggtacgtgtgtttcatgtttctaactttctatagacacaatcagctcaatttatgtgtaaataaaatgacatttcaaaattgtattgctgaagcatcccaggttgaatcagtttatttctcctgctggacagccagagactggaatgaagctgatattcaatcatgccgagatctgtaatgatggatctgaagtcagggatttggatctacgcttgttaaaatttgaaaagaaaattgcaactggatcatatagcgatttgtgagtttcatcaccagattttttttcctccttaaatgaatatgcttgaataatctgatctgatgatcctaggtacaaaggtactttctataatcaagatgtggctataaaagtttttaggactgaacaccttaacgaaactattcagagggaatttgcacaagaagttgatatcatgaggtctgtttttaattctgttactaatgtggtgatgttcatgcaaacacattctattgtaatgtaaatgttgtctgtctggtttgatagcttcaccaagatgctactttgaaaaagtaaaaaagcttccgttattttggcggacttggttcagtgcaatctcttagttatcaagttgacagtgatattccctattagagatggttcatattgaaatgatgcaatttcgtataattttaattgtatttttttattggatgcatttgtgtgatattcttggaaagcattttactctttaaaacatgtaggaaagttcagcacaagaatgtagtcaaatttattggggcgagcaccaaacctccaagcctgtgcatcataactggtacttgaattaccttttctagatacaaagtaatcttttaactttttacttttgtatatttaattggtaatatggttcgtttcttctgtatttaaattttctcaattgtattcttttcattgcagaatttatgtctggtggaagcttatatgactttctgaaacaaagtggtgttttgccacttcagttcttgctcagagtggcaattgatgtttccaatggaatgaattacttgcaccaaaataatataattcacagagacctcaaagctgctaatcttttgatggatgaaaatggagtaaggattttactatttatttttatattttgtcgttataatctagtcagatcttttacttgttggtcttaaattaaaggaagcactcttaaaacaagcatattcttagccttacaattcatgtcattacctcccttagccacaacaacttgcatttttcatgttcgctattttttcttgatactaaaggaatgcatatgcatgtgcattccatgtccttgttgataggatcttaaccagattattccaaggctgtacagaggtttagcatgctgctatggatttcaaaatgttaagcctcaaattttttttgacaggttgttaaggtttcagatttcggtgttgctagagtgcaacctgagtctggcgtgatgactgcagaaacaggaacataccgttggatggctcctgaggtatttattcactgagtgcttactcgttgtatcttgttcttaatgagtggaagaaaaaaaaaacacatggagagagaaattcacgagatggattttgatctcgacaaatgtactaaaagcatctacttgcgttgaattttcctttttcaattttatgtataaaagagacactcatatatttgacaagagtaaaataaaaataaataaactaaaatgtcctttttgacgactgcataataagttctcggatttaatgtacttgcatcttttacattgcaaattgcatcaaatcagtgcttgataaggtgaacatgccaacttcatttatgcttgtgtgaatgagagttgttcaaaagtttcaagcatcataaaagttcgtaatcatatttggatgatttcactcatcacatcatagcttgatcagtcctcgcgtgccatttggttatgattgtcatttttcattccgtgtcttacatgtaattgtttgctgttgataaattaaaaggtcattgaacatagaccctatgatcagaaagctgatgtttttagctttgggatcatgctatgggagctactaacagggaaggtaatgccatccaactttaatctcatattgacataacattatggtttgctttctcttccctacaaaaagaaaatgctttcttcagttaccaaatacaaatgcctctttatatcttttcctttgaattcatttgttgtggcacagcttccttacgagaacttaaccccattacaagctgcggttggcgtggttcacaaggtatatttctttataactgggtgcaatataatatattttttgttcgggtatccaaatcagtgtaatctattagtttggtaataatcagaaactggtccaaatatttgagaatgcaacaaatattcaatctcaaaacagtgagacgtaaataaccaagaggttcatgaggaaatgaatttgcagggcctaaggcctacaattcacgagcatactgatccaatattagtggaactcatggaaagctgctggcagaaggaaccatctttaagacctccattctcagagattcttgagattttgcagtgcatttccaatagggtactgaaagttcgaaaaccttttttccccaatatttttcttttttattaaaaaaagtatgattgttttgaaacagattagtgatccgagggtatgcaagcagaaggagaaggcatcacctataatcccagcttttatgcatggtcgagggccaagtaccaaatgaagtaggtttctgtaattactttcttgtaaaaatttgcctagtaaattagtctatcttctcttgcattaacccatcgggaagttgctactatgtccccaaaattacacaaatgttgaggacacatatggtgttaggcactaataccacatctaatataaagtatttactatgtggtctttgtaacttaagattgatctgtatttgtgtgtggtatctaacaactcacgtcttataaaaatattagttcaagtagctgcctgtgtgagtgtgtggaaagaaaatttctaatccacagttataaaacttcaaaattaacagtagaaccgtagaagacagacagtgtcacacaacccctcagccaggaccacaaaagtgtaggttgtttgatgcatattatcattgtagggagactcaagttcaatcaaatatatcgattagtgttttgagacaaagaggtctcacaaatttaaggccgtttgggagggcttttcaacaagctagaagcgcttctttaaaaagcttttttgctttggctgattttcagctacaattacaccaaactggtgaaatattttcatccccaactcctcagccagatcatagaacatggttgtgtgatgtgtatcatcattgtatggggatgaaagctcattaatatctttattatacatcttcaaaatagttgaaattaaaactcccaacaaaaacaaagatcacaattcaacattctctcacccttaatcgcacctcggatctactagtgtgctctcctgcagttggtgcattcccatgtggtgtactgctcccaccctgttattgcccttggtcttgtggctttactgcaatcattgttactatgacgttggttcttgtagttcctccgacctctttcttgaactccatggaaaactatctgctgttctcctgtggttgcgattcctttgtggcatatggaccagaattctctcgttgcggagagtgggtattcacatatcattccacgcaggtggttgaggtggcagttggttgtttgccaccatctccatgatagcctgcatcaattccagttatcccggtgttctcagaatcatagtttcgttttttgtttcatgttcatcatgattccctccataaaaaaaaaacaatcacgaaataatgttaaaagaacccttcttctgtcaccaaatattgttggagaaatttaaacaagacagaattccacgagtattaaaggaaatcaagaacactcaaattaaatagaatgtgtgagtattcattgaaatcacaataataaattaataataaagagattgggccaggtctcaagccagtgtctgtcatataagtttggtcattaattgattagctacatattaatcactggtaaatacattaaaggcttttattgctattataacataaaactcctatgaataggttcagaacacttgcattaaccctcttaaactacatgttgagcgtttatgtgttgattgatctaacctggcagaatatgaaagatcatcgcacaaatggctaggtgcaaaccttaattgtagttgtcacacattatgggggtgtttgcccatgtcgtagattatgaagaccagtctttatacgaatggggccggggcagagccgcttcagaaataaaatgagacaaaggattataataatgggcggacctaaaactaaagttaagggagacatacttttcttttgtaaggaggggcaaaaagtagactaaatattaaaagtaaagatgattttactaggatttgaaccttgacttctataagatgtgtgaaatagcctaatcaacggtaaagttactatgtttagatttatcacatttaattacaaatatatattgtaattaaccaaaatatatatacatttttctcgcttatatgtggatttgcccatgattataatggtttagtcaaaattcagtctgcttagtttacttttggcaatagtttgtgcttaatcttattcaatctagatcacttctttatagagaaagcaagtctccgtttagattagataaccagttatatatgaccgttattacattaattatataaattaataagaaaaacataataaatgaaagaacagttacgaacgttcttgattaatttacttgaatgcatacgacttaataagtcacacattcactatctatattctaaacacgcgagctcgtgaactctttcgtattttacttgtgcatatatgggcattcatgcgtcaacaaggtagaactttcaagattcttatgaattatcgaacatattagtctttcggatcagatgtgtgtaaaaatgcagtcttaattaaattgctactagccttctacttttatgagtggcacggttattaattaaaattgtcgaggcggggtgccgaataaaacctggttcgtacggatcagaggttgacctgttggattaggggcgacctgacccgcgaaaaaagcccaattagccattcctatctgttaatgggttcacgtgcttttatattgcaagactggtactataggataaattttattaacagattttatttgcttttaaatcgtattcggattgccgatttttagtacttaccaatctgcaaaagatattctcgatagaagactagactgagataaagctcaaaaagtgttacataacataatatgctatggttctaaggaatgcaattgtttatctggtcgagaagatgcttagtaattactcctatctcataacttgatttttaaagttttatttatcttggattatacactattctatctattgaaaaaaaaatagtctaattttttttaagcatttagaaagaattttttattctttattaaaaccacttaattttttttattaaataa

SEQ ID NO: 185296 - DNA, 1028 bp, Cannabis indica
aaaacacagttaatgatcatatatataaagaggactaaatggaggttgaaccattaataaaattaaagtttaaattagcttttaaggtaattggtacacctacagcattaatatatcactttgtagataaatttcaatgaatggattgtcggggaaatgaacttatataaagtattggtgtattattttttaatgttgtcattaaatttaaaattacgtacaagaagaacatggagtgtttattttaattttgcaccttcaaattcaaagtgatcaatatttattcaaactagaaaactatgcacgaccatgttttattaattacattacagatcagatagacgaatagtaattctacagcgcatcactacgtactactcgtgcctctaaatctaataccagtgtttgtgtgattaattattaaatctagcatattttagagtatgaaaatgtaaataagtgattcaaatataaaatattataacttattttgttaaaaatttactttaatagtgtgtgaaatattatgatgcaaatatgtcacataataaaaattaatccaaatttgaattacaatatactttttatatttaccattgcaatttttaatattttattttttaaattttatatttacttttgtattgttattattatttaatatttacattttcattaaattttttttatttttcctttcattcacataaaatttgatcattttttaagaaagatgctccaatggcaagtaacttcaaaagttaaagaattagtaacatagagattgacactgttcagccaattgccatagtaatgggcatcctaatagagatgatatagtataatagtactgcaaaaatgatctttaacccttgaagagagggtcatagaaagttttccatgtcctcactttataagtatatacttgaatatttcgagacatgaaaaattgtataagcgcaattccaatattttatatatcaaagttgctcattagagcatatcagaggttagctgcttttaatagt

SEQ ID NO: 185297 - DNA, 4773 bp, Cannabis indica
aagtgtgaaatcactaggctatgcccatgaccacattttgtaggatattttaaataactataacgtacacaaatataaaaaatatttttatgtatgtcaaaacaggtagagagggtatcagtgtatcccttttaaatggatgcattatagaagcacctaaaacaatataactaattaaaaaaaaattatcaatttaattagtcaccaaatttttaaaattttcataaaataaaatagatgcatttagcgattctaggttttcttaaggagaaaatgaagaagaaaatttttaattgggagagtcgatttccgtcaaaagctggaaaggaagtcttaataaaatctgtggctcaagcgctctcgagctatgctatgagtgttttcttgttaacaaaagaaatttgttctgagctcgaaggtatgatgtctaaattttggtgaaagtcccaatccaattcctctagcagaggtgttagctggtttagttggaatcgattgtgtcgccacaagaatgttggagggcttggctttcgtgatcttcaggattataatctttctttcttagcaaagcaaggctggaggttgctgacaagtggaaactctcttgtgagcaggatttatcaagctagatattatcctaatgaaagctttttatcagctacattaggaaaaaatccaagcttcctttagcgtagtattttcgaagctcaagatttggttcggtctggggctagacaattgattgggagtggtcacaatattagtatcttgagagacccgtggcttccggactcaagcaatccgtatgttaccactaaccataactagtcaacagctgtaaatatacaaatttatatcaaatgtaatcttttcattaaacttatcaaaagacaatcttggcattaaaaatctttttgattagtttgattggcaataaaattaatgattagtattatttgcttcttttgtatatgaatcgaataacatcatttcaaagagtgaagcaccactctcatttttttgatagaaaatatacaataccaataattggagaattctgatttgcatgaagaggattgagaggcaaaacaaaaaattaagataattaaagtatatttatggttataataattagtcttcttaaaaattgatttaaattcgtaagatttagacttatgagtagagtggtagatagtccacatttgcatttgttttcaagatggtagattgggataacccaatccaaactatacatagcaaagtagcacatccataactcattgtttattgataaaataaaacaataatctcacttaaaaaggaagtgatgaactttattgatttacaaaacagagatttgaacaaactgctatgtactcgaatactctactgcactttcacgcttatttctatagtataatttacaagaaaatgatcaaacttggatagcaataagatctaagtgtactgaatactcatcttccactacttgcttatggcttcaaaaagggtgcagctgaaggacttcatttcataagtaaataatcctgccttctgcataatgacaggctcaccatctgttgagaaaaaccctgggaatggaagagccgtgtcaaccaatctttgccatactattccttcagctagcgtgggtagaaaaaccaactctgaatggtcagcagcattgaaggctacaaataaatcaccctttgaagaagaagaagaagaagaagatgtttggttcttcactttttcttcatcaactttcaaactcatggcaaggaatttgcaggttggttcttcccattttggcggagactggtcacttccatgccattcaatattttcttctttcaagaacttcctcttctgaagaaggtcacttctccggtgcctcaatgagctcagaaaagagataaactgtgtaacttgacagccaaaatctgttttcaatgcattccagtcaaatgattttctatcactataggcaatagaaccgccagcggtttgtccacactcatctcccatattaagaacaggaacacctaaagaaacatacaggataagaaggaaattgcggatttgtttaagccgagtttcaaggacaagcgtattggttgtaggaccttcttccccacaattccaacttaactctgaagctaactcatcatcactgaagctgacaaggtcgacaagatgaagtccagaatttctagtaacaaaattgaaagagaatgctggaccccgcccttttgaaaaaatgtccccactcccacaaagtcttgtggcaaggctgctaaggagttcttcacctcgcagaaagttcctaacatcataacagaatctcatgttcatttctgcccacctcttccaatgaggaaaaggtgttgtttctctttccaccataccacggggttcccagcagtctgctatgatcttggtctttgagagtagaggatcaaaagcaattgcttcaaccaaaggagggcgggataagtgctctccacgagacccttgcaatagagaagaagcatttatgaaacaaaaaccatcaatatgatactctgtcacccactggcgaagactgtccaatataatttgttgcacaataggaaaatttacagtttaaagaaggttaatggttcccgatcctccaacccattcaaataataggatgaatcatcaattcctttgaagcgctccattatcagtagtatgagtgaaaactacttccagtagtacctcaattccattggcatgcaatttcttaaccatctccttcatcgaatttatcgcagatatagtgtcaccagtaggtccaaaaatattcataggtgaaaagaaatgacaaggaaaatatggcccccttttctcgtcaaatgggaaaataggttctaataaaactgcatttacacccagatctttaaaatgccccaactttttagtcaaaccagaaaaggtacctgctatgttgtgaagtagctgactagacttgtgatcagtaaagcgcttcacatttaatcgatacaccattagtttctccaatggtaagtttggatgcatatcatcagtccagtcaaaaccaggttccttggacaactgtccaagatactgtggcccagttccatgatcaccagaagcagaactcataatgatcttggcatatgggtccaaaattatgtgtgaagattccaacatatctttccttccctctagatgtgtccccttcagtcgataaccatagctcacaaaactatgagcattattgaatgaagcatgccaaacatcacctgatcgattgacatatgggtctagatcaagctccaaagcaggaatatcagacttagtgtcatcatagaagcacaaaaccacactttctgcatttctggaaaaaatggcaaaattcatggaaccatcatgcaaaaaggagagacccaaaggacttgggtagcctgaatcaaaaccaaggggaacacaaaactttgtcttcctatgacttcttatttctaagtctcttgaatcattaccaattgaagatctcaaaagaaaagagagatagcaggggatattctcagcctcaaattccatctctacaacaaacctgccaaaagaagtcttggaaaatggagtttcaatagctctttcatcaggggccgaagtattaaattctataggcatgaaattggatgaatcacctctaaatattccccaatatagaatcaaggtatcatcactattagacagttgtaaggatgaaacttcaatccgcacagcacaattaacacttttctttttgacaataactttcaccagcccatcaacttctgccctgaagagataagttgatgccttatctagttcttcagcttcagtctttgttgaaaatctttgcttaaatggaatagacatccgtgatgtagcatttacttccaaattagtattcctcgagaaatgatttctaaaatttggtatgctttgcccataaaatagaactttttctccatccatttttacaaaggtgttcataactgtgtccctacataatataacactggcattttgcagcttagatgatttaggagctccacagttcacacaaccataatatattgtagctgatgggaaaagacttgccattggctgaaaaaaacaaaaaaaaaaaattgtcaaattttgcaaatctccatgcttgaacaatttaagatgttgtattaattaatcattgcatttataaaaattaggacaaaaatttcctagtatatactatagaataatgcagctgagacagagatgctttatgtaaaattatgattgcaagtgacaatcaagcaacaatgtactaatcccagaaatcattatgatcccaaacatttttggaaaaattgatgaacaataataatcaatacttggttatttaacatatatcttacctaaacaataaatgcctatctaacataatttcttgtggcttaacagaataattatataaattcagttagttttaacaaaaacatactaacaacaatgctgaagagatgcaaataataattaatatttactttttacacaacccattcatgcccccaaatatatatggcttgtaactataatccactgaaatataacacttaacattgtgtccttctgttatactctgtttcattttacaattaaaattgtgacatggcagtacacgtcaaaattaatcgataaattgaatggattttaataccccttgctattttaaggtaaattaatttataaaataaaaat

SEQ ID NO: 185298 - DNA, 2227 bp, Cannabis indica
  modified_base (2124)..(2124): a, c, t, g, unknown or other
tttaattagaatgaacaccactcaaaaattagaaatacaatacaagttccaaacataaaaaggttttgctatcttccttgtgtagcatcattttggttacacttattcttcactaagttaaattaatcaacgttacagaggctttataatagcgattgattacttggtactcatgccatgagaagcattgataaacaaagattgcaaatccatctcgaccgtttttctatacaaggaattgagaagaaaagcttgaattttcgatgaaaacgaaaacatccttaatagtacttagaagctgcaaaaaatatacctcaaaaagtaagtgatgctaatgtgttatatcctttcaatcgagcaataacactatcgtcttataattggttagcgattgtttataatacatattaaagtaaaagtggaccgaatattaaattgcacccgattacacctctgaatagggaattattaatagcgaacaccgtttatctgtggctctattggttcctgggcttcactgcctttactcaaaaaaacaacacgacaatttcggcgaatagaaacctctctgattcggcgaacaatgccagttatcggatcagtgaagattttggactctagattcccttctagatataaaattgaaccgggaaccgcatgcttcatgacaacatcacccaacctttcggggtaaacacaaacccgatgccattggatggaactgcgctcagcaaactcttgcgggctctcgttctccaatggtcgtcgattgttgcgcattcctcccgttccaactgagaacattgtcagcgttagcccactcttcagcctcttctggattggtttttgccccactcttcccaccactatcgccttataaatgcccatgtctaggccattctccagcaacggctccttgaacccgtggttcctaaacgaatcttttgttggagtgggctcgagggagggtgattcagagtcggacaaggttgggggatcttccaagtcggagccttctttgtctgatgtgggatgagttgtgctggtgcagaagggagtagagaactgatagctctgaagagcggaattagtattcgataggagagagcgagacagccttcgggatagagcagccatggacgttgccattttcagagtgttggttttgttttagatacttgattgaattgctttgttcaacctaaaaaaatgaagaataaaaatgaaaacttacaacaatccctattcttctgatttaacaactataaatactttaacatcctcaaaattttattaatcctaatattgacgctaactaacttacaactcatcttgtaataatattactgagcattttcttatataataaaatcactcatattttctcaaaaaccaaaagcaaattagccaaaccaaaaggcccaaaacagttgcaaaaaattacaaataatagatagagcaaatgaaatcattcttctcactaaaacaaaaactaagattctaagaaagacaaaaggaatatacaattaaaaaaaaaacaacttatttttcatcactaaaaatcagaatatacaaaaaaaaatgtatgaactacaccatatcaacttaacaaaatgaagaccaaaaagttaactacaatatatgtataaactgaacacaaaaatgaggaccaaaaagaggaaccaacggaagaagaaaaaacagataaaatatttttgctgaaatttcttttataactcatcatcatcaccataatatataatacatatacatatatatatatacaacagaaaataaaagaccaaaaactgaagactattcatacaatacaaagttaaagtttgatgtattccaaaacaccaccagaataacatgccaaccaaacccctttagacaattttatatgatttcagtaaaacaataacacataacatattattattatataatttcaataaacaatatacaatcagaaaacaattgcaaaaatcagattgtaatatcattattttaacaactaatatatattcagtttcaaacaattgaaaataataaaactagtaaagtagacaacattggtaataaactcagaaacaaatctgaaatcataagaaaaatataatnttaaaaaatgaaagagagtgagagagtacctgagagtagctgcttagggagaagatggatagttagagagagagagagagagagtgagaatagagagcagaag

SEQ ID NO: 185299 - DNA, 4328 bp, Cannabis indica
agcccttgtattgtaatgtgtaacctgtaagaaaggaccccacgagtttcacaatcaaatcgcttgcaatgcacgagtataatatcaatatgataccaatgttgttcttaccttgacttaaaaaaactaagccaattattatgctgattggataaagtaagggtgcaagaatgtatgtacaagttcataaagtaatcatttacggtaaccgttttaaacgtttgatttaaatctaacgaaatcagtcagacggtttaaaaaacactttttctcactatgtgtgtgtgtgtgtttgcatagtatatgttcgaaatgaaagtatatccaatttagaaacaaacccaaactatggtctgttctgctgtgactgatggcttgcattgcatgaactcaactttcccctaatcctgctgtctttgtgttgttaacagtcacaacaagcatacaaacacgagtgctgtgcttctttcatccattttctgtttttcagataaacataacatttacttctctaattgatctaaagcaatctaactcttttttcctttctaattcttttttcccttcgttttatgagtaatgatagatcatagatgcagcccattttacatacttaatttacacaccataatatgatatgtatttcaatttttttttttctttttacatgcataattaatctcgatgatacaatttttatttaaaattatatatgactaaaattaaacacatgtaaaaagtatgtatagtttgagtttttagaagtgtcttatactcaatttttttaaggtgagattcattgtgttgtttaaaatgcatgtcacatcatgatgggcaaattaaatgtgtaaaataagtgtacatctattattactctaattttatatcctctattttttttgtgactcaatcaagcctagtcactcctacgtgcacctctgaaacaacttcactttaaagatattcttttcttgagacatgctaatgagtagaacccatatttctctcctttattcctccagtaacggttaaagtgaactagttttcatactggaaaaaggcagacaaggaggcttttgctaatgggggtttgttcattccagtatatcatatggttttgggttcttttttgtttcctatataaatttcttcaacccaaaacaatagctctatctctgtctaagaatttgcctccgcctgtttctccatatataagataaaaggtttgtttttctttttactcccaactctttccatatgacaccaatccttggaatgtcaatcaccaaagtcctcttcttatgattttggggtttcttttttgtccatgcctcttgttctatcctagattgaagattattgtttatgagatgacatatatgggcacatgaaattcatagttcattcaatccattcatactctactcacccaacctagttccaagagtgtgtgcctattcctaattcatgctgctaatagatttgcttagaatggataaacaacttggttagaatatattcctcaaagttatttacatattttaattttagttagtgtgagaatatattattatcaatgaagctatcattgctaaaagaaaaaaagacaagaaaactcccggcctattgaattagtcccaagaggctaatacatttaacctttcttcccataaattcttgagagatagagttgatgcacattcaattcaaacttttattctaaccttatgaaaaccctcaattttactatgttaattgaattgtttgtgtttattggatgctactcaatagtttcttactaccaacaatgatttatatttgagaacattatccttttttttttttctttcataatttcagattcagagcagtctcaaatggataaagtgaactcggagctgtatttgcagaattgttacataatccagcaaaatgaattgttgaggaagaaagctcaaagactcagtaaggagaatcaagctttactgaccgagctgaaacggaaactgtctagagcaaactccagtcagaattctaacagtgcaagtgatgataactccacttcctcctcgggttcaatcaaattcagcaaatcttgatcattcaaaaaagtcattttacctttttgaaacctatattccttgagtgagaacaatcttcaaacaaagaatgattgtatctttgcttcaactagaattcttgttacctagtcaaccatacatgtccagtcccaaaaagagagaagcaaaagaaaaatgagattatggataaaataataatgtcctaaactatcaaattgtttggtgaaaaattatgaataaaagctctcttaatcatgcccatactttaggggctattagcataattactgacttttggatctccattaaatagaagtccatcttcaaaattcataataaaactgttgatatataagtggatatatatatataggaagagtatctatgaataatactctcatatcaatggatagcttcgtcatttagctctaaaaaaagacgaactaaaatgaagtattgaaaaaggacacccaaaataatgcaatgatttaacccatctcaagagaaggccagacctgaaacttacaaaacccctctgctctatctttcaagatgaaaatatcgtgataacacaaaggttgaagagaactttaccagtctgcatttagcttcatatcaatacttgagaagcttttgtagaatgccttgaaatgctggtaagcaatatcaatatcttcctttccacatatttctctcacactgcaggtaaaaagggcaatataaataagacattaatgattttagtaccaagatccaagagaacatatatcattcttttcttctatctctgttcaatgagctaagtgacagtctttcatctttacttcacaaaggctatacccacaaatttgatagtctcacaattatgctaagaaagtttgtttaaccttgaatgagcttttttcttttttttttttttaaagaagaaagaaatttaaattaaatgaagactaacaacagactaaatgtttgcatctttttaaagggtacggtgagaatcttcactgaatttaggaaggatagtcatagatacctgtgcattgaaagttgggctattccacagtcaacagtacggatgccaacaccagaagcaaggataggacctattgttgatccacatcccatatcatttctcaccacaaattcctactcaaaagcaaaaatatagctcaaattaatacttattgtctgaagtgaaacctgatgtgtgtcgacaaaaatgagcaagtattctagagaattccgcactataagtgtcaactgtttaccatatataccctatctcatccccggtgcttcaaactaaatctggaggcaagaatgactacactatagaacatcaggggtatgattataatttacatccctcacttgaaaggttgaagatgaataaacttgagaataagtacctaacttctgattcctgatttaattcattttttaggtggggttttgagacttaagccgcaggagttaatgagtcttggaccaaaaattatttaatttgatttttttttccttggaccaacaattataattaagattaatgaacaagggttctatttctagagctaatgacaaaaagtaaatattatcacttcatttcattggaatcactgatagcattagttcacaaaaataatgaatttcatgttatataaccttcttttggttggaagagggaatatcattttgcttgttttcacaaaaatcttgagtaaacgtaagaatgaaaaaattagttattcagatacactgagtaagtttcaagtgattggatgcttactgactcattaagaacaggatgaaatgattgaataggttaatcaaaccatgacagcaaatgaatactacctgaaatggaaggttatgaatcttcccaacttctttaaagaggaatgatgtgattccactagtagcataccgctggttagcattgtgcttgataacaagtcccttttgcatcattggtcggtggtgttcttcatgcttatccataaaattagggtgaactccatgagccatatctgcagaaactattaaatagcaccagaatattgagtttagaaactttattagcaacataaaactccagaatagaaactacatcagcaaaactgtaaacaagacacatattgtgaaaacttcctctaaattggccattaacacttgcagttgaaatgccttaactttgagtcagttcaatatattggtgttctgtttcggttagaatgataaaagatattt

SEQ ID NO: 185300 - DNA, 2237 bp, Cannabis indica
tattagttcttacaaaaatacatacaactacaagtcgtgttcatcggtcaatatactttgttaatttttttttatataatattcaagcacattgtttatacatagttgcgattacgttgtttatgtgttgtccaatagttgtgttactaaaatcttattatgtataaaatatgggatcagaattgacaatacagggactcatataaaagaaactctattgtggtaaatttgttgatttaaggttgtaaaatagatggctaacaacacatgtatcatataaacactactacaaagatgagtttcggtaacacacttcgagggactctaaagatttttagtgacctttcactgtgctcactaatgtgggtgactggaaagataattttcagtgacctttcaatgcgtgtcactaaaaaccttttagagttccttattgagtgtcactgtaaacttttagagtatgtttggtttagtgtaatagagattgtaatggaatcattattaccattacattgtttgcttcattttaaagctttgtaatgactttatattgtaatggtcattacactatgtatagtaatccccattacattataaaactaatgtaatgatgattacattgttataaaatatctcttttgtccttttacgttacttttatttaaattttaaatattaaaaataataaaactaaaggtatttttgtcaatatataacttattttatttgattacaatgttcattataaagttaaatcaaacatcataatacgattcctattataattcgtattccattacattatcatttatattacaattatcattctcattacattacattatatcaaagcaaacatcacattagagtcccaccttgtcggacttttaagacaacaactaccatcacaacgtgtcactttatctaattttttaagtattttatataaaaacaataattaaaaaattaaaaaattaaaaataattaataattaattttttttttcattaatcgtttttaaaaagaaaaagtaacttaacatttttgttgataattaaaaattaaagaactgtctattatttattacaaataaaatgttatacattatctcaaaacaaaaatactatacatcatctcaaaaaaaattgtcatacatcaccacctgacacacaaaatcaagaaaaaaaaatatgaacatttaaacttctagatattttgaaacccaacagaaaaataaaaaattatatacagctcaaccgaaccgaacccaccaccaccactaagaaccaaatctccagccattgcttttatcacgtgcaaagaaaagtaaaaaggcaaaggatagtgagagagagcaaacaaaaataataaaacaaaaagaggaacaatacaacctgaagtaaaaatatacatcgaagagaggcagattgatgatcgaccgttcttcacccaacgccaccatcccaactcttcaccaccactgctagcgtcgatcgaccattcttcacctaatgccaccaccaccaagagagggaaacatgacagagaaaaataaaggaggtaggtctggggttaaaaggggcatagatcttgaatcagtggtcaaattcatcatcgaagtgtgtctctattagcaccgacgtattcccataagaaatagagaaatcagtctgagattatctagagaaaaggagagaaagaggcgagtctaggtattttttggagtggggaactcgaatttatggcttgttttgggaaatggtggtcggagtatgttgttgcatttgggcagcaactctatcgattgaagaaagactttctacaaaaaaaaaaaaagaaagaaagacaaagacaaggaggcaactgagagaggacgtgaaaaataagttgttttttttttgtcttttgagttaaaaatatagggttttgttatctaatatattttaatataataatcctataatatatttaataaggataaaagtaaatgaattaatatcctcgtacaccacgcttgtcctttatttttctttcattttttttaattatttttagttgatgcattttgcgttgagtggaaaaattttcccactcacgcattaggtgacactatagcttttttattatttttttttaaaaattaaaattaatttaaacaactttgaatagtttaattgactacaatctggtccaatataattttactgtctaataatgtgagtcactaaaaaaattac

SEQ ID NO: 185301 - DNA, 3319 bp, Cannabis indica
ttgatcagctcaaatcgagactgattgtaaacttttcatttatagaaccagaggaatacagggaaaaaacaaagatacaatcccagccttacacgtattacaaatcacctttaccacacaagaatattctcccaatcatgcctaacggtattgattgtacagctggttgttacctcgggaatacaatattccaacaacttagaagacacctcaccacagtagaaaaagacaaaaatacccctgctaatatcactctataacaccacccctcaagcgcgagggtgaagcaatcatagcaagcttgtcgacaagaaactgaaatcgagtgtgtgacaatcctttagttagacagtcagccacctgatcatgggatggaatgtatcgcacttccaattgcttttgtagaaccttgtctctgacaaagtgaacatccagttcaatatgcttggttcttgcatgataaacagggtttgcagccaaagcactagcactcatgttatcacaccagataactggaggtgctggcagtttgaacttcatttctttgagtagctcttgtatccaggtgagttcagctgctaagtgagccaaagctctgtattcggactcggtactggatcgtgctactacggtttgtttctttgaggaccaagagattagagagtctcccagaaagacgcagtacccggctatggatcttcgatcatctggacaacatgcccagtcagcatcagcaaaaccagtgagagagagtctgtcactcggtgctatgtgaataccatgctgcattgtgcccttgagatatcttaacacacgtttggttgcattccaatgcacatttgtaggacacttcagaaacttactgagcttgttcactacaaaagagatgtcgggtctcgtatggctcaagtattgaagtgtccctatcacacttctatatttagatggatctatcattggttctccatcattgatggaaagagtttttcttgctgtcataggagtcgggctaggcttcaggttggacatgttgactctttggagcaattctgaaatgtacttcccttgtgacaagtataagcctgtgtcatctctaaatgcctcaattcctaggaagtaatgtaatcctcctaggtctttaagtgaaaatgtgttgttcaaccttgcaacaaacttttccaacttttgtgttttactccccatgataatgatatcatcaacgtaaatcaataccattatcacatagtcatgttgcttcagcaagaaaaaggatgagtcagcccttgaattttcaaaattccatttcagcagtgttgtttttagttgctcataccaggcccttggtgcttgtttcaacccgtagatggacttttttagcttgcacacatagttaggtttgtcggggtcttcaaagccttgtggttggaccatgtagacatcttcatcaagtgtgccatttaagaaggcattatttatatcaagttgtcttatgtcccaattgtttgctactgcaatcgttagtactatcctgattgttgatgctttgattacagactaaaagtctctccaaaatctactcccggtctttgatgaaaacccttcgcaacaaggcgagctttaagtcgttcaatcgatccatctacatttaatttaattttatagacccacttgttaccaacaacgttgtaataaggtgaaggaggtaccaaataccaggttttgttcctctagagtgctaccatttcagtattcatagctgagttccaccccttatgactaagagcctcttgaacagtttgaggctcacaaagatcagctgttgtagcagttttagaaagccttaaatattcctgcctttccacgagtaatcatgggatgttgtggctgttgctgctgctgaactggtggtgaaatggcagcagtgttttcaggtacaggttgttgtgtttcgggttcttcaggatgaggtgtagatcgattgaaagcagggctaacagattcaatattaggagatgaaaaaggacttaaatctgaacctgaatcaggaaaaggcatagaagatattagagagccaagatcagaattaatacaaacctgattttgttgtgaaggctgctgagatggtgattctgcagaggactgtgttggcattgagttaaatggcaaattgacccaagaatgtggagttacaacagtaacttctttttctggttgatggttattaaagaaaccatgttgacaagggtattccttttcattgaatataacatgtctagagatatagattcttccatgtgagctaagacatttatagcctttgtgaacatcactaaatcctagattcacacattttgtggagtggtattgaaacttgtgagtttggtaagttcttagacaagggaaacaggctgacccaaagacttttaattctctatagtctggttaatctcatatggagattgatgattaagtacaggagttggcaaccggttaattaagtatacaacagtctgaaaagcatcagaccagtacttttgaggtatagaagcatgggctaggagagtcaaaccggtttcgacaatatgtcgatgtttgcgctctgcacggccgttttgtgcagacgtattgggacacgaatgatcaaatagaatgccattttgaataaccagactattgaatgcttgatactcaccacctgaatcactcctaagtttttttattttccttccaaactgactttcgaccatgttcttgaactgcacaaaggcagcaagagcatcagatttgctcttaagcaaatacagccaagtgaatcggctatggtcgtcaagaaaatggatgtagtaatggaaattagtgtgtgaagctatgggagcaggcccccatagatcggtgtgaactaagtcaagtatattagcagctttaaattgagaattttgaaatggtagagcatgagatttaccatactgacaagcatcacagaaatgttgaacttcattaaaaggaaactttacatttgacatttttagaacttgattgaaaacatttacagaagggtatcctaaacgtctatgccaaatgtcttttagggaatgatgattagctaaagttactggtggcttggtcactgctacggctgagaaaggagaatgactttgagatgattgtggaaaaggattgagttggtacaagccatctttaagagtcccttgcagaaccaccttcccccgtctttgatccttcacacaacaaaaaccagagaaaaattccatagagacgttattatctgctgtaagttgagaaacactgataagatttt

SEQ ID NO: 185302 - DNA, 5032 bp, Cannabis indica
cccatttcgatatccacagttcctggcattgtgtttaatatataagtatatgctgatatcgctctacttttacttgtgggtacttcaaacattattcaatagaaacaagaaatagagccaaactgaacattattcaatgaaatagttaggataatacgtcattggtaactttttgttgaaaatctaggctcatctcatgtaatgttctggtttagactaggagattagttcacatctctattgctctgcattttgaaccaaatatagattttagatttgtttaatgcgagatcaggctctaatgtatcaatacatcacagtttttcataaaaaaaaatgttatatcattctttagcttgtccatctgttttctggttactctacctgtctctactctacgaaaagaaatgaaacatttcctgttatggtatttgaggcaagttcttgtcaaaaaagaaaaaagaaaaagaaatgaaacaatataacatagaagaacatgggcgatttttccttcatattaacagtagttagagaaaatggtaattattccaggatattgtgtttgaatgtttatatgattattgctctgtgcaatgtcaacaaagttccaatcttactctttggacttcacaaggtatgactctataaaatggtggccatagacttatcatatcatcttccatattacatgtgttggatgttctcctcccctgctttttcgggggtgtctaatacatctactcatgttatcagtaaataacactgttatagaggcaaaaattcttattgagggttaggcagggagtctagtttcaaaaaaaaaaaaatctttatttcccccatcacttgtctgtgccttgttcttatctctctcctttgatagtttgatgtgagacattgaaacttgatccatgcaattaacagtgtggacatggaggctaaccattgtatctccatctctaatttctaggctctttaagagtcaaagtacaagaatggcttatggggtgcagaaggaagcattgcagagtcaactgttccagtactgagtttaagtttctgaagagcctccatgacttccccagcaggtttacaagtcctcactataaaaataattcattttctacttatggcgatgaagacttagatgcatgggaatctgaagcaaagagatgggcaagggtactttttctagcaatcaaggaggagtgtcatttgatgcccatatggatggtgagccttcattttacccgctgtttttatttgttatctgcattgatggttattcggcatttctgctgtcgattagtgtttggattattatgttttaggaattttcatgcaatgttgtttttctctctcaaaggaagtttctgacatattataccaattttgtatgcagtttattcaaaatcatggtactaatatctgcagtcaaaatgaaaatttggagtatctacctattaagtttctcatccttaccttgagcttggttctggagcttcagataatgcaagacaggactactgaatttggaatcaagtttagaaccagagcagaatttttttcacgcgagacaattaataagctgggttatgcagagtctgctgctttatataagaagtttaccaatgttttccattctatcatggtacaccttactttttggacagagctcttaaaagtttttatattactcggtgtttcttattgacttgctgttatgatcttgtggtacgactattttgtctgatttgcaggaagagttggtctcatatgcaaccttgtcttcttcaatattctcttctagcattaagatggagagtaacatccccagttctgtgaaaggaaaacttgggggcccaagtcaacgccgattatcatcttccactaccactgtggtgcttcaagctgtatgattaacatctgttattccaattaattattctttccaggacaaagaaattaaattggagtagttttttcattatctgttaaaacttaaacgttagaaccttgcctttctgagtcaccttgtgctgccaattaatttattttaggcctttttatgcagtagaaatctttttcttcccttaatatgcattttttgttgctgaagaaactactttgttcgtaattttgaatttctatggatcaacagataacatccatgaagactgttgcacttgtatcatcctggtgtgcacagtttgaaagtgattatcctttagattttgctttcaagtttttatggagtttctttcagaggactatttcatctccagcttgtgattcagaggtgtgtaccaattttagttttcacagattaaattatttttagattcatgttcagattaagatttacttttgaaaattttatgagattatctctgtggaaattgtggcagactggagcagaaatttttcttgcagcatatgaagcattaacttttgccctcagagctttagtgtctgtgttttccactcaaactttggattttatcagagaaaatgacaagttgctgtcaaaattagatggcaaagctatgctcgattttttggttctttcttttcttgagaatatcaatgatcttatcggtgttggagttttggtgcgaacaagacgtgcagttctaatgaattggaaggtgaataatccatcagattcttaaattatttttataactctctccctatttctctctctggtcttttgaactgatttgtcgttaatggtgcagtggctttgcctagtaatctttgttatctattcctggctatgctattaagcatgggcttaatatagaggacatcaagcctttgttctcggatgctgctctgagacggatttttaatgatatgttgaaaagtaagaaagaatgagattctatcaaatgcaattattgaactctcacataagttatatcttatatgtgaattgctattttgtgccggtacttagcagcataagttttgcagattaatagttgtaatatgtgagttatcaatattttattgaattttcttagttaattaccaaattgatcacaaccattgatagaaatctaacagcttgaaattatgcaagcattaagtacacacacatgtatgtatatttgtataaatctttattgtcataatttataagttgaacatggagaagaaaagagagcactggtgaatatgattgtcaacttccattatcttgcagccttgaaaacgcaggcgaaggttccgttttacctatactgagatcagtaagattagctttgggcctccttgcagaaggaaagtcaggtccacttgtctcctcttgcaatggaattgaagctcaggttcggctgtagcatgtgtttttggcagttgaaaatctaggaaactttctaattggggctatcttaggagtataatataccataagtattagaaaacctatagtacttttgttttgtgatgacatttgttggaagatcagaaggttaaatctttttttttttattttttgaaagcacagacggttttaaccttagttaccctatgtttgtatgatagagatccctgcataaacctttttttggccaccaagtcaaaatgtctactaaatattaagggcatatagttttttgttctttttgtatttaacactgtaatccaaaataacttaaaaatatgataagtatgcggtttgattatgatttagagatttttgctgtcaagttcaaacaaaatttatgattagttgataaatctgatgagatgaggaaactgactgttcagatgatttggaatttggttcgctcttcctggatactgcatgtcagctgcaacaagcgtaaggttgcacccattgctgcactcttatcttctgttctgcactccgccctgtttactgatgaaagcatgcatatgtctgagaatgcatctggacctctcaagtgggtgtgtggccccgccctctctctcttctgtattaggccttagtgttttttaatagatggtgtattaagccaatcgttcaagtttaattaattgttctctctcaactgttgatagttcattgaaaaaattcttgaggaaggtacaaaaagccctcgtacaattcgtcttgcagcactacacttatcaggaatgtggttgtcaaacccggagtttataaagtactacatgaaggagttgaaacttctctcactctatggttctggttcgtcacacacccttttttcttgtttggtaatcctttcatggctttacattcatttttcaagttctaattataatttgaaattttcctttccagttgcatttgatgaggattttgaagctgagatagctgataatcatgatacaaggattgaactctccttgttggcaaaaagcgctgattctgaattgactgaggtaagcaatttgtttatttaagcttttttcattgctaaatacttgtggtggctctgtcattgtcatttaacttgaatggccttttattgtatgcggatttgtgggcttttttcgttcaaagtgtaaactatttaaattggggcttttcaggcttttatcaacaccgagttgtatgcacgggtgtctgttgctgtattgttttccaaattagctgattcagctgagatggttggattgggaaaagaaaatgaagatgggcttgctgctttggaatctggaaaattgtttctgcttgagcttcttgatgctgcggtaattatgttttctattggaatttaagtttgacattcttaaactagtcttaaattatacaagaaaattatctatttgaaatatcatactgtttatgtaataaagtttcttttgtcaaataactttccacagttatataattatattttcttgccagtctcacttaatgatatgtatcacaggtactagtattttcttgtttttcgtagtctgtaagcatagctttttagaggggttgcttaagtttttttcagctcattactcgattacatttcaggtcattagacaaagagatttctagaaaaaaagaaaaaagagaaaa

SEQ ID NO: 185303 - DNA, 2284 bp, Cannabis indica
taaggaagtatgtgtatttttttggggaacatattttgtgtgcatgtaccgttactcttaaaaaaacgtaaatagtacactataaaaatgactatatctctcttatattaaatggagctatttaatggaaattgttggtttaataattttatttcgttaaaattagctgttaaaacttataatgttaaatcaatcaattaatcatttttttaaaaaaaatatttcaaatatctaaatttaatttaaatataaacaaaattatattattattttttttatataaatctcaatttaaatttgaattagatgtaattcaattaaataatcatactttataataaatttattaattatattcttcaaaatatgtaaatttattacttattttattgtttataaaactaattggatttatttttttataaataaatttaaaattaaattaaattttatatatataaaaatataattaaattttatttgatttaatccccttattattattattatgtaaaataataactaagaatatctactctaatataacttatatatataaaaacaaatcagtacatgtgtcatcaatatatatgggactgtcttcagtatgcattgatgtgcaaacctaccctttctcctacttactatgctgtgtttttactagtttactagtggtagttgttgatggttatggtgatagttggtttacatttatatcacaattcaggtcgtgttggcaataccaataaattagaatgatgttcatcaattaatatcaattacacgctttctcagctatgtatgtctataaaaacaacccaaaccattctcatattatcacaagatcatcattctattcatggcttaacattttctttctatttagcacgtaccactttataaatatataatttttttaatataaacatcttctttaggctacactaagtagcttagttttcaaccattattcttaaaaacccacagatataattcaacccggccatataatccttttattttaacttttctttgtatattttttttggtcgattgaagaaaaatggggaccgagaaagaacaagcacgtaacctagggccaaaaacacattcagtgaaactcaagtacgtcaagcttggttaccactacttaatctcaaatgccatgtatcttttcctccttcccattatcatagccctaggccacctttccgtggaagatattgctcaactcttccaacaattcgatcttggcctagtctcgggtacactcgtctgcacggcccttacggtgtgcctcgtcacgctgtacttctcatggcgacctcgtgatgtttatcttctcgacttctcttgcttcaagccggatccctccctaatgtgcaatcgtgagacattcatgcggcagcttgcgaaagccgcaaatttcagtgatgagctcctaaaatttaacaagaagatcattgagagatcagggtacggacagaagacatatgcgcccaaagccgcgctggaggacccgccagtagcaacgatgtggaagtgcagagaagaggtggagatggtggtgtttggggctgtagacgagctattggccaagaccagagtgaatgtcaaggatattgggattttggtggtcaactgtagcttgttcaatcctacaccatctctttcagccatggttgtcaaccgctacaagcttagagggaacattttgagctatagtcttggtgggatgggttgtagtgctggaattattgctgttgaccttgccaaacgtttgttacaggtttgtcatttatactcatcttttatatattattagactatgtatattaaaacccttataatgtagccatgtatatctacgaataaatttaagcatctttcctagtcgtgtttatacatttgttcggcttaaatacagtttcaattactatcagagttgtgtcatagatctttattagtgtagtttaatacccggtttcatatattttagtttaattattattacgggaaaccctatttatgaaattaatagtaatgatcataaatatagaaagcaattactgtgcatgtgtactagcgttaatttgtggtgttttgtttttcttaaaataagacatatattacattaataaataaataacaggtttaggttcaatttatattatgggtcagatgtgatagatgcatgcacagtgggccacaaaatctcgatttaaaatttaatggtggaaaacaaatttaccgacagtacatgttcccttaaaaaaaaaaaaga

SEQ ID NO: 185304 - DNA, 3723 bp, Cannabis indica
tttttctaaatgtcgaaatagataaaaagcctactaaaataacttttttacaaatttagtacataaatttccaaaaccaccatttatctaaataaataaatttaagtgcttctaatgatattataggtcgaatgcttgaactaatttttttttttttttttgaaagaagaatgcttgaacaattatttgaccacattttgttatacaataattgatgccattctaagttgaaaaagaagaaactaggcaaactagaatagactctttcacatagtgattggaccaatctcatgtacagttcgatcaattatataagatttaaagtaaaattgaccttttataaaagagaaatactataaagtacactctcctacgtgtcaatatcgatattagtgcaattaaatatcagatgtaatataacttaatgaaataatttttaaaaaatattattgacaatcgtaaaacaacatgtctagaaagtgttaggcataactggtgcctaataacaatatgagtaacttgtgtctagagagtcccaatgttatagtccatatttattctattcctacctaatttttagttattctatttcttgttatttttttggataataaggaaaatgtccatggtaatttacaagatgaaaatgattagtggtcatagacacatactcaattataccacattttttctccattagaaggttttaagtttaaatctcatttcccacaatatcaaaatttacaagatgatcaagttaataaagtcaacaaaattaggaatttatttgtttgtgatgggatgctcatattgacttcaaaaatgcatctataataatatgcatgaaatttaattatttatagttccatacttttatcatctaattaagttcaatatttgggtgaccttttataagtttgttctagatattatagaacttttcaatttttatataagttttttcacctcatctcgtgatgatgttgagcactactggtatttaacaacagtactactattattaagcacttttcactttttataagctttttcatttcatgttgagcaccactagtatctaacaacaacactgttattatttaagtattagtggtgctcaatactactttacgagtagttaacaattttttctaacgactattaaaactaacatatacgaaattaaatattaaattgtacagataccaacataacattttaggtagtggtaaacactattagttcaataatattgcttatccagctcaaacatttacttttctagctaaaaaatatcgtcgtaaggctaatgtgggaaccgctcaaggacctaaatttagagtcctttcacaattatcttatttattttttgtaaggagcaattcttttatttgatttcatataattgcttaaaacacaccctctatcatgtattcactattctctaacactatgtttggtaggagggagaaataagtggagagagagaaatgaaagtggataacaattcctcttgtttggcaagagagattgaggaatagttggatggacaacaaatccttctaaatcctccatttagaatcctttcattaatggaaaaatctacactttctcacttcaattgttggaaattacaattatgccctcttaaaaagattgttactcaactctccctaactccctcctattctacctcctccatcaactttccatcatctctattctccatctctcctaccaaacatagcctaaatgtataagaagagtaatactagagacaaacttaaactgcacataatttgtatacacaataatatgtattcggttttaaccattatataatattaagtgagggccacctcacttttaattatataattcaaaaattaatgtaaaaaatatgtgtaatttaagtgtatcacaattatcattattctgtataagaaattagatgaaaagataaacccaacaaattctatatgacatgacattaaagtttcaattaataatgaactagaaaggtccatcatacaaaattacatataaataaatgcaattaatgactttttcacttatgcttaattaagcaacatattacatactcactcactcactactttctttatgagcattgttattgggtggcggcacataattggttagtgatattatcgatagcagtatgacactgagaaaagtggtaggcaccaataataccttttaacaattctctttctttattcattacaacaagagatagtcaaacacactacaataccatataacactattaaacaaagtaattaatgtaaattaatcaaacaacaagattactatatatagctagtttccaactcctggacttggaacagattgcaaaaccctatgatcagtctcataatcattagtggtcactactacatgattttttgccatctgagaaactaaagtactaattaactctttattattaggaggcaatatttgagttgaactgtcctttgaaacaagaccctttctcccttcatttgagggaatgtagcttattattattattaaagcaaagaagacaacaagaagaaacttggagaaaggagccatataaactaaaggggtatatgtatatatgattgtatttatgtatatcgaaagatatgttggaattgagtagttatgtgaagctatatttatagatgtagtagaagagaatgataataatgagagagagttcaaaaggggttcttgttcttgataatggttagtgaaagaaagttgagttaggtacataaaaaattatgtgtattgtgtatagtagcttacctttttatcaaaagtaattttgtcaaggctgctctttttatatcttctccaagtacattggataaagctcattataagaatgtgtttagaatgtccttttagcacaatagtcttctagaaaaggtgtcgagtgtgtttaaaacgtcactttgaggagcgaaaaaccctctcgcataataacctcttttttttctttctttctttcttataattgtttgcaaaacgacactcgacaacctataaagaatattttttttttcgaagataaaaaatttcggataacactaccttccgagcaataagctcaaaaagagggaccgagaagaaatgatatcattaatgaatggtatcaacaataacaatgtttcagatacaacttggaaaatcaggccactagacagtatttacggtaacagataaaacatatttagctaaagaatgagttacgagatttactgttctagagcaatacaaaaaactaacatcattgaaaccatttctctcatgtttttcatttctaattttcattttgaagacccaaagaaacaacaacaacaacaacactattgttgtcttgtcaatttattgaattgacttaaaaagaaaccaaaagcaacccacttgaaaatactactagtgctatccatgtttaggacttttttgcgtgcaagaaatgaaatagacacactacattcattgcttcaaaagaaaaaaacttaatatataaactaagctataataataacaaaatgagctgaccaaaccagagtggattattttgattgtgacagtagtcaatatatagtcttaatagttaataatggctgtggaaatagaaaagaagaagttgaacttcacataagaatcttaacattgtacaatagaaaaaaaaaaaaagaataa

SEQ ID NO: 185305 - DNA, 3194 bp, Cannabis indica
gcagtaagcaatttacttctaaataatgtttttttttccaaagcaaaagaagtattttattcaatggcacaaactttgcttgttagaaattagacataagtttgatttgttacaaaatataatgaaagcttttcttttgtgctgattgaacagctcgagagaaattagcatatacgccttttctcttgcaccacgttactcataaaatgattgaagtcatgttatattaagtttttgacaataacaatgcagtaaattttatataatataagctattagcactcgggttgtgtcaagctcaatttgccagtgatccaattttgtctgacttgcttcatagccttgttgttttccgaaacatagtataagattggcttgaaataaccattgtattcagatttcctctttatggatgtctgcccattgttgtgcaggagtttaagcagaatgcatctgaagggtgcaataataaaagaaagagaggtagacctcgaaaggtagcaagtcttgggcaagaaacttcagctgaaggtacatatttataactgttgttagtttttagatatgtttgtaattttgaggccaataattgttattataatgaagatggacatgatgaggaatacactgtaaaagcttgtaaaacaaatggaggagtttttctgcctactcaaggagggaaggaaaccacaggtatggcaatttgcagccttgatctcaatttcaatccattggtaaggaatctatttaaaattcaaaagtagctgaagctgatgttcaatctaataagttataatgataagctacactgttaggctatgtttggtaagaaggatagagagtagggtggaaagaaaggataggaaggatggagagggaagtagctttcccttatgttatttggtaaaagaactggacttgaaaggatggagtgtaaattagttactaaaactacaatgctacccttcctaatataattatttattattttttaaggataaatatgatgttgtatatattttttgtttttttttccttaaattcctcaattttaggagcgattgaaaattttgagtttggaggcctttcccttctaatttctcttttgtcaaacaaaagatttcatctatccctctctctctttctccacccctctccttccactcttctttcctccttaccagacatagtgttaggcttttcctcacaaaaacaaactaagaaatttaaatgtacaagagtacaaaccatgaatatttgtcttatcgggcgctactcgttctcacattctctgttcggtgtttgatggcattgagaaacggttgtagagaatgaatttgagaacaatttgaactcaaatgtttttcttttctcgtattattcccaattatgttctctataattgaagctataattggcattttgtagatctacaagatacctctacaggaaaaaatgttcatgtttctgggatgaactgctccacaaatgaagctgaatctgaatcaatttacggtagagtatcaagcggcacagatgatgatgataatcagcctctgtcaaagtggtttgggggaatacagagtcaaccaggtgtccaagaaacaagtaagtcactattttatgctatgtaatcctttattcaggaaccctttgtcctccttatttcacctaacaacattttcaagtacggttggactgactgcttctgtgcctttcaaggatcacttggtagggccgtttttgacccacgaaccagggatagagaacgagcaacaatcggtaagaaggctattgttgttcatgccttcagtgggagtgagcctgaggataatctaaggttgccgttcgtaaagagctctccagtctggaaagcaattgatgacatggatatatttggaaagatgaaacaagtaccacattttcgtccactttacaaatgtaaagaagaacatagagaaggaatggctattggccatatggtgacctttgctggtttggttgacagaatatctaggatgcaagtcgatgatcgtgtcacctcctttcacagtactttggagacactacaagagttagaaaagcatggctttgatatttcagttctaagaaatcgtgcaagtacactgttgtcaattaaagatagacaagcacgagctcggcacgactcaaaagaagctgaaaggaagatcaacgagcaatccggtgagaaagtgaaacttgtggaagagattgacgatgttactaggaagataaatgaactacaggcgaagcttgccatactcaattcacagaaggagaataaagagcaagatattagaaaattgcagcagttcatggatgataaaaatcaaaatgttctccttgaaaggcaagagtttgaaaaactagcggctaccccaatttgtcctgagctagctgaactgaactgagctgagattctctttccccatttgtcttttccttgttttgtagtagttgcagataatgattgtttgtattgtacttttgaaaacatcctcaaatagatgtagttagtagtgtattccatttcttaccaaatttactgttaactttgtacttaaatgagtatgcctttaatcttttgtaaagcaaatatcgagtttggttgttgaatcagggatgggaaaacacagttagaactatagtggaagttactttggtgtttaactgacatgtcccgtgatcccatgttatttattcattcccttcatgtctggggtcaacatgaaaagacatatttggtgtgaggatgatatatacatacatacatactctacaatagcaacaaatgaattctcttcctccgttgattaataagagaagtgaacaacctattattttttgattactgaaaaaaaaatgcttatgacttagctgaacaacaatggaaaggatagaattggaagaaaaacattaatttagttttgtctacttagaatgaaaaagttttcattgcagcatgaagtgtacttttaagtaaaacataggtcatagctatgtaacaaaggtgtctttagcaaagattgttaacttcgaaacatcctccttagattcccacactaaaaagtagtaatgagttcagtagactaactagtactagtattattatgtcatttttattattccaacacagatccataatgttagattagagcagttatgtatcctaa

SEQ ID NO: 185306 - DNA, 3193 bp, Cannabis indica
aatgtaaaatattattaaaaaaattatataaatataattgaaattatgaaaagtgtatttaatttagtaattagtttattaattgtaaaaataaatgctaaagtaagaattcaagcttgaatatgaaaatcgatcggtccaataaagtataggaagaatctgagcatagcacgaaaatacttggtctacaggctgtgccgagcatatcttttaaaaaaatttgataggacacgacacaatctatattatctatggcattgcacgacacgaccatattttaaaaaacatgatataatatggttcggactagcacgacacgcacaaatttacgatactagttaaacgtggtaaaaaagtaaatgtggtaaaaaagtgtgggcaacataagagagaagaaatatataaaaataataagttaatttgaatttttataatctcaattttgatatgtataaaattatgttcctggttgaaaattttctcaaactattaaaattaatagttgttagatttaatgaattttatttaattttattaacgaaattctaatataataaaaatttaagttactatttggttcatggtaatgtttaaaaaatccaatttagtatatatataatcatcgtattaataaaattgattaaaattagataaaaaaaaattatgaaagttaagtatggaaaaagtcttggctacaaatgtagaagtgatatggaatcaatttgggtaactactttatttattgaacaaattagagatgcccaaataaatctaatcgatttttacatgtatataatcaatactaaatatataacttgagaaggagaaaggaaaaaattataaagggaaacaagtgtcaactaagtcaaggagataacgagtaaaatattgccacgtaacaagtacacctactcttgaaaacaccagattattctttccccttctaaacactctgagaaattcagttgaaaaacgagtaataccaatttctttttttatttctattttttcaaaatattttaattcttttttttaaaaaaaaggaaagtgaagaactgagaacggagtaaggcggtggtagcagtaataatatttttgctttttctctttttaattttttgttattttgtttatgaattttcttttataaatagacatgtaaaacccatgatttaagattcccccaccactcccaccacctctctttctctctctaaaaataactagaaagagagtgttgtttgtttcgcgagaaaatcagcccagaaaatgatttggtcaatgtctacattccttcacatgagtctcttctcatcttactctcttctttttcttctcatagtttccaaaggtattaattaataaaaccaactcacgttcttataaactcttaaatattttcacttctaaccgatgtgggactcatttcaagctaatattatttactctgttttctctttcttcttcaggggtttcaggagctacattcacattcataaacaagtgtgatttcacagtctggccgggaattctcgccagtgccggaagtcccaaactcgacagcaccggattcgagctctcaaaaggtacatctcgtttattccaagctccaacgggttggtccggtcgattctggggtagaaccggttgcaccttcgacaattcaggtcaaggctcgtgtataaccggagactgcggttccggtcaggcggaatgcaacggtgccggagcaactcctccggcgactctagcagagttcacactggggtctggttcacaagatttctacgacgtgagcttagttgatggttataatcttcctatggtggttgaagggagtggtggatcgggtacgtgcgcgtccacggggtgtgtatctgacctcaatcgtagttgtcccacggagcttaaggtggatggtggtggagcgtgtaaaagcgcgtgtgaggcgtttgggttggatgagtattgttgtagtggcgcgtataatacaccggcggcttgtaagccgagtatgtattcggagatatttaagtcggcttgtccaagatcgtatagctacgcttatgatgatgccacgagtacttttacttgttctggtgctgattatactattacattttgccctaatcttccaaggtaatttctcttctttttttaattcttttttatatatagattatttttgattaattattttgtaaaaataattgattggacatttataatgataaattatattatatattttttgaatttatttgttttagaaattatttttaagttatttttatcaaaaaaaaaaatattaaaaattgaatttgagtactattttgtattattttgtaaaatattatgtttaatttgtcattttataaaacaaattatttttacggaatatgtagtctaaaatagtattaatcttaaattaattgagttaatctactaaattgttatttcaaaaattaattttttattaaaataaaatttttaatagtcaaatatcttaattaatacaagtatatcattaaataatttatggtgttaaatattttttttaaagtattaattatttaaatattattcttttaccataaattactgaaaatttatcaaaataaaacaagtgaaatatctgttataaagagaacctatgtacattttcatataatagaaaaaaaatggttataattttctagaattttcaataatttttatttactaaaatgagttttatttatattttttacagtttaaaatctccaataacaacagggagtggcacaagtttagctggatcagaacccgggtctacgggttcggtaaccgggtcgggttctggaccaatacaagaggcttcattggctagttcatggctagcaaatatggcaactggggattcaatcaaaacccaaaatagtttagcttttgagtcttcattggttttggtcatgggcttgattctctcatttttgcacttgtgattaagattaagaagaataatttggttactaaaaatgacttaaaattatttctctcataatttttttggggtcaaaagaaaaaaaaaattaacatatttgtatggtgaagttgagagatacagattggaagggaaaccaccaattttcaaagtctataaataattcatatttaatttaattaggaaaaaaaatgtatattgtataagtat

SEQ ID NO: 185307 - DNA, 1466 bp, Cannabis indica
ataagcgagaaggaggagagagagaaagagggggggggggggttggaagaagcccttgagattaagaaaaacaaaaatttcaaaaaactaagcaggacaaagagaaaacattataacaaagatatcaaaatgtagtcgaaggcccaatcaaacatcaacaacagaacaatttctggtttaatattgtcaaaataattccatataatatcactaaagactcaacagctcaaaatcataaatttgcaagaaggtaattatataataatatcatagaaaaataagtaaaacatacaggaatttgagttgctggtactgttaaagacttcaatccaaggattggtgcagcctgccgaaataacaaaaatcaaaaggattcttcacttagggattttctgtgtgcatactggtataactagcatgcctatatattagcaaatattatacttaaacttctgcttgagagatcatcaccatcaaaggcatctccacaagccacttaatttattcataaaaaaaagtcacttaattatgaaacaatgaagtggataagtacaaataagtacaaaatttagtcacaatggacaagattctgttaccaaatataatcctcatataagtaacaataagtactaaagttgtgattgttgtagtaagtccttcccaagttttcatgttaccaaggtttttcctccactctcaataaaaataaaataaaataaaataaaacactacgaaaccatgaaaacagcatttaccttaacaagactagaaggtgcaattgtgacaagttcttcgagtgcctccaccttgtccaatggtaatgaaatataaagctcatcaacgtcacagaactcatcaaagtcttcctgcaatattattttagaagaaaagataaaaaggtcactataggagttatatattcaatccacagcaaagatgattaagagttaaagctatatataaaatcaacacatgcctggttacgctccacatagtcatccaagaagtctttaacatcattgacctgctctggactcaattcatcgttatccaacagtctcaatatcagttctaacttcataatatgagccttgtgtcgagtaatagattcctctaaatggacctgacataaccaaggaaaaacaaagaaattaaattatcaataaccacatcaacaaacaaaaaaaaagacaaaatagttcttaatatgtgtatctaaccaatctaggtggtcttgcttttcctttcttaacagtgagtccttcaatctcagcttcaaagttgtcaatctgtgattctaactcagaaacctactcaatcacaaaaacacacaacaagccaaaaaaaaaaaattaagaatacataaacagagtttaaaaaatatgagaagcaaatcacactttccgtaaaatttataaactcaaatttaactacagacaacaaaaccttccttctaaaatactttt

SEQ ID NO: 185308 - DNA, 3069 bp, Cannabis indica
tttttttaatttgtgccatttttcagcaaacatgttccatatgcttaaccaagatgaagcaaggaggaggacatgccatcttcactgctgaatgctctcattctttccatttccactgcataacctctaatgtcaaacatggcaaccagatttgccctgtgtgcagggctaaatggaaagagattcctctacagggtcctccaactcttgatcatcctccaccggggagaccaacggcgatcactccggttggttggccgcctcaaagtgatgctgttatgactgttgttcgccgcataccttctcctcgaagggacttaaaccgccgacatattattcctctgtatcaggctcctgagccggggatattcgacgatgacgaatctttagaggagagtaatagccagcctgcaatgtcaaacagaagcccttgcaataataatgaagatggtacaacagagaatgttccttccaggacaatagagatcaaaacatacccagaagtttcatctgctccacggtcaaattctttcgaggatttcaccgttctggttcatcttaaagcttgtgcaacgaccaaaaggcataaccacaccagaaaccagagcggctgccttcatcaacagcaacagctttctcattctccccgagctccggtcgatcttgtcacggtgctcgacataagcggaagtatggcgggcaccaagcttgcattgctcaaaagggcaatggggtttgtaattcagaatctcggctccaacgacagactttcagttatagccttttcctcaacggctcgccgcctattcccgcttcggcgaatgactgacgtagggcgacagcaggccctgcaagccgttaactcattggtcgccaatggagggaccaacattgcggaaggtttgagaaagggtgctaaggtaatggaagagcggagagggaagaatcctgtggcgagtatcatattgttgtctgatgggcaagacacttacactgtaaatggctctggaacgaaccagacccaacccaactaccggttgctcctccctgtatcaatccatggcggtggtgacaatgcagggttccagattccggtccacgcatttgggtttggtgcagaccacgatgcctcgtccatgcactcgatatcagagatctccggtgggactttctcgttcatagagactgaggccgtgatccaggacgctttcgctcagtgcataggcgggcttttaagtgttgtggcgcaggaattgcaggtagtagtgcagtgtttgaatccaatggttcgggtcgggtcggttaaaacgggaagttacccgagccgagttggggtcgatggacgaaccgggttcgttgacgtaggcgacttatacgccgacgaagagagggactttctggtctctgttcacgtcccggctgagcattccggcgatataacatcgttgttgaaagtaaattgtgcttttaaagatcctatcactaaagaaattgcgacaatggagagtgaggaagtgaggattgagaggcctgaagtggtagccgaggaaggagccgccgccgtggtgatatcgatagaggtagacagacaacggaacaggttgcgagccgcggaagcaatggctcaggctcgagccgtggccgaacgaggggagttaaccggtgcggtttcgatactagagagctgcagaaaattactagcggaaaccatatcggctaaatctcgagaccggctgtgcgtggcgcttgacgccgagcttaaggaaatgcaagagagaatggcgagccgacacgtgtacgaggcgtctggtagggcttatattctgtcggggatgagctctcactcgtggcagcgagcgacggcgaggggtgactcgactgatgggtctagccttgttcaggcttatcagacgccgtccatggtagaaatgcttacaaggtctcaagccatgttgctaggtagtccttcggctcagagacttgttcagccattatggtccattggatcacaacccaaaccaaggtagtccgttcgtatgagggtgggggccacatcttttaagtctttttcaacagctctttcttggtgcaatttttttttctttttttaatttgaagtttttgaaatttggggttttgttaagaggagagagagaaaagatgaaggagatgtttttgggtaaaggtttattggggatttcattttgctcctgccttgtaatgtgtatatgaataaggagtgagaaaatggtgaaatatattatatgttggggggaggaaaacaaaagagaggcacactaagtagggttcttattaagtttaagtttttttttgggggttatttttatttttaatttttttgggttttaattaattgtgttgggggtggtgtacatagagatatggatatttttctctctgggaaaatgggtataaagtttggcattttgtgaaagatggttgggttggacagtctcatcacctgaatatgtataatctacctgctctcaattcttttttctttggcaaaatttgcaagttgagttcatttttactctccatatctctttcagttcttttaattattaataagtacgccgcaaaagtgatactgtagacatgattaaaggtgttgaggacttatcaattttctactcaaagaactaccaactgttcaccactgcaattaatatatcccacataaatggaattacattgggcaatttgtccaatccaaaagaaagtgccaaacatctcattgggatgacaaattccagtcccactcgctatccaacgaaaaatgccatttatgaataagggtattgttatggatcactatgtttattgtacactatcagaataaattaatagaaaaaatataacggaataaataaaaaataatcggaattaatattcgtaatatattatttactaaatttttttaaaaaatggtaaatagttgtaatttatcgtatttattatttaaaaaaatataattaaaatacttacattgatcaaattaactcttttaagttaattatattatataataagttattttgttaaagc

SEQ ID NO: 185309 - DNA, 1322 bp, Cannabis indica
tactccgtccttaacaaaaaaaaaaaaattaataattgttccccgtccacaatccacacacatttcttctctgtcattctacttttacatattataataatatatataatttgagtgaggagctgtgtctggttcactgaaatatggaaagtaagcactagaaaaaaaaatggaaggtgagcgaagaagaagagttagagttcgaaagccactcttcgattgtacaaacaccaaaaacaccgctaacacacaatcttctcgctctccatcgttgtcctctctacgtctcaaaccccagaagccccttttttcctcttctaccgtcaacaagcttcttaccaccaataacgatggcaactctgccaagaacaccgacgcgtcacaaaatgtctctcttcgccctccgcaggttgcttcccctcctttgcgacctcccatgttgttctctgcttctggtattgtcttctttttcttcttcttccagtatagtagatgttcaattcagcttcaaaatctagggtttgttctggcttttgatttttagataattcgatgaattataacctttgttctaatgactgtttgaatgaatcttatgtctgttttctgaattactggttctctggctgtttaacacagccttcatggacttacatattagtctttctgaactgaagttaattaggttttaaatagttaattgagttctcaatttttatggtttaaaccggctaatttcagtttttcgatattggggttagtatggatttgctacatttgatgtgtatactcgagctttggtggtgtataattttgtactgtgatggaagcactgccataagttatttacttatttatgtaatcaaaaactaagggttgaattccatgttctgaattacaggtagaggtaatactgaggttctcgacccatgttcagttaaaggtcctggacagaccactgcgaaacggaagagtaaaatacccccaactgaggagctctttggggacgttataacagcagggaaaaggaggaacataggaaaggaaaatattgatcccaatacttgtacacttgcatcaaagaagattgagttagtatctaacttacttggatctttttatttgctttctgttttgtatttatagtatatcttgatgcatgtgcagcgttgctcaatctgtagtcccaaagaagaacacatcagaatcagtctatctttctccacctccaattgtttccgaggctcttgacccatgctcagttgatgttcatagaccgacctctgaggaaaggaaggatacaataaccccaactgaggagc

SEQ ID NO: 185310 - DNA, 10764 bp, Cannabis indica
agagagagagagagagagagagagagagagagaaaagggaaggagaaggaagttttttgattttgtttggatggtccgatcgcatggcttctgtcccttctccttatcagactcacgttcctctaccttctcaccctggtatttgtttaatttctcctttcctatttttctgtttggatgccgagaaaattttcatttatttacttttaatctgaggccacgatcgcttaccggatcgtgtaattgttgttaatactagctgaactaaactaaagcgaaactagcaattcgagttcgcattattttttttaattaatttgtttttctttagtttcttgaaattttatcagatttcaaaccggtgatccgcgacccactcagttcttcttctttagtttcagtatatattcttgaagacttgtgtctatagctggcccttgctcaattccggcgcttttgattttgatccattattgctttttaacctctgcaaaagtttcatccatcgtttccttttcgatgcaattcattagtgattgtgcagtattcattgtttcgattctaactcacttactcagttcttggtgttattcagttcattttgctactcacacactcgtttacctggtcagctcccaagtcccaaccatttacgatagtcttaagtggctagcgtttatttattagtttttatttttaatatctatactggttcaaccagaagctattgctcttgtggctggactaagctcgattcaagtactaggtctttttcaagctgtatttcaagtttccctctcccttgttgtattaacaatgactcagtgtttcatatcgagttgggtgttcttttctgatgtaaaagctctattggcttatctaacttaagttggtcaaaatattttcgtagcggctaatgtttcagtacaagcatatccttaggctacacaatgagcttctctagatggtgtaaaaaaattgttagatagctgccggaaagcatttagttcaatacttcattgagagaatgactaggcctgatcacactaactggcttctattactatccccacattaagactagagactgtattggcaagtgcaatagaattgttatattcttatttgaagcaagtatagcatgctggaattggttagatcgaacaaattttttttttctgatgaggcgtatctcagtgatgttgcattatgttcatgatatattcacctttccctattttgagtttgaattttttggtgtattacagatgagaagtctccaacagctgagcctcagatatttgtggttcccattcacattgtcactcatgcttctcaacttcccgctgagtttctggaaccatcatctgaaaggcagatagtcattggttttgattgtgagggagcggatctatgtcgccatggagctttatgtatcatgcaggttaaaacaagataataatttccatgctcttattttaaggcttgtataagcatgcactcagttttttttatttatttggcagcttgcatttccagatgctatatatttggttgatgccattcagggtggagaaatgcttattaaagcctgtaagcctgcacttgagtctagttacatcacaaaagtcattcacgattgcaaacgagatagcgaggtgtctaattcattttaccagaacatattagcatgagtgacacagacaaattatcacactgttcttgaatttattctttttgtaggcactctattttcagtttggcatcaagttgaacaacgtggtggatacccaggtgtgtgtatctattgttactttattgactttaagtaggattttgtaagaattttctgcttgaaatgatctaatttattagtttcagttgtgaagattagttgttgtgtgttttacatagtgtttgcttcagattgacaaggaaatagtgtagaacctcttgtactttcatttgagctcatctgtccacaaacatgcggcttgcgatggtgattttggatcctactctgtaactactataagattgatttgataaacttgtattattgtttccatattcctctgcttttaaacttttttttacgaactaactcatttagctcaatgagtttcttgcttgtgccatttttttagttctctacctattgatccatgctatgcttgaaaatatgggatttctgttttagcatcaagataaacagtacttgtatttgaagctttctccatctctttgatattttttttcctggccaaggtgatttagtaattctttttgtgcgtgtgtgtgtaaggaaggtgatttaataattggttttatttcggaggagctatttcagtcatttaattattttatttccattatactctttcagattgcttattcattgatagaggagcaggaagggcgagcgcggtcatcagatgactacatatcctttgttggcctccttgcagatccacgttattgtggtattatattctagtagaattccttttgatttattagatgtattcacacagaaccctctattggtctagttgctattccaaaagtaactggatattgtaaattttggtgcatttttttgacagtgatctcctttttatcttccatttaactcattccatattattgtatcttgtagccttttgattataagttattttttcagcctagtgttgggttattgaatttggttgtttgcttttaatttcactatatcaacagaactgtttatcgctcattttgaatgtagggatatcttatctcgagaaagaagaagttcgtgttcttttaaggcaggttagttttaacacctaaccatcgcagttcttgattactgtcggtagccaaattatgtgtttgatgaaagagaacatgctaactcatgtaaatgtcaaagtctcactgagcgcatgaaataatacagcactatattgggagttttgtgatacagttcaatcatgacaattgacagactatatatcaatggaatattttttataataggatatgttggattagtaagcataatttcatattatttctagttgttgagtcgtatacaaaatctgatgtacataggtaatctctctctcagcagtagctgtattattgtcatttaattatcttgatgtctataacatttcctgtataggatcccaagttttggacatacagaccattatctgagctgatggtccgtgctgcagcagatgatgtccgtttccttctctatatctatcacaagatgatggcgaaactgaatgaacgaactttgtggtatcttcaattccgtggtgctctttactgtcgatgctattgcgtcaacgataataactatgctgattggccatctcttcctcctgttccaggttattataatttaaactgctgttacactaatacttctattattttcttttaaaaatagtcattgaagattttcatttttattgctaccacacaatgctcttgaattctgaagaaattttttattatttctaccacacaaaatttgtgattagtaagaaatactctgaagaaaagaaaaattacttggactcaaccatttaaatggttatttcggttttgaatttaaaattttgtttacttcactgctactgtgattactgattgtgatgtgatttactcgtgtagataacttgattgtggaaggtaaggcccccgaggaagaaattctatcagttctcgatgttcctcctggaaagatgggatgtattattgggcgtcgaggagccaccattttgttaatcaaggaatcctgcaagtatgtctctctctctctctctgtctagaaggcaccactcctgcagtatattcagctcgttatgtttaattgtgtattttttgcagtgctgaaattcttatcggaggttcaaggggtccacctgacaaggtctgttcgcttttataaagaacaagttcatagttttttttcatttttgaatggaatgttttctatttcaatggtcaaaaccataatttctctggttcatttaggtattcatcataggagccgtaaaggaagtgaggaaagcagaagccatgttaagaggaaggatgctggacctgtagtgtaacacataaaacaaactattgtgttttctttatacacattaaccctttataaggtggaattatcaactctgacaatttgatttgcttttcggaacttttggaaaataatgaaggatattatttgctttcttaaattatgggttgtcatggcgtgtcatagctaataattgaagcatatagataataatagtatgtcttggagctttgaattggaggtttagattataaaacacaaggggaaattttttatacttattcctagggtgtttgcagtgcagacgtggacaatatagtttgaaactatttaactaaattgcactgcaacgtaagggtattcatccaaccgctcaaactgcccgcaccgcaaaaaaaatacagtttgaaattcttttcggtgcagttcggtttgaatttttcctaaactgtgcggtgcggtttgtggttttgaattgttaatatgcggtttaaaccgtactacactgcattgcatattataaaaatactaagttttatatttatttaggtttaatatgtgaatgtttagctcaatgcctactaattattgtattattgaatttttttttttcatatttatttttaagacttatgatatttttgacaagtgtttttcaagttttgttgtatttgtgatagtttaattatttagtgatagtccaaactgcaaaaactgcattgcaccgtattattttttgcagtatggtttctatagtttttaagtttcgcggtgcgagtacgatttgggaaattagaaaaactacatgtgcgggttggtttgagaaaatggtcaaaaaccgcaccacttgcactgcgaacacccctactacaacgtggtacgatgttttcatttataaatagaaatcagatatattggaggaaaacttgatgattgtgcttgctactttctttgaaagcatgtttttgaatcacgtcgtattggagtgtggtgcgaaagaactaaaatggagaaggattatttgctttattaaattatgggttgtcatagtgtgtaatagccaataattgaagcatatagttaataatagtatgtcttggcctttgaattggaagtttagattataatacaaggggaaattttttatactaactcctagggtgtttgtggtgcagacatggatgatatagtttgaaactatttaactaaatcgcactccagcgtagtacgatatttgcatttgtaatagaaatcagataaaataactaaattggagaaaacctttgatgattgtgcttgctactttctttgaaagggtgtttttgaatcatgtcatattgcagtgtggtgtgttttttgtgtttgcgaactaaaatggagaccctccaatgaataaattgtataagaaaaacaatcgtttaatcgagattgtagctgcgacaaaaattagacgaatatattgaaaaaacaacacaaaatattgtatgcatgataaaattagggatttttatacaatacccaaaatcgtattttttacattactacgatttttttttaatatacgttcatggatattttttaatatttttcctttcactttgcaacaacatagtataatatagtagtaacgttaaaataacgttaaaataaatgttcatagtttgtaaaacaaagtttacattcataaaaatattaattcaactataaatctgtattttttggggggtatttttttgtcattctttatatttatttgagaaaaggaaaaaaaaaacatgagcaaataaaattttaaaatatacacataaagatgctgtgtggtgcgtttgaactacacttgtaaacttttaaatcaacatcacacttcaccacacaattaggaagagaataagcatggttgggtgatttatagggttgtcaattcgtgttatcatatcgtattcatgttcatatgtttatgacacgatatttttatggtaaacacaaacacgatgtaattataaatcgtgtctagatcctaaacacgagtgtgacaattttttgaaagtcacaatacgttgataacatatttaataaatctcgttgtgtgacacaacctaactgacactgatacgtttaacacatgttaaaataaaatacaaaattgatacaattaacatacaaaaatatttacacttaagattcatagtattaatctttttataaagagaatgaaaaaaaaaaactttttaagagatttttgttataatcgtgtataatcatgttattttcggataagcgtcttaacacgattgtaacatcttaaaagttaaaacttctattttaacttcaaaaaccattttctaattgccttaggcatctaaagctttgatagttgatgcagaattgttatacaaaacaaaactaaaaaactttgggaaacatgtctcagaattaaaaatgataatcatcgcaatgtactggaaaacaagtctcaaaattaacatcactcaaatacaaatcgacgaatcaacgtaaaaatacatgtgaacaagagaaaccaagcacaacacaaggctggggttttctatatatataagcggccaaataggcaaaaagaatatgacaacacaagatgagagataaaaaaattatttacttttggaaaccgccgtactgatactgttgaccactgaggctcgaaaaaaagtcatcagctcctattgcctgcgaagatgaaatcccagatcgtccagaccctgaacccatagctttgcccatgttaaatgaagttgagggtcctttgttaatttcatcgaatccatcgcctaatccacccacgacaccgacgtccacgagagatacttttttggctgcaaatgcattcatagaacagaagaattacactctcccatgtaaaagcaagcatctatgtaataaaatgaatgcagaaacttgaacttttcgtttcatttatctaataagggaggcctccaaatttccatcatcattccgattaatgccattttaagacaaaaacccagtacccatgttgatttagtttggagggacagaagggataaggaaaggaaaagtgacacaataagtaggaaaaggtaaaacttacgagcagatatattaagatcgattaaaccgcggcttagtgagtctgcccaaattccagatttcacttggaaattattcttcttggctgatgactgtgagtccaatgaacgatttccactcaactgactttgactgctgttattgacaaaattttgggaaggttccgacggtgctgaatcagaatgagaggtgaatgcaccaaaaggatcagaatcatcaaaattgttaagaggaactgcagcaaaaggatccacaatgtttgattttgttggggcagcattagtggacttagtttctggctgaggaactgtgtcaaaggctgcaaaattctccactgtggaagaagctgaagaagacatggttggttgtgccccaaaaagatcaacatcgatctgtaccataatgaaactagttcattagagcagaaatggaaatttaaacatcaaataatattaaaaaaataaacagaaaaataataatagcacaagcttcttaaaaagattagctacactgcattttgatcaaatcatggctaaactaaaacaattcgcagtgtatagtctatagaggactcatttccattgtgcaccatccctgaattaaagctaaatacaaataataattttggacaggaggatcctaaataatgccacgtgaaatatcaagtaaattcttaaaagtaatatgcaatggtaaaagccagaaatatacatttcaaaaccttggactcaccttagtttgagaagttgttccagtttcagcctgaattggggctgatacaaaggttgcatcagcaaacagatcaacctaaccaaaatgatacaatattaaagacccagttaattgccaacaatcaatttcaaatgtaaaatcataaggagccagcaactgcatttctgaaaggagaaaaccaaatattctcacctcagtttgagaacttgctttagttggtgctgagacaaaagttgcatcagcaaacatatcaacctccgatgaactgctatgcatagcagaattttctgatggagcagctgtaggagcatctatgaggtctcccatcaaactgtccccaaacagatccgcctggtaagagcttccagcagactctgtaaaattatatatataatgaattaccatcaacaggaagaaaaaaaaaactttataggaataaaacattagtgtcaactttaatatgaataacataatcacacagatatttaaaacattctacacaatcggaaacagtcaccacatcagtgtaaacatatcaatagttattcaaacatcttggcgtaaacaaaatttatcaacttaatatgacaagatataaaacgtaattaccgcagggcataaataaatatttaactgccaattaattaaaattaagtttaataccatataggaatataaacaaaattttgcaaagtgctctacaacactattggatacaacaccatgtaggtaagaaattcttagtagtctaatctaataatagaaaaggaaatatgtatcaactgagaagggtgttagtataaccaaatgaatgttctcaatacaatggttccatgaacaaaaaccataaagcaaccaagaccactatcagtgaatcataatatccacaaaagaggccatgccacataacataaccttcacaaatgtgtgcaacaatcctatttattacgcgtccattatcaatgagggacagtctacaacaagtgttatttcctgtactaatttgaattaaaattgtatctcttggactagactacttacttgtagtggaagtcccacgtggatcaaagtcatcaaaatcatcctcagcattgcttggaggctggcttgagcttttttttgcaggaattgaactgtgcttatcaaaataattgatttagtgtctgacattattttaatctttactgctagaaaaacattttaaaaatggtgaaatgtaaaagtaaacagacagtatgttgtgtgagcaacatgtgtggctgtagtgatagaaggaaatcagaaaagggaaaagaaatacaaatatctgctatgaaaaccaaacaataatatcatgagactcaagaggtaagcctgaataaagatgttactttggtagcattttgatgttcatcaatgtaattagcatgcaaacccaaacaaccgctggagtcataaactaatgaagcaaaaagaccacgacaccaagatacattgactaaaaaacattttaataatcatgccaaaagaaatattattcatcaaaagattgcctattcttcagtgccagtattacaaatgagacatgtaaaactagaatacggagcttgcagccactaatttcctgtcaaaatacattttgagttgaaattcttacttcaagtcccacttgttagtaaggaaaactcagaaattaaaacatctattaccatcagtaacgaaaactatacctgccatattcttttgaacccttcttcaaggtgcttccttgtttctcagtagtagacccacggcgtgtcctactataagtatccttatcatacttttcttcttcatactgatctttgtctctatagctatccttgaacttatctccgctaagacctccatagcggtcactactttggtagctgccactaccgtaagaagttgaacttgacttgtaagatattccagtagatgaaaggccaatgaacctaataacagcagttagtcaacaactgaaataaatacaaatagattttatacaaattgaagcaaagccatataatgcttctttcttacttgtcacggtttgcagcagctttgtttctaacttcttgtattttatctttattattcaaaaggccaacgatggtttctgccttctttctcacatttattcctgaatccttcccatttggctcaacatattcgaaacttgataatgacttcaccaattaaagtgcaaaataagagaatgaagtgaaataaaacaacaaacatacttttcaaatatcttagaaaatatcactcaccgaaatttgaaaagtgtgctcaataatgtcatcaacagcgcgttcagaaccatgtgctaccaaatactcgatcacagttaacgcctaatacaaaacaatgatttttaagacattgaaagcatgaaaaggctcagtgcttaactagattttccacacacaactaaaactctaactttctgtttcatgttctattaataatgtaataacaaatacagtcaccttatagacatagcgccaatctttgccagtttcagctaatcttgtccacaacacattcataccatctgacactccgcactggaacatcaaagctcattcaaatttagaccatgataagagtgtgagcttccctttctcaaaaacacagtaatagtacagagatttcatattaaaaaattcaattaaaaataatggaaacacatacaacttcttagtggcttgcgcaatctcagctagtgcagagccatgaggaccccaaggttcattgtccgttgcatccaatacctgtatcaataattagaatattacctaaaccaaacaaaaaagatcataaaccaatcc

SEQ ID NO: 185311 - DNA, 2249 bp, Cannabis indica
gggaaatcggggcgttacattgtccaacttcttttctttgtccatatgcacaagaaaataataaggtgatcaccataatattaatacatgtttgtaaaacaacctgatgattatgcttcattttgtgatttaattaattaattattaaaactgtatatgtgttttaattaagagattgttttcattatatatatatgtatttatattatatatatagtaaattatccctagcctattctttgtctatacacaatattactaaaaaaaataaaaacctaattaataaagatactattgaccttaacaaacatacaccattgtctcggaccctattttatttttgtggaggaaatgaaattagttggaatgagagattgagaattattaatccttttgtaatttgccatttttgccttttttggataacaagctcaatacctagctatatatatacctactaatcaaaaattaaaggggaaaatactaatgaaaataaaaaaactataagatctggttagaaaaaaaaattgtgaaagaaaataatgaagaaaaatattttttacaaattaattaataaaatattttttttttacatatttataattatagagaatcataaggttccatattaaaattaatttgtaataagttgagtagtaccatttatttcatgtgagacagtgtccaacaatataccctaaatcttataaaatcatactacacttaattattagtttttaattagttaaataagcatgctaaatctaaatctagtaactctgaaaaatacactctttcctaattaactcagtatggaatacactcatttttttgggacattttggttactatacttaaatgtgatcaagaatattgctccctaataagtataccatcacacaaaagatcaaagaaaatatcttagtgtgtttatttagtttcaacaaaactaaactcatctcaatgttttcctctctctctctagaaagtttcacaatggagttctcaactcaagtcagccctgttggagcatcaattaaacaaacaaaataagagtatgttattagttaaaaaaagaaaagtatattcccaaacaaaaaataaaataaagtaaaatagttattatagaacatgacaaaaactagtactacaattaattcatttattcttaagatacttttgagagaaataactctctttacacttaaaaaaaagaaagaaaaatcaatactctaattatttgttggcttgtctaagatacttttgagagaaataagtctcttaacaagtattacaatttcatttattccaaggatagcaaagactatagctctgagtatctaggtcaagttggcatggtccatttggatcaacaatccattcattaagagggaaacattttctcccatcatacttgaagatatcaaacgaatgaacctcatgatctttccatcgaaagctacaatggaagagtgtagttccccatatattgggcataaaagagaattgaaatgaatcttcgtagtgaagaagttggactccgagatcatcgtctaaagatttgcagtgaagagttaggtctgtgattggtaaaacgttagttatcttcactgtaacatctagtttaagaccctttgatgatttttgagatagtaaagaaaagaaaataaatacaacaaataatagaatggtctttcggcaaagatgatgatgattagggttgttgaagatcatcatgttaattagggtttttttttagaataagttttggtacaaaataattatatgtaatgaattcttgttacccttttatatagtgtaagaattatagaaatctaacactcttagtacttgattggtgataaaccacataatattatttctttttcagatattttaaattatttaaataggactttctatattaattatttgttatgaggtaagaagaaaaagaaaaagttcttttttggacattatttatactttatatagggcttttacaatttccagaaaaaaatggaaacatttaattaaaattaattatttattagtatgtaaaattagtagcatattatttattaacatttagataaattataataagctagttgtaccaaatatttcttatataagaatagtaattaattaggccagttgctgtgaattttttaaaatatacatttttgatgttattatagaatcaaaatttcaaaatttcgaccgatattgtatatagatgaattata

SEQ ID NO: 185312 - DNA, 5061 bp, Cannabis indica
acacagcttctttctcttgactaccattatcagccttcccttctttcggcccaacctccaagcccatctctctacgtcttcttttcccatcagcaaccattaatatttcctcattaataggaatatcaactaactgctcattttgctcctgaatgttaggaggggaatccacaatcatctccttagcaccagccatagatctctccccttgattctttccatatgcatttactgaaatatcaccccgcataatttcctccgtgatcatggggacgtgaacagctggtagatttgaatcgcccactccaggttgtcctccgttgccgttagcttcatcggaattcaccatgaactgccgcagccacttcgagccaatggtgtgattacgacgtcttggctttactctcattccttctccataaggacgaaccaccctaccatctggggtatcaaaaagcctttcacagttacgatcggaatgacccagaattccacatatgaaacaaaaggttgggacatgttcatatttgaaatttgtgtagaactccaccccctcgtcattacgcagcttcaaccgcctcttcagaggtctgttgacattgagagtaacaaaaaaaattattgtaaaaagaaatccaaactttagactagaaaaacttaagaacatgttatgactatacccgtttctattagggtaaatactagtttagactttgtgttttgtaaaagttatcaatcgggttctgttttgttaaatggcaagtattttttaaatggtataaatgatacttgagcttaatttttgtcaaaataaaacgtaataataataatctaatctgaaagttatttacatttttttttgcatgtgtttatgctagaaattggcttcagtgttgacgaaaattgagctcaagtattcttttgtgccattttgaaatggttttgcaaataaagaatctaaaatagtacttaccttttcatatatgtttatgagactcttataatgatgactttgtgggatttcagatttgaaaggccagattttcctctcttgttttctggggcttctcctttggtgggatcgtaagtattcctttcaagattaacttatgaaattcatgttgttcggtttgtttggtattttgtgctagcaagtttgattatgatgttgattgttatagtgtgccttatgctcaatgctatggaggacatcaatttggcatgtgggctggacagttgggagatggtcgggcgataacactcggtgaggtaattaattctaagtctcaaagatgggaactgcagcttaaaggtgctgggaagacaccgtacagtcgatttgcagatggctttgcagtgctgcgcagtagcattagggagtttctttgcagtgaggcaatgcatagtcttggaattccaacaactcgggctctttgtctagtcacaactggaaaatttgttgttcgagacatgttctatgagtatgtaattgacttgtagcttttgttggatgcaaatcggtatcatgatacgtttttatgaatgaataaatggttcatcatataaatttgaattgttgtcctactttggtttgtagtggaaacccgaaggaggagccaggtgcaattgtttgcagagttgctccatcatttctgcggtttggttcataccaaattcatgcatctagagaaaaagaggaccttgagattgttcgtattctggcggactatgctatcaagcatcactttcctcatatagagaatatggacacaagtgagagcttatcctttagcacaggcgatgaagatcattcagtcgtggatctgacttctaataagtacgcaggtaatttgtagtattacgacaaaagttgaaacataagttagctgactttttcgccatttcacttgtttgtatcttgaaattttcttgttgggttatcctagtgtgccctttgtaacaaatgaaggaattgttttctcaaaattattaaatttttcatttccttatcgcttttacggtaatttttaatagcttgggctgtggaggttgctgagcgtaccgcatccttggttgccaaatggcaaggagttggttttactcatggtgttttgaacaccgataacatgagcattttgggactcaccattgattatggtccatttggatttttggatgcattcgatccaagttacactccaaatactaccgatcttccaggcagaagatactgtttcgccaatcagcctgatataggcttatggaatgttgcacagtttgccacaactttatcttctgctgaattgataaatgatacagaggcaaattatgccatggaaaggtagttttcatttcggtactgtgttcttttcttaagagagttatattgtgtggctagcaagcaattgactatttttctttgacttttttacagatatgggaccaaatttatggatgagtatcaagctataatgactagaaaactcggtcttcccaaatacaacaaacagttgatcagtaaacttcttaacaatatggctgttgacaaagtcgattacacaaatttctttcggttactatcaaacatcaaagctgatgttaacatcccagaagaggagttgttggttccactgaaggctgttctgttagatatcgggaaggagcgcaaagaagcatggactgcttgggtaaaaacctacatagaggaggtaccaagtttgtctttttcgcccttgtttagttaaatttttttcgagtactttctcaaaattatgcttctattttcacagctagcgtctagtggcatctcagacgaagagaggaaggcctcaatgaatgcagtgaacccgaaatacgttctcaggaattacctctgccagagcgccattgacgctgctgaacaaggcgattttgaggaggttcgaaggctgctgaaagtaatggaacggccatacgacgaccagccaggaatggaaaaatacgctcgattgcctcccgcctgggcatataggcctggcgtctgtatgctttcttgttcttcttgacttgtttgtgtttctccccacgatatttataagaaaattcttggccttttttcccagtttcttttcctgggtttgaaaagaagttgcttttacaatagattgattatttaaaagaggtgaaattcagtttttgtttttttggcctcttataacaaagagcaggtgtatatgttccttggcttgatgtagtatagccaagaggcattattcattgattattatgtgatttacactatatggagtttatgtagctaagtaaaggtggaccttttcttttatctttccaaatcaattcccactcattcaaggaaaatattttcatgattttattctagttaagttttgataatacactttttttcatatcttcattattttcatgatattgtagccaaaatcttatcttataggtcaaataaaaagtgatttgtttatttactcttcatttagtttggaagtctaatatatttcaacgttagtggcttagtaattctttagtggcttattgattctttagttgaggttgcttttagggttttctttatgttattgtaaatggttcggtatacttaacttttatgatttcactcttggttaattaggaattttatctcccgaactttgatatgtactaaattatgttctctgaatttttaaggtcgttaaaaatgtcccttaaactattgagattgttaaatttaaagatttttgtttaattttagtaaaaaaaatctaacatggataaaagttcatggggcatgatttagtatatatcaaaattcgaggagtatgattttgtagatatcaaagtttggagagtatggtttagtacataaacaatcaatgaaatagtaaaattgaatgaaattaaacaaaaatccttaaatttaacaatctcaatagtttagaggaaatttttaacagtcagaaaagttcaggaggcacgatttggtatatgttaaagtttaggggataaaaattctaattaacctttactctttgagttataatgtaacggactttgttcgattgacgtattaatggatatttttgttttctttaataaaaacaatgatattacatatgcaattttcaataaaattcaattgattttgtggtaatggtgaaggtaatgaacaaatgtggatattttatcaatttgaaataacttataggctcatattcacttgattgagattgacttctactataaaaatcttgttaatatatttttaaatagtaatagagttttgtctcattatgtaataacatcataacaatgtaattgagggtaattgaaggttctaattatattatccaatttttatagtctccaagaaaattaaatataaactgtataattactaaaaaaatttcattaaacattaattactaaaaaaatatcattttcttataaaattcttagctattttacttaataagacactaagaaatcatattattaaaaaaaatactaagggacaccaaacatcataagagatgacatatagtatataattattgatttaatttaacatcaagtctcatatatttttatttaataaataatataaaaaactgctaactactacggttcaataacaatgctttatttaaaaatataatataattaacaatctatataattattaccttaataattatgaatattaatcactatgattttcctccaatccaattggattgattttcctccaatccaattggatttttcttttcttcctttgcacaatacttgtttatttatttattttttttattttataattacttgaaaataataaataaataaagggtaattggcaccagcttgaatttcaatccccattgctccttccttggatatttggtttgggtgttttgggataagctttgtcgattgggttagttggtgttattatttatttatgagtaatttacggtataaccttcttaagtggccatgtttttacaattaaccccaaattttaaatatttggtggtaaaacctcctaaa

SEQ ID NO: 185313 - DNA, 3822 bp, Cannabis indica
tcttttttttcttttttttattagaggacatctaattctcaatttctttggttcaagactttttaattctctttccacaataaatatattttttcctattctataaaataatactgtcattgtgatcctatattaaacaaaaagtgcaaaagcaagccctttagcgtttatgtatattttcttggatcattttcattacttatgacttaggactcacttgagaacgaagaagctctttgtaagtagcaagctcatgaaatgcagaaatgaatttggacatcacaggacctgaaacaaataaacgacataaatttcattacacatcctcggactcaaatattgtaagcttacaaaatagactaattatttatatgttatcaaactattattacaacaagtacctggctttttaaatagtaagcaacaactttgccaccagcacgaaacattgataagacggatatgattcaaatgtaaaaatttgctcactttaatacaagttaacttttcaatgtattagaacgtattatgatgactactgagagcgaccgctaaaataaaattgtgttgaaaactcagctctctaccctcccttgtagaatttgtataggttgattacatgacatgcacataggcaatgtagattaagtttttttagtgttgcgtgtttagtaggcagctttatgtttgatcaaaagtgtattctcttcctataagaagcagcatatttaccctaagtgataattttaaaaaaagaaataaatctggagcataaatttagttaaaagcaacctcctatagatacgctgacaggatcatcagttcctcctccaaatgcttccagagactcagcaaacacagtatcaccattgtatgcttctccaagagctgccctgtaaaaaggcaataacaagagttataaatctgggtctgcactgtcttgaaatttcaacacaaaatttcaaccactaaataaatttctttggagggaaaatttaaaaggtagagaaaatagtatgccatacattcttacccacctaagttctaggtaataatgttttttcctttccgtattggtaatgttacattttgaaagaaataatagaattttcttaagatgaagagagggggatataaagttgttccaggaaacagcaaatattgagtagcattatggctttttggtaagagttgaaggaaattttgtttttgttatcttaaatgagtgggggggaatgttgtggtaattatgaggaaaccctgtcttcttattgaagtactattttctctatataataaaatcatctgtttctttagctgctgcataaaaaaaaaaataaaaaaatagtatactgtgttcctctgacaataaattataaagaaaagaaatgcttaagacttcaattaaaatcatcaaaagtttaatgtatttaagtcagggtactttagatattctgtagacagatcaaatgtaatgctacttagtaaaagaccttattgttataattttagtttattttaactacctatttgaggagtcgacataaggttattgaaaataattcccattaaagattattgaaacctaagcctgtacattttctccaatatttctatttctacgcttcaactccttgaaagagtataaacttcaccctttctactttctgtttcgcaaaaacaaagccatttaaaaatccaaaccaaaaaaagttcgattttattcattggaatttgtctgaaagtaatatccaaacacttacataaacttcttacagcctttaaataatttctggcagcgatctttcaactcatcagctgactgctctatagaacaaacctgtcaaaaaaagcaattggatcatcatttcattaatcagtttccacaaacaccactcaagtaactctacaggttccactgataactgtgttgcagagccttgaaatctcaacaactcaacacactacacaggatgtataaatcttgtatcaaataacactaattcgaaaaattaagaatgaaaattaatggtcttgtttgatacattatctcaaatgtggattgcctatgcttcattatctaaactgaattcattaacatattatacatacaaatcacagtccaatgattcaaacaacaagaatttcaatgttcatccaaataaaaaaacaatagtttcatttcatcgaataaaatcatataaatgcattgaaatccgctcagtgaagctcaggatacgaagaaaaagatatggcaacgaaatccagtggagattaacgatgaatgggatagtaattacctgattctgaaacataggggaatcgtcgagcctgataaaggccgccattgttgggtttctctcaaaaactcaaatccaacaatatttttgctttttgagatccagtgagaaagagagtcggaacataaataaataaaagaggaaagcaaaacaaaaagatttggaggtggagaggggtaaaatgataatttcccttgtacttttgattaaatgacagaaatgaaagtcgtctaactattagctgatgatgagaaagggaggaaagaaaatgacgaaattgccctcaggatgtgatgtctcaacagctctgccacgtcgatatagatgatggcaactcatgtcactctaaaataaacttagcctgtcacacatatcttcacttcacactttcttgaagtaattataaatcatttaagacatatttattgacactttcaattgtgaaaaatataaatttcatcagagagaaaaaaaatgttatacagtgaaaattgtgagtggtgtgtagtaatttttttttactgtcggaacaaaattttacagatgtaacaaaaaggtgaatcagatggtttttatttctaagattaagataattttgagctctttttggtagtgtttggcagttttggtacacaagaaataaattgaaacagatcctaatcctaaatgacactaggtgtttagtacttttgttattggtctaattaaatatcggatctcatttaatttaatataataatttctaaaaaaaattgttagctaatcgcaaaatgatatgtctagaagtgctaggcactactggtgcccaatagtaatgctcttaaaaaaacaacttatcaacatcaaagaaaagccataatgatattaatggtttaactaagggtgtatttgaaagttgctatataattacaagatagtgtaattattaaagtggtaattacacagtctactaattacgttatattttaaaatacaaaatatgtttgggtatgaagtggtaattaaatatgggtaaatactattttaaattctgtaatttgcaaaaattacaaattggatcctctattttgttaaatgagaaaattgacctatcttaaaaaaaaaaggtttaagagatacaagtggcaaacttgaacgactgatggtgtcaagttgtgttgctcacaaaacagaaaaaaaaaaaattgagagcttaccgtagtcagggggtccgatgatggtggtatgatttcaggaactaagacggtgggtcgattgtgattcgtatgagggtactctgatcgggctaagtggtgatgcgattccgatgattgtaatcgcaaaaggtgagaagccatttggagatttaggtttccttttgaatgattttagagccagtttggcacaactatgagaaaagtaattgtagttgtgcagtaaaaaaaaaaaacagctatagccgaactgtgaaaaataatttaactgagtgtttgataaattataaactttaaactgttgttagttattaagattctattataat

SEQ ID NO: 185314 - DNA, 1653 bp, Cannabis indica
tataatttccagtctcttaattctttcctatcagcaatgctaactcattttcttcaagaatgtagaagagaaagagttaaggaaattaccgaaaccaggttaattgatgtccaaagagctgctatagctgcaaaccctaatccaaatagagctggtcggtcttcagagttagcccactgtttaaaatcataaaataaacccaattcaaaaaatggtgagacatgaaagcacaaactttcttgaagctacttttaacatttaactacaaacaagtttcttcactatctacaagaatccttgtaagccaagttgaaaataactcactataagcaaatgtgatagagaacttactaagttttgaactgatttattaacggttagggaggttgatgactcagagttatccccagcagcctttacagcaacagaaccacggttttgtctcactgcaatatacaaaaatcaatggacagaaatgattggtttatacataatgatacccacggccacccatttctacataatcataaacctttcccttctattgtaaaaatcatgagaaaagcattctactaaataaaatactagtgttcttttctctcaaaatgttcttaattttcataaagagatttctaaagtagtggtagtgtgcattatgagtcatacccgagttactactgttataagttaagaattactcagatgtaaagatgattgagcaatctatcttttataatcataagtgggattgtaagtcgtgcaaatttttgtgagaacattgctttagttatttttataactaacttccaagttcaagttcatgagtgtcaagctctcaaataattccaaattcatgtttcagaaactaacttccaatggacttcacattgagtaaagccctaatcttgttggcaaatccaacaaacctaaattaattgttctcactaacattgaataaagttccctttttattgatcaaaatactaataaacaaagttttgggtatcttcttcttcttcattttcttattttccccaaattactattctgtttgaatcaaatcatcccaattttccacaatcttatgcaaatatataacttcagctccgagaagagcaatctttccctataatgatataacccacatcttatagttatgaagaaaaactaccaattttagtccaattaaactttgagaaaaatgaaactgaaataaaatctaaaacttgggttaaaccatgtaaggcttaccttgaaaggaagaaagtggaagctttgagaaagctgttaagagggttttactggttttgatcaataatggtggaggcaagcttgcaacaatggaagccatgtctacctgtgagaaaattcaagatagtaatgccaaaagtgttttctttatatttatatatatttattatgtgaagagaaatatgtaatctaattggttattggaggatgagggaaattatggataaagcaacagaaagagaaacaggaagaggagagttgaaaaagattctgatttgacaaggatatgatagtgttctctactctactactattactaccattgccaagctacctccgttctcccctttctcaccacactattttttccctttttgtttttttcggtttctaaagtaatta

SEQ ID NO: 185315 - DNA, 5018 bp, Cannabis indica
atttggaaatacctttttttctcctaatacccaacacaacacagttttaaatatcccctgggttccaacttccatccaaaactatcattttttagaataacaccattctctctctctctctaaaagaatctagggtttgttttggaacagtgagctttcgcttttacctatactcctggtaagagaaacctcagaccattttctccaacctttcttgtgatatataaactctacctagggtttcacggaaactgaagttgctgtcttaattatcattctcttatcactattattcttttttttttcttcttcgactaaattggttgagacttgcgtgcttgataattgctgattttgaaaaaaggaaagttgttattttgaatgtattaaattaaattcagtttttttttttttaatatttgtgtaattatggtggttggtagcttagttgctattttgggatgatatgtgtatgcgtttaactgtaaatgatacttatacagtccttgtctcttcccttgtcggttatttgagtttttttccccaaaattgaggtgcttaaatggaggtggatggtgttcatagttttctcagcaaagggttgactcatacaaattttatttggtttagtttttgaggtaaaaccgtatttttttttcttttattgatgactggtactgaaaaagaaaattattttaagttattattattattatcattttcaagtataatgcatttttgggatcttttatttaaaatgggtgtttcattttgtcataattttgtgtaattacgaaatcggtttatgttcatgtatggatattgtttattgtatagcccgccctctgaaaaaaagtttgcaccaatcattattgttctagtatgatcgagttttgttctttggtacctttgatttacttaattttgaaaatgctatcttgatctcccatataaagtagtaaagttcacgaaaacagctcattctgtaaaggtcaaaataatgaactctctgtttcttaccatagcttttagggttcagttaattaggaattccatatgcttttccactcttgatagaagatttatatttttgacatttacttttttcttattaagtttatccccttaattacgcattaaatgtactattttattcagagtcagatatctttttagggtgtttacttagtatgttgatcctcaccacatattgagtgattgagtagaaatgtgttatactcttttcgctgttttaccaggttactatgtgattgtcttaactactacaagaagaacaagaggaacattgatcttttaataatatggctactgagagtccaataagaatgtctgaaactagtggaaagtgggcctcccataaaaaggcctcgacctttgctcaatcatctgctggtatggcagcagaggatttaaagttactgctgaaaggccacaggtttactggcagtggaaaagatgtagctcctagtcgaagtggaagcgcacctccaagtatagagggttcttttttatctgtcagtaatattttttcccagcagaactttcaaacaagtgaaagcatggctagtctaaatattgatattggaaaatatgagtccgaggaacagttacgtgctgatcctgcttatttttcatattactgctccaatgtaaacatgaaccctagacttcctccccacttatttcttgggagaatcgtcgtctagtacgtcacattggtagttttggaaataattggggattaacttctgtagatgacagtgggaatgtttccttgcacatggctcaaggatctcttcctacacacaaagaggagccagaagatgatcattcaccccaacagccttctaatagtggggttgatagaacaggtgaaatttggtctggacaggatactatttcaatggcagaccagcacaaagttgcaggcagtttatcacaggtaaaattatgttaattcagtagttcattgaactgcatttgttcatgttcttacttgttttatcattgtaccattattgaatatgatttattcgttactcttcttccaaacatctttcaagatgattatccttttattgtaatggaaattacaaatcatattcatgtgaataaaatctgtagttgatttttatttgagctatatcttgttgcttctggttccttttaatgaagttacttggctatgcgtacataaatttattttttgaacttacaggatgatttcagtggttcttcattgcctgaatatgcttcaagccatggaataactgaggaatcagcaaattgtgatgctggctctaattcgttttatggctctcccattataacacccaatgtcaatgcatctaatctgggaacagaagaagcaactaatactgacccctctgttgctcctgtttcaagttcatcatcagttgattctattagaagctcaggtggtgatgaatcaggtattaacatcatgggctctgaaatgaaggctcttgccattagcaattctccaacttccagcaatcaagcaaaccaagaacagtggcagcaaagcaaccagaatattaaacgaccacagaagatgaaaatgcaaaataatttatctctgccccaaagtgctaaatctcatataactactcaaggatttaattgcacacacaatggtgtggatcaacatctccacagtccttgtaagttctcagcagaggtacagcctgtactgcagtcatctgggttcacaccaccactatatgcatctgcagctgcctacatgacttcaacaaacccgttttactcaaatatgcaggcacctggattttttaatgctcaatttcttggtggatatgctgtgaaccccaatgcttttcctccgtatgttcctggataccctcctgggcccgttccattggttgttgatggaactgccggtctaagctttaatactagaacaactggggttccaaatgctggtgccattccacctggtgcagatgtgccaaacttaaataagttctatggacagattggattcccaattcaaccttcttttgttgatcctatgtatatgcaatatcatcaacaaccttttggagaaccatatagtattcctggtccatttgatcctttggcagcaagagctggcgttgttggaggccaggttaatatgcctgatctgaagaatgggtcagataatgctgtttatatggatgagcacaagatccagcatcagagaggtgcatctaatgctaatttgaatccacggagaggaggaacaatgagtccgaattattttgggaatacatccaatgttggtgtcttgatgcattaccctacctcaccccttccaagtccagttttgcctggatcaccaggaggtggaaatggtctctctcgggggagagcagaaacaagatttccgccaggtactggtagaaatgcaggcatgtattctggatggcctgggcaaagaggttttgaaatttttgatgaccccaagatgtataatttccttgaagaattgaaatctggcaaaggccgcagatttgagctgtctgatattataggtcatattgttgagttcaggtaggttgcggtctgcacttgtttgagtaatgtctatacattaatatctgtttgcagaggcgagtgaataatcatatatctccaattccagttctgatcaacatggtagccgattcattcagcagaagctggagaattgtagtgttgaagagaaggcatctgtgtttaaagaagttctaccacatgcatctaagttaatgactgacgtttttggtaattatgttattcagaaggtatactgtcaattgtttccttactctagtttctgtgtatgtttgtcaattttctatggtccaatggttggtttatttatatttttctttcatttttcattctgcagttttttgagtatggaagtcatgatcagaggaaagaacttgcaaatcaactcagaggtcagatattgcctttaagtctgcaaatgtatggatgccgagtaattcagaaggtatgttcgatacctttggtccatttgtattgctctcaagtatgtttttatggtactttacaatatatcttttgagttttacaaagatgtttcaacttatatcctgtgttagtttggttttagcacgggatatttaacatcttgtaatgtgtattccttaatttactaagtttggcatcattttttttttttgtaataagcaagaaaacatgtatcttagtttgttcaccaacgaagtgattcttttatggatgcatctgcacagaaatggggtttgaacttagaagtaaaagatgtttcatgttctgttttttgtatgtatattcttttctgtcctagttgttatcgtttttcttttatttttttaattaaaatcaaatatattatgtataatttgttttcctaagacgtgattatttcttgctttcaaaaaaaaaaaaagtacatggttatatcttaagacgtgtataaacgcatccacggccctatatttattcattgcagtatgatacgctagaaggaccacatgattttgacaccaaatatcgatttaagtttgtttagagttataccatataatctctaatgcagaccattccagttcttctaaaatcttagaaagcttagaggtacgctaaagagatgcccttggaactccttgatatgaagataaatagcaaagaattttagtatggtttcttaagtattaaacaacatgatatgtgagttaaaacattagttctcaacacttaagggtacttaagaagccctctgattagtacttgtttaatacttgtttatattaatgcaaatatttaataccaatcaacttataacttttaacccaagaagggtagctcaaatggtcaggcatgtggtttcctcccactaggtctgaggttcgagtccatcatgagtacctacatagcaattgatatagtttcttcgtcctcaaatattgtagggttaggcg

SEQ ID NO: 185316 - DNA, 1022 bp, Cannabis indica
cctggtactaagattaatttcccaattaattctcttcctatgtttatttattacttataacctgtattcactttttgatttgatttgatttttgtttacagtgaaatttgtcaagagagttggtctcgatccatacctaccagaagaaacgatagaggaaattctattgagattgcctcatgagtcactcataacattcaaattggtctccaaatcatggtacaacttaattaaatctgactattttataaggaaaaaccttgatcatcatcatcacaataatgctactattactacagctttaatcttggctaggaattcagattttccatcattcattaaatcaccacaacatatcatccccatctcttgggttaatcatattcatgatcatgatcacagccttcgaatccatagtttgaacaactcaatttgcctccgaatccaagtgaactattggtaaaagggcttcattgtaatggcatcatttgttttccatataaatataaatctaaaattatcttttgcaatccaactttgagacaatgtaagattttagacaccccagttctaccaaaatttttgtttatagcacatggatttggctacgacaaaagaacaaatctttacaagtatgtcatgatttcactatccacacctagtaattctaatagcacatttagagttcaaatttgtagtttgagtactacaactagtagtggtagtagtaacacttggagagagattgatattgagccatataaaaatgtgttagtatcacctcatcatgagggtgtgtacttcaaatctttttattattggatcattcatggcatcaaaattaaaggaattatttcgtttgatatgtgtagtgagaaatttagtataatatcgccacctcagattgaagaaaaaatttatcgtccaataaaacttacagtgtggaaggaagaattagttctctttacgagaaatagagaatcattattgtgtgtaccgtcattttctttggatatgtgggt

SEQ ID NO: 185317 - DNA, 4085 bp, Cannabis indica
actttctttcacatactcgagcccaggatgaggtcatgtccaaagtttgagttcggggaccaaatccaggttcatgtccatggttgatgcctaagggtcaacactgtggtcagggttcaagtctaggtccttgtccggtttcgagatgggtttgggattgagaccaaattcaaatccataccagggttagggtagggttgaattcgtgtcgaagtgtgtaatattaaaagtttttataaagtaaaaaaattaaaaataattttagaaaacattaaccaaacatataattacattttgaaaactacaaaattattttctaataacaaaaataaaaaataatagccaaaactcctaaaattctattttggctaagcacatcaatataacgtttttgcttcaagtctctattgagcctcatactagctctatagaccaataaatttctagggtattttgtcctcactagcacacttttttccaataaatcatccatcttgaaattaccccagatcaagcacacttaaccgtaaagttattttaaaacaagatgttgatataggtagtaccaatacctcttcaactatacaattctatatctacacaattttaaatatgaaattgctcaactcctgatctttccctttgtaaatcacgaagtctaagagtcacaattaagtaattatttatgacaaaaatttctcatttagaaaatccctaaaaaaaacctccatttaggagacatattaaattgtgtagttgatgagataatattcgtgtgaggtgtgacataataggggcataaatccaaagaacgaagtttagcgttgaaattaaaaacaaaacaaataagaaaggaaggaagaatgaatgaatgaatgaggtggtgagacgaggatttcgtggaatagccatagccatagctaacccttcttctttgccgccgccgccgcctttctcactcttcttctcatcctcctcttcttcacttctctcatcttccccctcgcttcaccctcccatggggtcccaactccctggcctcgattcccaggtcgctgactggcctgccaaccgcgtcagggacaccttcatcagcttctttcaggccaaggatcacgttttctggaagtccagtcctgttgttcctcacaacgatccaaccctcctgttcgccaatgccggtcagttcaatttatttcgatgatgattggaagtttgatgtattttgctcggaacatttggttattgggaaaatgagggaaagtgttgttttttttattggtttattaatcgttttgtttgacggaagaattgaaatggcagggatgaatcaatacaagccgatatttttggggactgctgatcccaatactgccttgagtaagctgactcgagcttgcaatactcagaaatgtattcgagctggtgggaaacacaatgacctcgacgacgtagggaaagacacttaccaccacaccttctttgagatgcttggaaattggtcttttggggattattttaagaaagaagctattggttgggcttgggaacttcttactgaggcaagtgcatctgcttacacaaccacttactttttgttactagagaaaaattgatgaaatttgtcagtttggataactgaatttagactagttaaataatactgttgttcttcaacatatgaaggcataatattgattactcatgctgtaaagtttgtgttgtttcaatcattaactggactatattgtatgaatataaaagtaagaatataaacctcactcaactcaataaactttcgctggaacaatggtagggaatagtagagactgcttcatatcgaacaacttcgactttgcagccatagatggatctaaatatttacaagagaccagcatgtacaattacatgttgccaaaataacttacaaaagctgctacgaagcacgaaaacgttgataacaaacttgtattgaattcaagaccaataactgcttagattcctgcttttattggctttaaacttgcactacccttttgttgcttaataatgaaaatgggaatttaaatatatttttgaaacataatattttcttatacttacaggtttataaacttcctactgaacggatttacgctacctattttggtggtgatgagaaagctggtctagcgcctgacaacgaagccagagatatatggctccaatttttaccatctgaacgtgttctaccatttggctgtaaagtatgctattatatatatatatatataatgtttcttgcatttaagaagagaagagccttttcacatgcattgcaatagattcttgatagcattttgcaacttcagaatatatgtttatttcattgctttctgaatcaaaacattaaagagccaaaagaaagagaaatattaaatcataaaggattaggctaagttcaagcttgttccaactcatggatctataaatagaaaggaaaaggacagcttccttctttagttatatcatcaataatgtgtaattgtctttgtctcctctaactaatgatgaaggagcacattaatttgaaactagtgccgcaatttatttctctaattttactttctatttatctcaaatcttttcacttgataggacaatttctgggagatgggtgacactggtccatgcggaccatgcactgagatacactatgacagaatcggtaatcgtgatgccgcctccctagttaacaacgatgatcctacgtgcattgagatttggaaccttgtctttatacaggtatattggtgatatttgttttgaaggcgactttatttttttgggtataaattacgattgctggtttagtagaattcagcaattaaatatttgagctgtttttgaaagcttatacaaataaagttatgtttcatttttcttctgatgatactttgtgagtctgtgcacgatttactgaaatagcattgcatttttttttactgcgtgattgattatattttgaggcattgtacagaaaaaacctaatttttttttttttgtttgttttgtcattcttcaatagttcaatcgggaaagtgatggctcactaaagcctttgcctgctaagcatgttgatactgggatgggttttgagaggttgacttctatactccaaacaagatgagcaattatgatactgatgtgttcttacccatatttgatgccattcaaaaggtaaaatctattatgttttcttcctttattttgtagcattttattttccttctcttcatgttcacttgtggtttatggtaaagtttgtttttcaacagctgcatcatatatacatggtgtaagttggaattttacatttattcatgtgtatttgaatacactgttttcctttctacttttttgtagacaactggagctcgaccatatagtgggaaagttggagcagaagatgtagacaaaattgacatggcatacagagttgtggcggatcacataagaacactttcttttgccatagctgatggctcttgccctggtacaacaaatcttatttgctcattgtatttttaattttacgtttgagatcacatatcttaaaccttaatattagatgtggttgtgcattttattagttgcttatttatcacctattcaattttattgtccttctctatcgatttactttggatgaccagtgcagaaggggatatgaaagttaagataagtaattatataaaaatcaatgaagagaaaatttaaaaagaaaggaaaataaagtttttaaaaaccaatattatgtatatcatagaaagtgggaaaaaaacataaaaactactaggggaggatcctgtctaagacaagagagcacctacccccttttacaaaaaaaaaaacataaaaactactaaacaaattctattgtaaacatctttctagtccacttaaactattctttctatagaatattttgtttcttatgttggcattgtttcctagagaaataaaggaaagatttagttaatgtcaatttcaaatgaaagttgatgtatgaatttgccagttaaaattacgtttttttttttttt

SEQ ID NO: 185318 - DNA, 7559 bp, Cannabis indica
ttaacttcaaaacaggtgccaaaccgttaggagaagtagaaaattgaagatggagagacctatgatcagatccccagtaactgagatttggacaccgaatgactaccaaaggtatccgaccataaagagttgcataacatacgatggcgtaccttagtcaaagaattatcatgatgtaaatttcgaacccaagaacgtactccaaatccattagattagactcgatgagagcttgtttgtttaaaattcctcattaaatagttaggtctcgaccccgcaccctctttctctaaattcctcattaagtatataactatatatagtgtacttattatttgcctaaagtggaactcaactcctatttgtattgaatacgcatatgcattatgtgcatgcgaaggttgattttttttttgttcatttataacatttgcaggtttggttggaaaaataataaatcatataaaaataatccacataagtaagaaagaacaaatatggtatttatgaaaagaggggaccccataataattttgcctagtacagtattgatagcgtattaatatattgatagggtgaacttttagagagctactaatggtgtgtctatggtgtgattgtgaagtaacaaccaactactattcacatgagtcaaatttatatacattatgatgtgatatatacacacccatataatgttaaagcaaacaaattttttaagtaagaattaaagctgattaagttgagttgacaagcttattattctccttaatttcctttaaaggaaaacgagttatggtgtgagaaaaagactcatgaaatagtgaaaagtagtggttgagaggtcgttgaggctatttaacatctcacaagcacagctaggttgagtcatcaccgacgagcatttaacttgtttatgagaatggtttggttatatataagtgtgactaatgagagtgatcaaaattaaacaaaaactgcatttacaacctaagtaccaccctctcctcttctttctataaatatatattgcacacaataaatttaatcaactcattctcaagtgcatttttaagcaaaaaacaatgagcatattttctctggtgactgggagacctggcccaagcggctatggatcagcctccactgccgaggaagtcactgaaggggttgatgcatctaagctcactgttattgtcactggtcagcagctgttattactttctttctcataataaactaatgtagtgattatgtgtgtggtcatgtatttatatgtttgtgattttgttagaaatgtatgctaaaaagaataattacaaaagctgagtaaaattagaaaaaacaaaattgcaggaggtggaagtgggattgggttggaaacctcaagagttttggctcttaggggtgcccatgtgatcattgcagcaaggaacactgatgctgcaaataaagcaaaacaagtgattttgaatgaaatagaaaatgctaaagtggatgttctaaaactcgatctcagctcaaccaaatctgttagatcttttgtggataacttccatgctcttcatcttccccttaacatactaatgtaatcttatcttaatctaagctaatcactattaaacaccgtatattcttttctcgtacaaaaaatattgatatatatgtacatgaaaaaactgcatattacagaaacaatgctggtgtaatgttttgcccattccaactttcagaagatgggatagagatgcaatttgcaaccaatcatctaggtataattaagatttagttactaacaagtttttaacttttttgtttttttttctttctctaatagtaattaataattatgtgtgatttcatgattatttgatttatgaacaggtcatttcctcttaacaagcctcctccttgataaaatgaaagacacagccagaaccactggtattgaaggaaggattgtgaatctatcctctatagcccatctccacacttatgaaggaggaattcgtttccaaaagatcaatgatgaaagaaggtatgtatgagggtgcaataaatttaaaaatgaatattgttctgtataagtagatatatatttataatcatttttattgggtttcagttattctgacaaaagagcttatggccaatccaaactagccaacatattacatgccaaagaactatcccgtcggttgcaggtcattaagaatctttttatgtcaaatttgattgttagtaaaataataaaataaaaaaaagattataattacatttgatattattgcaggaagtcggagcaaacatcacagtgaattctgtccaccctggattgataatgacacctcttatgaggcactctgctcttctgatgagtgtgtttatgatgcttcacctttattttacaagtatattatatatttacaatcacaacacatgacatgatgcatatatatatatatatgatgtatgtatttgcaggaattttgaagttttttacatgtctcctgtggaagaatgtacctcaggtaaagtcttgaatgagtgaatcagatgcatctttgtttggaaaattctttatataaagtgtactttatatatgtatggacagggggcttccacaacatgctacgtggcattggatccaaggctgaaaggtgtaagtgggaaatactacttggattgtaacgagatggagccaagtgcatatgccagagaccaaaagctggctagggagctctgggacttcagcaacaagttggttgcttctactgcaaagtcttgatcaaaacaactacttatcctcatttcaccattaatcgtaatgctgtgttcataattagaaaaattcatcataataagagtgtgcatgagacagagtcttagtattattcacgattcatcattatgtcttggaggtctcgagttatttatttactggaatggactgtgttcgttgtttccattaatatttgatataatagcaacttctttctttcttttgcacttgtgtgtaacatatgaagattgaagaataaatattacccttgtaaagttgtaacgaaaattgaaaactttcaaggctttagtgagacgaaaaaggaaagaaaaaatgaaaccaaaaaaactatggtatatctatgtatataggtatgtatacaagcaacataaacatccaagtggactaataagaatgagcatcgtcctcccacaaggcagctgctcgaaccaaaaaggcggagccaacaacaaccactgctgcaaagactggtggcacaagaagatcaattttggacttggtgaagagataggatggcaagcagaacacttgtccaggcatgtctagcggaactctgatggccttattggtgtggcaggcatggaaggacgaggtgggagaaatagccgagacaaacgcaatctcgggagagaaggatgccactgccacggtcagggtgaggactgtggtccagctgatggcatagatgagcagtggccaccggcggaggatgtggtagatcagcacgttcgtcattgaaatgttatgatgagcagaaggaatacggaacattgtttggtttgttttctgttttgttggggaacaggtgaggagtacttgcttggttaatgtatatatatgataaaagtggtaacctaatctcaacgacttttctaagttaggagtttaggtgtgtgtgtgtgtgagagacaaaggacgagggatggagtggtttgactactgctgacgtggttttgtgttcggttaggacaggagaccaactctctctctctctcacacacacacacacacaattaagctcaacaacaagctatcttgatatggatgtatggaccaatatttggtcaacagcttctcttttcttctaacttctaagatgattgccctaaacataatggagtaaatggggcgaatctgtcttcacatcaaaatgcaataattctacattcaaggtgttggtttcatgaatcataataggataaactactaaagtggcgttatgggttacatcaagagacaaagaataaatgtacacaacaaacacgtcagcattacattctttaggatggctggccctctcctgtctaatgaagaaacgtactacttgtgaaatatgactatcgtccacaaccacatgaccatgttttgaaaaacattttcaactgtcaacatcactttcatcaatactaccacgctcacccatgttattacttataccattgccgtcccatggttgctctactgtacaggcaaagcgcccattgtagtacggcacattcataaccatcttccattcccagtccccactctctcatattatatatatatatatatctatatacatacatttgtttatctaaagttccatgctacataccattggggaaaataaacatatattctaatcattcttgaccagatttacaagaagcttcagcatggcagtatatatcagtttatatatacatacctatgtatgtaattagtctgttttgtgcttaaaatattacaaactgggtggtgaaaatactctctccatcaaaagagtcagaacaagaaacccaccataggagatgcatattccagctatcaaaatcaacagcattgcttgcagtgagatgtgtggacttaaaaagaaaacgactgctatagatgcgctctgccaaaccttcagctgtgaaaatgctccttcctgtcccccaaatgcaacagtaaatttttttaaatattccaactcaactgattaacttatcaagcccaaacatgagcttcagaagaacagataataaagcaaatacttcagaaatatcagaagttcaatcagtaccgtgtcatgcttgaagagtattccaatcaaagcattgagctgtgtattaagtactccatcaccaatgcccaatagagctgccatgagaagtgggtataagacaccgagtactccactagttgcactgcaggatggcatggtaaaacaaccaagtcagaacagcaaaaagttattctaaagaattaatatgagtccatatgaacacaaggataacctgtacttgaggaggagccagaggaatacgatagcatgagcgaaaacacctccggatactatcagagtgatggacttcagaccagaagtaagtcgaccagcaaccaacgaacactgagacaatattaccacaatctgagactacaatatatcaagatttactaaagtacagagtggaagactttttctttcaactttacttcatctcatttgacaacaaattttaagggtgtccatatgatatgaataaaaaaagaattgtgcatttcaaatgtccaccactgatcagaaggtgataagcaagagcagtgagataattgctgtgcaagataagaaagtttgttcccatggctgatcatcaattttttacattagaactttcatattttagtgtcaaacgaaataaataagtaacctggttgtgagctcttatttgactttgttttgagaaattatgaacctcatgatgcctacctatttattctcaattaataatattccaaatttcatgcaacaataaataaatgaatttaatgtggacattaatgctataccccaagacagttgaataggatacaagagatcaaataaaaagggtatttgagtcattgtattgaggatgggtttgtgagtgagaataggttctacatataggtaagggaagaaatgaggcatgcaatgtattgattaattctctatttgcatcagttgtaattagcttttctcatatactaatatcaataattctctactgtttggctaccgttctattgctattagattcattgggctcaggagtatactcggttcttatcaattacttgcaaaaaggcacacttaaaattgaattcagcaaaagtagcagttttgttagtggtaaaaaatgtttgcttgctactgcatacttactattgcatcaaaagccccataaactgccattgaacctccaacaccagatacacccagtgcaggggttacaatatactcggtaaattcagccctaaaattaaaacacatcttccttgattaaaaaaataattttgaaagataaaatgagaaaataaaagagctaaacaacaatggttttgttgaaagtagatcaaatggcttaatgaagacttaccacacaaatgcttgttgtagccctgaatatgccataagaggaataatcaatagcatccgagcacttaacaaaggagtgatgacagacttcagcaacgagataagtgaatcatataaggatactgaagaagactcggggacctcctctcccttaccatcccgtttttgtaggaagcacataagtacagtacccaaagtcatactgcaaaggaacacaacatacaataaagttgtcccgctcgtacttccatcctgcagcgacatgacatgatcaaagcaaattattacatgaaacaaacttgaagacagagtgtaagtatactcggttaagactaaaaagtttaacaaatgcttgtcttccaatttttacataagttagttatgtcattccttgcagacaaattatatactaaggtcttcctactaataaagctactcatatctaactcgtgacacatcaaactaaataaatatataaacttgcagtagtattagatagaagtgtaaccacattatagtaaattgaacaagatacagaatccgaaactataatataatgatgacacatactgttccatctcttaggagggcaagcgagagaagattcccaaaaaactgcaatgaataaagttgtcacttcagctatacaacacagaacaaagaaatcataatagcagcaaaagaaatattcaaattttaattgggttgacctggtgaccggcaaacattccccaaaatactccattgaagttaccaataactgttccttcatgcaagttggagtctcttgcataacttcgggctacagaagttagatacgtaccctgaatgggccatactaaggtaagtaataaatgaaggaaaaattaaacctgaaaagaaaatacaaagctggaatttcacctcgccaacccagattatagaagcagcaaaaccaaggtacaaagaagctggaaccattgtatacctacatgaaaatatcttcaaaaacaaagcatgtgtggtttcaacatctgatgcaatgcaaattttcaaataagtgacttgagagattttgtgattattcatggtcacaaattgattaaaacttccatacactattggtacatgtaatactgaattgaactatgcgagattccatttagtgtagtggtcaaacaaaactagtttatccttgcaccctttatgtgagaaaacatcaaaacaataggcgccagattcaaggttaaaatcaggtccatgaggaaattgagtgtcttaataggtgtgacataaaaatgcaagttccttccactatgaaacagaacagtatcagtccaaacttgaatcgccatgataagcttgaaaaaaaaaaataaaaaaagaaaaaagaag

SEQ ID NO: 185319 - DNA, 2406 bp, Cannabis indica
tcttccatccaacatttttccaagtaccctttgtttgacataagagaatggtatacaaataacagttgattgcataatttgaggaacccacattatgtgcacaacttcaaaataatgactctttattgattatctagtaaaattgatcagaaccctgtttaagagcttataaataaagacaagagacactaaaatgaatcataattgcaaatcttcaaccccattaaccttaagtgcataacagaaagagcaggttcacacttgagaaaatataagaaaaacacaacagctgaactatctacaaaactaaacccaatgcagctgattttatcaagttagaaccataacaatgccaacaatctcaatacgcagaaaataagaatagtgaccttataaattctatgttgatttgaacagtgaaaatataattattgccatgatactcaaatgacaccttttgtcctaaagtcataacaaaattaaaaaaaacattatcaattcacttctggaaatttaacaaaactgcataaatgaacaaagatatagagaagaaggacatcaaaaaagtccattacagattatgacattgatcaaaatcatagttccagttcaaagtccaaactataatttgatcaataataaaataaacttttttctaaaaacacataaccagaaactcatcatgattatcataatgcttttatttagacccaattgaattatatatgtaaaactcaataagcacagttcatttttggtaccctttttcataaattcttaactctaaagtaagcaatgccaggttaatataataaactcatctggtggaataaatctaccacacacacacaataatatacatattttccaacagcatctaattaatttctaaatgatcaaatgtggcatgtatattcctcccaaaattttagtttagagcagaagtcctgtatgaaattaattcttattcatgaatcttttggcaattatatatattattgttgtattgatagtttaattcttataaggtggcccattgtgaaaaatagaataaaaaattgtatgagaatcaaagtcacactaactctcataagtatatatatatatataaacagttaccaagacaagaaagaatactatacttttcacttacctacattaccttgtataaacaagtattgatttattgaaaattcattacacatacatacacatgttcagcaagaacaagtaaaaatctttaaaaattaatgcagaaaagaaaagcatgaaactgaaaattaatttcattggttggaattaagagtatatggagttttaattgaaataaatgagggatatataacaaagcaattaattaataataatatgtgttaatttatgtataaaatgcagtaaattaaagaagatttgagcagccagaattgatcagttttttgtttgtcttgtctttgttgactctttcaatgctttgtattgaatttgtgtaagcatatgacataacaataattgcttttctctgctttttacaaaggactattgatacatatatatacaaggtaagtaatgatgctgctgcaatatattgcaggcaggaccacctcatatatatacaaggtaagtaatgatgcttttctttgatattttcaattcaggccctgcatttcaataaagagataccacctaaccagtaaccacctcagactacagtactacttgttcattatgtttttcttttttttttttctaataatcgtatcataccaataagaattgatggtgtgatttatagttatacctaccagcccaatccaaccttttattaatataaatactaatactaactaatgaaaaaaattcaaatcatctttatcaaaaagatcaaatgaaatgaaatagtaaaaagaaacagatcaaataaaaaaatggtatatatttatataacaagactcctcttttactacttcattctctcagcttaagaaaacaaaaagacctttctcagaatattcaaaggtaattctcccatctcatctttgttttattattttcattacaacaattacttgattactatatatcttataaactgtaattttaattttgaatttttggaaaatcctagcatttataaatatattttatacattgtttatcagcaaagtattcattttgattcataattaatttcaatccctcccaatcaataaatgtaatgatactaaaacatgttagaaaacaacatcactttagactagtttagtttcacaatgggccaccaatccatttagagaaaatagattcagacaaaactcattactacaaattcaaatacacattaataccattttcacctttaaggaaattacttgttgattattataaaaaaagaagccaaaccagaca

SEQ ID NO: 185320 - DNA, 4421 bp, Cannabis indica
tcttcttcttcttcttcaatttgggctaatgtgtaatttttttaaagttttggcctttaattcaatttttcttttttactttaacccctcaaaaaatggaaccttgtaaaaaaaatgctatttttgagaatggcattgtgagaaattttatgtatatactgattctacttcttcattgctgttattgttcaattttttattttttttattatttgttattatattattattcaatttacagaaaagtttggaactttgaatgaatggtactttttttttcatcttcatcttctttttgttgagctttgtgtttcaattttgttaagtggtgatgggattgtgtaagtttggtgtctcttgttcttttggccttttattgtttttgtcatttttttcatttgcacttttcttggtttttaagtgaggacaactgttatgaaagtggggttttgtaatgggtaaacacaaatttggactcgtttaccattgaatacaataaattgaattttttgttattgggtgttagtattactcgcactttttattagtattattttttttttttaagttatataagtagtgttagataccacttttagcaattctcttaataagtataattttttactaatttaaaaaatacaaattaaatttatcattttcaaaataagtgatccaatcatggtcactgagtttagatttttttcaaatcggataaaaataaatggtacaaaaccaaaaggaagaaatgataatcaattgaagagattaagaatgataaaagagaacaaaaatcaaccaaaatttccaacaatctattttagcagatacaaaagatttgattgactctacaaggtggtggtaagagagaaaaagaaagagaccctttaagctttggaaatcacttggacaattttgtacagaagaacaaagaaagaaaaaaaagtcgaattgctagtaaatgtactctttgcacaagtggagtggtggtgatggtggcggcggggtgggtacttctacaacacgaaaaaggagaagaacgaaataatgtgcctcatttacatgtcattagcatggagtttatgacgtgcatgaggagtctgatacttgttatctcagcgccgttgattgtaggcaagttgcgttgatggtgcagtatctgatacacttgctcgaagattggtcttacgtgcattgtgatcatcgggtctgtagggtttatggctgctgcaacgtcggtcatccatcctagctttcgggttgtttctttgttgatatcgcacgccaactgttgcaacagcgaaagcaacactccttggctcagtggtagtggagacattgacaatagaccccgaagatcaacctgtcaaagaatgtattctcatcaatatcaccgaaaccacttactcaactttgaaagggaaaggaatgaagaagaatacctgagaacacaaccatgatacaatcgttaagtcggttctttgtagagctccagtgaaggcctcctcatacttctgttcggaaatcaatcttgacagttccttcgttggatccaagggaacctcaatctattatagacaacaagagtgagagcaatatcagtattatgttgctgaaaaaattaaaagggaacttcaggagttagagcaaaccttctcatggagaccacccaaaggaccgttacttagttgggtcaccaagggatttactccacctgcttttgctccggcagcagcaagagctatcagcttccgttgaccatcagccaactctccacttaatgtttgagttaccgatgacgctgcattcatagcatcctgaaaatacattcaataccatacaatgatttcagtaagtcaagcaaattgaaaaaccggtgataagacaaaacagtatacacgcacccttaaagtaagcgccaacggagagtgtgaactctcaaagtgctgctgagttgcattagaatgttcagccattcccttttgaaatgtagcatctacttgttcaaacatggctttgcatgacatctcaaacgcagggatcaccgaagagtcaaagctagatttcaatgcctcctatgaaaaagataaaagacaattcattaaaccatgatattcttagcaatcattgcaaggaaaactacatcaatgttcccttattcgtacctgaagagcttgtttaccggtagtttgaaattgtgcttggatttgtctagcaactgtagcttcgagttttgagttgactgatttctccaactgatttactgccttgtcacctactcctctctgaaagcacaagcatcaagtcagatccaatccgagcacaacgttttcctaatagaatgctaaataaattcaaaattcgaacctgaaaagattctgcaataactgaagatatcgttttctcaatagccggagtaattgctcgaattacagcaggtccaactgctgaaatttctttcttcagtgtcttatctaacaaggctggtaagtccttgcccattaagttactaatcaaactaacaatttgttgagttcgatcccgatatatcttatcatttttcgcactctcttcttgaaaacgagcccataaagcatcattactggccttaacagccttctccatgcttcgtccaatagcagcctccagtcttcttccctcctttgttactggaactgcaaccatcatcgacatatgcttctgcatgtctttctgcatggtcattagctgcacaaagtgatcaaagaaacaatgattagacatgtataccatgaaccaaataaggatttagaaaacatgtcctaatttccaaaagctggaataaacacctgattaagcatctcctgcatggctacaatttgaggaaacgcagcttccaaactcgaactcccaccaggttcattgctagaatccactgaattgagcacacctggatatggagaagaaccagatgcttgagagttttttgccttctttttcgattttgtattcggtgtctgcataggattagctgcagtagaagtacatgattcggaagcctttgcagatgtgtctcttgtagaatcttgatcttcctcgctggcatgagtaggttgcacctgtgcctctgtctgcttgcatcatcaacttgccgagcttcatctgtactacaagcttcattgacatttgatattgcacgttctcgggccatctcgataccaagatctgatgcctgagaacaaaaatatttttctttgttctctgaaacctttgtagattcttcctgaactctgaaatcatcattttgattagatcttgattcacccacagttttaacttccaactcggtattatctgcatcgccattgacaagcacatcctgggtgtttgcctcacctccagccttgcattcaacggatttagtactctcagatgaagctgccattaaaatctcagaaggagtaatgagatgagttgggtgtttgtacatgccggagccggtacaattaacgacactcgagaaatcatctgtgaaagtttcttctcaccattcctagaatcatcatccacaggataatcattattttgcttgttctccagaagcatgatcactaaacgaagtacctgactcaaaggtatctaatggagttctaaaaccggatagtttccccgacagccttggactcaaaggaagaggcggtgatggagcacaaacaatgtcagcatcgcttgctgtcggtgttaacgcaacagatttcacctctgtactccgagtcataatttctttagaagatgttgcctcgatagaagagccaacaggatacctcatggcactttcagagttgctcgcttgtgcagttggcttcagtggtgagatttcagggaatccttcaacagtagccctatcacgtgaaacattggactcagaccgatctagtgctgaattctcgattggtggaggcaagcactgcgataaatccaaagcatattgctgaatagcctgtgtttggacacaaaaaacctgaagaatatgttctccatggggtgatatacttgccccagtaaaactcaaaatcggcatagtcacagtaaattctgctatataatccattcgtgtagccaccgggttaggaccatattctaggtgtacggcatatatagcatttttcttagcatttgcaagtaagagaagccctgcttgtggcagtgctacaacttggttaaagaatgcatcctctaccctaggttcggttgaactcttaagttccaatgtctgggtacatttccatgattccgactcacttggcaacaaccaaccttcttcactagccgatgcccaaatcttcacttctcgatttagaggaccctgcaagaagttgaaatgaaacttaatatctagagctacaactcgcttatcattctgataagatgcattgcacaag

SEQ ID NO: 185321 - DNA, 3724 bp, Cannabis indica
taatatgcagctaaagaaggaaggacggagaaatgagtacgagagacacaagcttgaagctttgaaccagcgtcagaaaatggtatgtattctctatacacaaaggtgtttttcttatgtactttttaagaactttctaatgacttttatataaattcttgaaggttctccaaagaaagacagaagaggctgcagttgctactaaacggctaaaggaattattggaatcccgaaagtctacagtgcgtgacaatgcaggttgatatttcacttggaagcattttttctctttcgaaattctgtttttcctaatttagtgttttttattgcagcaaattcgaatggacatacatcggtcacccaggtaaagatctgttcttaacatctatcgagattcgaaactgtggggaaatgaacttatgcaaacactttttccaaagcacctacacacatgatcacgaggagcacacacgactaaaatgaaaactaaaacaaagacaacaccaaatgttggtcctacatccaaggttccgagatttctccctaatcctctgactatgtaaaaatggcaacccattactacctagtctccaagaactctctggaacaccccaggaattttccaattgatttgcttcaatgtctgttttcgacaatttctttaaactcatttcgacatagtacaaaaaacaagagctgcctttatgtgtagggcgggaaagggaaaacttatgactaactaactaacgagtgtagtgaaatcaagatacaaactttactgaaaccttttctgttctgagaggaaatcagtagtagttttgtttataacggttttgaatatacattaacaagatagatttcttgatttgttattattatggcttatatatcggaaaatttgatgcgagttttcatgtcatatgtagagcaatgaaaagtccttgcagagatggcttgatcatgaattggaggtcagtgttaaagtgcacgaagttcgttttgaatacgagaagcaaacccaagtgtaagtatttatgtactcatactaacttaattgtctccccaatgctaaagtaatagtaagattcattcatagattagctcccatattaattactatcataaatataatattatgtttcagacgagctgcgttggcgaaagagttggctttactaaagcaagtggatcagttctctttcgaagggaatagtccccctaaaggaaacaatggatattctaggtatgaaatagaaattgatttttgaagttggacatgttctaatggattatttaggactaatatgtatttattttttctgttgttgaaaagggttttgtccatgtcaccggattcaagaaaggcgagaagagaatctgttgagaacatgctgagcatgtcttcaaatgcactcatcgcaatggcatcacagctctcggaggcagaggaaagagagcgttccatgattggtcgtggacggtggaaccagttgcgttcgatgggagatgctaagaacttacttcagtacatgtttaacacaaccgcggaagcaaggtaaatatcataatttttggctcaaaactatgttgacaaattcaaggctagtcttatgatatataccttcatgtcaacaggtgtcaactatgggagaagaacttagaaattgaggacatggaagataagctgaatgagctagtaaccttgttgcaaataagtgaaactcagcgaaaggagctcgtacgggaggtaagagcaaaggagcaagctgctgctactgcattggttaaatcagattcggtaagaccatcttttcaatacccgagtttcatatttttgctgcataataatgtattattctcaaatcgagcatactaagttttttcagttggttccacagggaaattctcgttcttcgttgaaacacttggcagaagatatgggtggtcccttgtctccaatttcccttccggcaccaaagcagctcaaattcactcccggggtagttaatgggacggttaaagactcggtggcttttgcaaaccagacacgaaaggtaattcctttgttttattcctactgcctccatattttgtgtttgtgctgttaagaaggtaaacatttttgttagcgcagatggtgccaatgggacaactttcgatgaagaaattagcaaccgttgcacaagctgggaaactctggaggtggaagagaagtcatcatcagtggcttctgcagttcaaatggaagtggcagaagccatggagactttccgaatggattaagcatagcgatgagacgataatcaagtcaaagcctcgccctcaactccaactataatgcaacgacttcacgaaaacagatcgtttgtatatacttttttaacagccaatgtgatccaacatgggacttgacagacacaagcattgattaaggtaaccctttcatgcattgtgttcactgtcattttacttgccaaatagaaaagaattgaatagttagtggcaaaattaactgagttcttagacaattttgaaaagaacacccgggaagcattacaccattgctcttagcaaatgatttaagtgcattttgttagcttttgggtaactctactcttcgtaaattagttttgagatagaactccataagtcttactataccgtacatttactttctactatctagacttcttcatttcgatctgataatcgtcaattagttttgagataaaacttgacaagccttactattagtttggagatagaactctatgagccttgctctatcgtacattctttcatctagacttcttaattttgatctgataatcgtcaattagctttaagataaactccacgagccttattatacccaggcccgaccctgtgcataggcgcgctaggcctgtgcctagggcccatctagcctaggggctcaaaaaaattctcattttaaaaataccacattttttttttctaaataagagcccaatttttttttcatatgccccactaagtttcagggcttgccttggctatatcgtacattctattatcgagacttttacattttgatatgataatcgtcaattaattttgagatagaactcaatgagccttactatactttgtacattctactatctagacttctacattttgctttgataatcgtgaattagttttgagatagaactctacgagccttactatacgctacattctatggtttagacttatacattttgatctgataaattttgcagggtgtgctgtaaactgtaagaggaatcttgacatgtttggtgctcgaattgcgaaagcatggaaatgaagatggcaagtccatttcatcgaaagcgccttattgtgcaggcaataataatgtttgagatttcttcttatgatgagacagcaaagggtgagtgattggaacattgtgcatggagtgaaaatgatgagtatttaggtgatacagtacaagttatgttgttggtgatgcaaacataagatgctaatcctccttcttcttcttcaataataatccttcttattttattttaatttgtacattttcattagtttgaattaatggatgagtgagataataagttttatattatcttgttgattcttctcttgtagaattttgggtttcactcataaacaaaacaaggcaagcaaattgtattgtattgtattctcttaagaacaatagcattta

SEQ ID NO: 185322 - DNA, 2506 bp, Cannabis indica
tgtattagtatggtattatgcatcatataatgcttaataagaacactttttcccaaaaactttacaaaattaccagtatataaatcatttgggcctgggtttgggcctagactcaggcctagcctaattcagtatgtccttattctaacttcttaccaaacacgcccttagtttgaagttttaaatctcatgaccgttaactcatttgagcggaaactatgcactcaactcactcactttctctctcttcactctctctctagatttctcgagctgcaatgggaagattcagtgccaaaactgactacgaagatctcagaaacgctcgaatcttggaaaatcaggtctcttttctctttgaatcttttcttaatttctcggatcaaaacaatgaataacaatagtcttacttgatgatcggatattttaaaggctcgtttgaaaacgatcggattgcaaaaaactatatcggaacttcgatctatagtttcatcttcaaaaccagccaagagaccatggacgaagaaggtttacgacttgtcgtctttgaggcgttctcgtcgtttaaagcggtcgtcttcttctgatctaactccgattcagattcagtcctctttacgaagacgatcttctcggttgagtagcgatattatacaactcgattcaggtttcttgttttcattttgattttaactgtgtttttttttctttttagctcaaaattttatgcattagcgattctgactctgagatctgttttcattacactgtgatctttagatgagaaagtaatgaaaataatgtatgaaaataaagtataatcgtttttactgtgttcttttcagctcaggtagtaatggaaattgttagagaaaattttacatgttagctcagatctgtttttcgttattctgtgatctttagatgagaaagtcatcaatatcaatatcaaaagaacactgatttagtttaagatctgataacaacagtatgctaacaattcccatcttttcatatttggcgaagaaaataatggaaatggttatatgtaactcacatattcaccatttttgtttcagcaggagagctttttgatgatgaaagcgaggatgaaagaactgtgggaggaaagattaggcctgcaaatatgccttgggtgaaaattaaaggctcaggggcagcgcttcaactttcacctgaagcttcagctttgagatgcagtagcaggggaaggggtggtgtctataactctgtcgtcggaatttgctgccatttttgcaggtttttgtgcttcctttttgccctttttttcaatttttgagttgataggtttgtttttagaatccatttgctaaagtgaataagtaactaaaactttgaaaacaaatggtgtttttcagctttttgtatagtttttttacttactcttttggtctcttctaaatttgatgctgataatgattacattcgctgtgttaagttcatgattttgacttgcattcaatttgttgtagtgaataagtaacagaaattttgaagatgcaatcatcttttctccttgtatagttaccaagtacgcaaaatttattaattctacagtagccttctcttgttttaatcaaattttttgttctcatcttattgtctttttgttggattttctatttgcataattctattaagttaatcataccaccatgacacattgacattgcatatccttaacttgttcaatttattgaattgaaaactcttttacatacaagtggtgccacattcatattttatattgctatgaagactgagttaaacagtgatgatattgttagttctaatctctataaactcgcaggcagaaaaaattgtgtggcgaggaagattgtaagcggtgtggcaatcttgatgtcgatgaaccatgcattggttagtgtaattctcctctgatgcaagaatctctcaagcattgtgatcattaactaatagggactctgtgatgtttactcatttttttcttgagcaggaaaaactgattgttcggtttgtcattcgagcaatggtgttctttgtcgagcttgtctgaaggttcgatatggtgaaggtaaaaatccaatactatttcttctcttctcttttcttgggaacaaagtaacaattgaaattctgattaccatatattttttttatagaaatggaagaagttagagagaacaaagaatggatgtgtcctcattgcatagaagaaaaaggaataaaccaatattggatatgcaacaggtatgagaatcaacaaacccattttctattattatatatataatttaatatttacacctctaaggatgatgatgtagttccatatgcctgaaaagacgaaagatggctccaactgggatagcaatatatacaggttagttacaaacatctttttcttcattgattgctatgttgcctacattaatagttatttcacgagtaatttttagtgtaaatacttaaattttattta

SEQ ID NO: 185323 - DNA, 5195 bp, Cannabis indica
aaattaaaaaaaaaaattaaggagagaagagagcgccatgtcaccgtccattcttctatatatattgattattaattgattaaaataaattaaaatattggcgccttcatccttcttcttctccttcgcttcgatcgacccaaatcaccatggatccctctcttatgaagaagcttctcgaagatgacgaggttccttctctctctctttctctgcaatctttttaggttttgaattttgtttttgggaatagaattaagaattcgtatttagtaaaattgatttgatttgaactgaattgtgttttgttttcgaaggacgaaagcatgcattcgggggctgatgtggaagcttttcaggctgctctaaatagagatattggcggtgatgcctcccattctcttccctctgaaccaagctccggtaaatattagtttaaccctagttttatttatctctatatgcactgattggaatttaagagtgtgttaagtttcttagattagatttctcgagagaatgtggaaattaagattatgaaattatatagctcccttgatttgatttatgtttatatgtattggttggaatttaagattgtcaagtttcttgaattagttttcttgaaggaatgtgtgtgtaatttaaaaattcgaacttttttttgggtaagttaagatttcttgtttattgatttatgaaattatatggggaacagctggtttgtctttgtcccaagggagcaataacactactactactagtgctactactactcagtcattaccacagttcccaggggctactttagatgaaagtgcaaactttcaaattcaacaagaccagaacaatgcacagccacaatcaatgaattcatctgtgcaggagcaagtagtgaatcatggacctgtgcccgatcaacaacagcaacaacatcaacaacagcagcagcaacaacatcaacagcagcaacaacagcaacaacaacagcaacaacaacagcagcagcaacaacaacataacagtattaataatacctcacaaggacccaaggaccttggtttgcctcctatggtgtcccaagatgaaccacaacagaagcatactgaacaaactccccttcagactcctcaagctactgggatgcagatgtctggaaaaactcctgtcttgatgcaggaaccagacagaccacctcctccagaaaatgaatcacagtatgtgaaacttcaaaagatgagtaatcaacaggctacggtctctgatcagccgaccaatccaccacaagctcgtagtaaacaggtgccctttggcttgttattgcctgttttaatgaatcaacttgatagagataagggtatgcaacttcaagaattatttcttaaactcaaggtcagtgtaatatattttacataatcctcatttgtattattagttttcttttactatttcttattggtttttgtattttcagagggaagaaatcaccaaagagtcatttgtccgtctcattagaggtgttgttggggagcagatgcttaaattagcagtacatgcagtgcaatcacaggtaaatccaaatgcattataagtttgagacatttaatactgttattaagcttagaactagcacgcacagaactttcaaccaagcctaaaatatcagctgcagccccaagcatcaatgcgtaaacagactcaagggatgccatctatcaatacagggacgacacattttactgatcctcgttcatttgcacaagtacatcagaagggcgccggctcttctgcagatgtctcacacatacctgcttcaatgggccaattacagactaatccaagccaccaaattatggacaaaaatgttcaaatgttaagagaggcagatcgtcagtcagactctcatggaaagcttgttaatcaaatgcctttgtcaactgtggtaacccccaatcaagagagagattctatgcagcatggatttaacaggcaacagcaacttcagcatcaacagcaacagttgcactttccacagacatccttttcctcctttggaaataccggtagtcgttctcacttgttttctggcacaagtgccaatacttcaacattgtctgtcaaatcgcaaccacatgatttacaaatgaggcaaatttctcaacatcaaggcatgggattgggatcagctcagtcaggtggagaaacacatggtgcgaatgtcttgggtgtatccaaattggggcaaaatcctagtctttctcattttgcaaataattcaatgtcttacgtaaaacctgaaccagttgagcaggctatcgagcttcagcgcaaaactccatcatcttcacaggcatcaccttcagtttctgccgcaaagtttgaacagggaaacacattttctggaactttaaaagatgagtctttagagaagcagccatcaagaatgggttttccaacttctgctgggtttgttccttcatcatccacaagcatggcacccccacattcactttcttcctccatggctatgcacccagatcccagtgtcccagtaattccatctttatctttaatctctgctatgtatgctatttttatgcatttttttcttctttaatgtgatgtttagatagatgctgttacaattagatgtggttacttcttggtttctgttgtcttgtcagacaatcgatattgacatgtcacgtgcttaggaggaatggaaaagattaatacgttttactaattttataacttgatttttgctttccattttctatgacgtcttaaggagagtgcaatagttttattcttagcaatagaatttgctagttgatacttgatataattataatctctacctgttattgattgcaagtttatttgttgcttatctatttcttcagttaggagctcgggcaccttcaggaatcactccagctggaattaataataagacacctccgaaaaaaccttctgttggccagaagaaaccgcttgaagcacttggttcttcaccaccaccagcagggtagtttacttaatgttatgtaatttgtaacagtcatatgatagttttactttaatcttttccgtaagcaacactatgcacattgctcattttcgtccacattgattgctgaatattttgcagtaagaagcaaaaagtcactggcaacttttccgatcaaagcattgagcaactcaatgatgttactgccgttagtggagttaaccttagggtgcggatcttgccattttaaaatctacttgttgtagtctactagttaattatgcaatgatttgatcttatgatgtttcacaccttataggaggaggaagaacagctcttttctgtacccaaggaggatagccgagtaaccgaagcttctcgaaaagctgtgcaggaagaagaagaaaggttgatcttgcagaagaatcccctgcagaaaaaattagcagaaatcagttaagagacactatatatatagatatacctacttgttcattgcttgttttggtttccagttgagtgtgcactttttaaatttctccgaataggaattgagcttgaatatttatgcagtgaccaaatgtggtttgaaaaacataagcaatgatgttgagcggtgcttatcactggtgagacccaagatgcccaatttatctttctcaatatatataatttattatggtccgtgctaattgctaaatggaatggactatcagtctgtggaggaaaggatgcgcggactgattgaaaatctaatcagactgtcgaagcaggttaattttcgtttaccatctcttattttcatgtttccttgaaagtttgagatatctcatttcattttgtttctgttgattgaacttcattagcgtgtcgattctgagaagtcaagacaccagactatcaccacatcggatataaggcttcaaattatgacgatgaatatgaaagctagggaggagtgggaaaaaaaacaggctgaggcagaaaaacttcgtaaacaaaatgatgtgagtcccatgcatttgtatgttaaaataaaattgcacacttggttagtatatacttgctttctcgagatcttgaaaactctatctctgtatgcagcctgacggtaacaatggagttgatggtgataaggagaaagatgactttcgttctaaatcgtttaaggtatcaatggtgcttttcttgtgagagttgttatgttatctttttatacaggtgaagagataattatctccttgctcttttttttcctccgaagggtcaacaacctaacaaagaggacgatgacaaaatgaggacaacggcggcaaatgtggctgcacgagctgctgttggaggagatgatatgctttcgaaatggcagcttatggctgaacaagctcgacaaaaacgtgaaggaggaacagatgctgcatctggctctcagccaggtaaagatgtgagccgaaaaacttcatcaacagctggaaaaactacaaaagaccatcatgatgctgagaaaagaagcggtacagcattttctgctgcttctggtacgtgataaatttctaaccaactcttgattggtataatgtcactgtctttatatgttgatcgactgctgatatcttaacccgggcagtgttgttgcatcatgtgtgaaaactttacatatgcattagctttaaaatcttaaaaatagtccaatttgttatgccattattgctgtttgatttttcttctgtattaccaggtggaagaaaattcggaagaagccaaggcgtctcgcctcaaacaaaggtgccccgtagtaacataacaatcaaggatgtaattgctgtactcgaaagggaacctcatatgtctcggtctcctcttacatatcgtttgtatgagaaaattcgatctgacccggcttctgctgaatgatccgatgtgcctctacggttttgttgaattaggccaacaaggtgtgtggaagagttggaaaatcatgctcaatttggagtggtattggtaaagcttgctgagagattctagcttgtacaacaaagctgagtaatagttaattcaaatttgcttatatgtacatatacattgatataataaaacgacatgtcgttttacttgattaggaaaacgacattttgtttaatttactttgactacacttacttttattttattttaaataaaa

SEQ ID NO: 185324 - DNA, 9461 bp, Cannabis indica
aagtgaattgagtggcttctcaagaaaatatattttgcttattattataactgttggattacaattaagttgatctaacatgtataagttatcgagagtcatagtacatcatatcaaattcagagaactttaaagaaagcttgtgatgtataagagaatgtattcttcttttttttattaataaaaatcaacaaagtccattccctatataatccataatctctagacatagtttttctttaatttttcataattaaaccacataaaataggtacccacgttaaactatttaagatgaaggattcaaattttaagtccacattttgtgtcctaattgtagtagttggtgtctatctaaattatgtgccctaatcatgtctaccaaattacaatttaatcaaacacttgtaaaattataaattatgtgctctaatcatgtctacccaatagcaaatttaaaattaagcattcccaaaattctaaaaattgtcactctaatattgttctaaaaaagtgttccactagttattgccttcataattattatttaggtaataaaattaataatatttgtttgcatattctcaataaatacttaataaccatcaataataattaacattattttttaaatttgtcttgtgtatttaaatacaattataaataataaatctaatgatctaatgtaaaatgactttgttaagtgaatttcttcaatattcatagagaaattatgtatcaagtcccttttatcccactaatgataatatgagtagattcttaaaatatttgatagagaatgtgattacaccaattccctttttaacattaaaaaaccttatgattagcataataaatctaagtaggaattttctaaacaatgtcaaaacaactaagaagtgatagctttagggtacatgcatagctaattcacatgttaatgtgtatgacaaatggttttcaaccaatgatcaaagagtgttgtataataatgttgtgatgtacattattccactcattactactttttttggttgttacaacaaggagagattgatttaagcatggggggccataactcaagtgggacttataatcacaatattaactaggtttcccacatccaaactaaaccacatttaaatattttttatacatttgaacttctctttaaaattatatataaataggtaagaaagcttacctgccagtagtgtacaatcttaatcattcatctaaacctaactactaattattcagttgtatacggtcttgattatttatcatacagattatttcgtctagcttcaaaattgagcttaagtttaaataggctaaacttgtacttaaaattcatccagtaagctcccaataattattatttttcttttaaaatataattttaatattttcacatatttttttagtaattgcctaataatatatattttttttttaagatctagtaaatttcagatttgaccctgtcttgacgatttatttaagtaattattctgataaataatttaaattgcatacttaacagtgcaatataatcatcatatatatatataaaaatataaatcttcaatagtgtatagttataatttataaattatatcaattcaccatgctgtgttgccaaagaaaagtaggataagcatcaatttgattattattgagaaacattacatctttttatcatgtgcacacataaagtctacaaattaaagtaaacaaactttttattactataaatatttatttatgtataatacaactaaaattcttgtaaggttttcctctaaaactctctatagaattttttaacaaccctcacatagaaaatattaaagaagaaaaaagaaccctttagtagggttggccaattttgtacaatttatagcttaaattagagaatgaaatgattgcattttattttttggctcttttcaattaaattactaatcatttcattttatgggaatttattttcttacttcattaaccaaatacaaccgacaataaacttcatcaaagtcaaataatttccaatattacaatttaattaattagcctataaataataaattgagtaaattcaaagacagctaagaatgatgttttgtctatctactcactccctacatcaacgcccaaacattaggacaaattagttaaaagtgattggatgcctagaaaattgtctatcttctttttcttttcttttctccatactattttccatgagattgactagagaaaatactattgcaaaagtcatttgtttgtttgataaaagaaaaaataaaagatatatttttttctcttttttttttcataatagtattcgcagtaataatttatagactatgactaattgagaatttttattttatggggcttaattgctgcaaaactatttatagtttctttaaatagaaaatctaattgactttaataaatttatttaattttataagaatttaattgtgatatagaaaatctatttgactttagtaaatttatttaactttataagaatttaattgttataaaaactatctatgggatttttttgttattttatagtaatctataagttaggcctgtcattgtttatagttttgtaaacaaaactcaaaacagatgttttgtattaaaaaaaaattatttttgatactgtaaattaatttaaatttttaaaaaattaataaaagaattgttagtatgtttttggggagggtgatgtactagtgttttgtattgtgccatagaccatgggccctaaaaggataggacacactcaactttagacaaatcaaatcatggaaggttgagcataattaattgatggctttttttttaacatctaaagaaagagactttaatgccaatgaaaaatgaagggaatgatctttaaagtatataacatttcatacatagttctctctcaattcaacccaaatcattatttttattgattaccaaaaaaattatgagaattaaatggaataatcaatagtattttatatttcaatgaaaaaaatgtattgtttcttattaattctcattaaagcttgaatcttgaccaaaaactaaaattattataaaaagagtcattgggcataagacaccaatagtgcttagtattttttaaatgtagggtatttgtaaattaatagcaatattttaattatacaaaactcgatacttaacgataaaacattattagtggcaatcccttttagcatttctcttatgaaaaatagtaataaattaatgaaaagaacaaatatttaatcttcattgacctcaaatataaaacaacaagatacaaaaagctttgcaacaagagcaaaaaaaaaaggacaaattttcacacatatatactaaaaacaaactcattaaaataaacacttgaaaacatgctcttgttgcagatcctaacttaagctcagtccaatgccatagctaaaaagaaaattacaatgaatttgaagtcatgaaaatctatgtcaaattacatatgatcatcactttgagttataaggctaaaacatcaagaaaaggattctcatgaatcagatatgatcaatctttccatagcttcacttacatgcctcattgttggtcttttttcaggactagtttgaatacaagccattgcaatcttaataactccaataatctcgtcgtccttttcggcgtcttggactaaataagagtctaaaacatcagagagaggcttcttctcttcaatgcagagttgaatccaatgaaccaaatccatttcggaagaacctacttggattaagggcaatcttccagttatcatttcgagaaggataacaccgtacgaataaacatcccatttttgagatggtttcaccattttgagtgcttccggggcaatataacaagatcccaagttagttgtggtattagtagtagacgaggcaacggttgtggcatctgaaggtgcacccttttgtgctctttctagtgacttatccattgccattcgactagattgcaatgtgggagatcctcctgcaatattagcaaggcgaccgagtccaaaatcggaaatttggggttccatgtttggtccaagaagtatgttattaggcttcaaatcaccatgaacatacttcttgggactaaactcatggagataaaccaaacctctagcaattcctttcatgattttcaaccgaatagaccatgatagcggtgtgaatgaatcacttccagacctccctgagtacacgaaacgaaaaattgatcaaaatatgaactacagaatatactcatttggtactctgtgttttcaataatgctcatctggtactctgtattttgaaatcgtacatatttagtaaaattttatactaaaaaaccgcgagaattgaaataattaagacaaggaaatgaacacaaatcgaataatgggatatgcttaaacttaccatgaagtgcagtggaaagatttccattggaaatgtaatcatatatgagcaacttctcatccacagaccaataataagctttcaaagtaacaacattaggatgtcttagcttcccaattgcttcaacttcagtttgaaactccttaaacctttgagaaccaccttcacctaatcttctcacagctaatgtttgtccctcttcaagaacaactttataaacaatcccaattccactctttccaagaacaaaagcagaagctttcaaaagctcatcaagatcaaaaccaacttgtgtatccaaagccacaagatcatactgctcaacattttctgataaagtctcagactcatcttttctaaaacacaaacactctttctttcctttcccacctcccttactatgttcatcctttctacctctacaagaacaaatccttgtgtaacaataagagaaaagcaacccaacaagacatatgccaattacatcactaactataatagcaaccacagcactcttactcaaacctttggctttaccactctttccatgatcagaatcttgagctgaagaattatcaggcaagtatggaaatgaagaaggtgaatttgcaccaggagtttgtgatgaacatggattcttcaatggggggccacagagtccaggattcccaataaaagcagttggtcctctattcattagagcaccagtttgaggtattggaccagttaaattgttgttagttaaatcaatgtaaaccttttcaggtaagtttccaagactagctggaataggacctgaaaagagattatgagacaaatcaactgtgccttgtaagctagacaaatttccaatatcaccaggaattgaaccactaaatctgttgaaagaaagatcaagtttttccaaagaaacaaatgcatttccaaacccaactggtaaagaaccagtgaaattattttgactaatatcaagtgttctaagtcttttacactcaacaattgattcaggaacagacccattaaggaaattttgagataaatctaaagtttgaaggtatttaagtttcccaacctgatttgagaccgacccagataaggaatttccataaagaaccaaactttgtaacccatgagcttcaaaaagctcaattggtaagcttccattcaatttattgttccttaaattcaaatgacgaagctcagagattgacccaagtgcagaaggaagaaacccaacaagtttcttctttggaatactgagtgaaacaactctaagctctttactgcatgtgactccattccatgcacaagggttttcatcagaagagttccaattactcaaagacccttctgggtcttctgtaatagcttgcttaaatgacaaaagggcatacccttcaccattcaatgaactcactactccataccagttacacagaatcaaaacaaccaacaacaaaaccaaagactccatttttaagcaaaggggttttcaggcttacctttctaaaccagaaacaaaacccaagttgtgaagagcttagaagaaaatcttgagaagaagagagagagtagtgtgaatggaagaaaaaagggtgtttggagaatgggaaaaggttgaagctttagctagctaagctgagctaaaaaggccttgggaagatagaaaagaagagtgtgtgagttgaatgttgagagaatccagagagaacagagtatttggtttttgggttcagagaaattcccattaatttatcatatcgtatcaatatatcgtgatatattggtgaaagtctgtgcctttttatttgggaccatttgattatatttatttttatgagtaaaataaaaatactctttcttttttttgttctttatgttggctttggctttcttcttacattaatgtccaacggatattagtgtctaatgcttttatttaagaatgaattaaataaaatagatgagaaaagaattaataaaataaagatttttttattcagaagaaattaccacattattcagaagagatatcatcaagcaacaatcttgtactaaaattctaaattggaatagcatataaacctctccattaatagcttgaacaattactagtgagtcaattttaatttcaacatccgaagggttttgtttttttatccagcttaaagcctcctttaccccaatctagtgcaaccataccagtcttactaattgatacaacttcaattagattagcattctgttcccgaatgaccattcccacaccaaaacgatttgcagcttcaaaaatggctccatcgacattgatcttgaacttatgagtaaccagtttcctccaatgctccaaactattactgtaattgacattaagtaatggaccagacttttgattttgagcatttctccaactgtcaaaattttgagaagaggtttctaatttattgaagggctaaattagaactacttaaaattaataacctacctattatattctattccattctctacaagagtcaattttattctatcttccccatcaagagagaaaattaaaaactttaaatttgttttcttggaagatcattacctaaaatcaacacaaagatcatatctacaagatagattaaaatcatcactgtctaaggattaaggtacgtttccgctatttgagtttttctctttgaatcaacaaaggtattctttaaatctttgattatatacttataattatatgtaatatatttatctatggaattgaatcttgttattgcatattttatgagtgatgaaaaattctaacacgaggtgcatgtcgataacccaattaaggaagaatgaggtataagacctctatagttatcacgtggtccccgaattgtctaagctaccgaaggggtgggaatgagcgcctccttcacaccaatagcctccgatatttcatctttcaccactcttcaccatccaactgcttatagacctcgtgtctgtttcggtatctagaaaaaagttttattatattttttttcataatcgcatacattgtagttatacaggattacctaaaaatcttaagtagtttacaataacaaaaaataaaatttaaataattacatatttttaacattataaactactcacaattttttaaaaatatacaagtgatcataaatgattataacgtagattattattaaaaaaaaaactaaaaactttatcgaatcagataaaaaatttaaaaacaatttttttttttttagagagtgtactatagacataaataaataaacaagcctttggcaaactataatttatgaccccacctccaaatgtgggtagtgaatgaagaaaataaataaataaataatgttaataataataatgtggagagtgatgattgcaccctcttgggtttaaaccgttaggggaacataagatgattatggtcacttaaatgtgtccaaaaacaaacactccaatctctatttatttatttatttatttatttcattggaaaacccaaatacaataataaatttatgctatttctttactgtcattcatcatacccaaaaaaataaattaacaaatgcagtttgaccaattattttggttcaagatgattataataaatcaatggtcctgatcttttctaatcttgtgttggtcccccttttgtcacattgtaattgtatcttgtaaatttgtgaattattattaaaatgtaatttatcttgaaaaaaaaaaattgttagttattcaaaatttattgcataatttgtaaatagtaaaaattaatctgaagttagtatgatataatataaaaattatttttttttgttaaatattaaacaatttttacgtcttttattgtcaattggtctaacatgaagataatcaaataataatatgtaatatgtaattattaaaaatacatatagttgcaataaaatttgtatatatacaatggacaaactcaaataatatataaatatgtcaatttaatttaaaccatattttctacagaatcacgatcgtttgtagagacaccaaaatagttaacaacgtacaaataatgcacacaaaaacgacacataggacatgttcttttgactcgagtccactcagtgatacaagacaagtgaaacacgtgtttgcatttcttcaactcaacaaccgcttggtttatcgccgactcatcatcgatttcgaataaattttctaaacaaataacacatttttcatttttaagttcctctcttataataatttggttctcggcatcataatgatgtttcctaaaaaaacattttttgaataattgaataatacgagaacgtttcacattattaacaaccactacgggaagtacaacttcttcattatcataatcgtcgttgtcatcgtcgtcgtcatcggtgcataagtacacccaacaaatacaaagtgttggtataatcatggatataaatgctaaagccgtaagagatatgctgaaaatcaaatcgaaattccatgaatattcatactccattagtgtgtaattaatttgtttgataatattatataatgaagaaaccctaattagtatgtgcgtttagtaaacctaattgtgttgatgcaaatatatatagatatctatattccattttcctaatgttaattggattagtataaacatgtacgattcattggatttttaaaagatgatattatcttttcaaaaaagaaattaataaacatttaaattgaataattttttaaataagatattttaattaatgattataattaataatttgttttgagataatttgcaacatgcactaaccgtatacggaccaagctacgacacatctaattaatgaagaaattattatttagtaaaaggtgtgatcaattttaagaaaaagcacaataatgctctaaacatctattttagagtttatttagggaaatttagatgttatattaatttttgttattttt

SEQ ID NO: 185325 - DNA, 2310 bp, Cannabis indica
aatgcaaattagttattagacttgagccaattcctgcaaatagggcaacaagagtgtgagatcagccacttatcaatgcatacaatatgaaaacggtggttacacttaggcaggactctaagactctctccttctaagaagtccattagacaaatagcacatcctacagccgatgaaggggatccataattattaattgtatgagttgaagttggcaaagccaccatttctttctttttaaggcctgagttaagcctccgcgaggccatccactcgatgggttcagtgaggacgcgcctagcacattggaacacacaatgtaacatggaattaaggccgagagcgcaaagtaaggcgcaaatgattgcagccactattatcatgatgttgagattatttgcagctgcagctgctaattcattgcctccgcatccgtgctcgtcttgacaaggagtggtatttgaggtaggacaaggggagggaggggctgtcctaggcattaggaaggggtctcagaatgtgttgctgatctttaatggttttccaaggagtaagtggaataaagaaggtgtgtttttcaccatgttttaggatatagatttcctatgccttgccccggaatttaaagatgtcctcaatatatgagattttaaggttaaaatatttttggagcatgctcaaatgatggtgttaagtacttgtcataatgatggcatttaattaggccacgtttgttaaactatatgacaagaattcatgatcctatctgatcaattagtccaatcaagatttattttgagtttgaaaaatatataatgtatatatcttattacaaaatgccccttggatgtttgttccacaaaaaaaaaaaaaaatgccccttggatgtgtattcataataatctctcttttacacattgataattaagggtatccttggtcaataaacacggtctttccctttcaatagccaacaagaaatgttatccatgattaggaaaagcactcgaatttattactttgtctttatcataatacattgttttcattttttttttcaatggagtattaacatatgctagacactattgttatattgtatctctttttatcagttcagtgtgcttttaaagccaaatgaaatagcctattatgtacgatgtgtagcatacaaatactaatataatatattcttaagcacgttaatttgctgcaattaagtatatatttttattcttctttcttcgggtgtttaagaattatttttttcaacatgcatagaataaagggtacaaaaagatccaaccccaaggcaaaagggacaattaatattgaagggccgtttttggaggagataatagtgtagtggttgtacgtaataatcatcactagaaatggtggcattggatatgcttatatgcctactagataatccattaatatgttcaccctcaacctttaattttagtttatgcgttctccttcaacataagagaaagcatatctatcgttttctgtttttctcaaaggattcttacaaatatttattggttattccatatcaacatgttcgatcaatctcccaaaggatatttatatcttactcttcgtgttgtaattggtccaataattagcagcttctttatgacacttgtcattgttaagaaagagaatgaaaattattgaatgtggtttactaattatcaatctgactagaaatatgcttcaaatttagtttttatgattacaaagtggaattaataaattaataatttaatttatgcaaaattattataaaattatttgaagaaaattgaaatctgttttattaaaaaccgaacttaataaatcaaaattatactgcagaaattaaaatgacacacggtattttgtacgtggtatcaacaattcttgtagattgctactagtctacgggtcaacacccatatatatgattcattagtcaaatttcaacagtacaaagttactaacttaaataaaacatagactcgctctaatcattttgccacaagtttgatgtattcctattcgatcgctgaatgaatctccttaagacacctaggtttgaactaacttcaaattacttgatgaatgcttgctttctctcaatgcaagacttatagaaatcttctcccgaagataacgctacttgcttcttcccaaaataagacttgtagaaatcttctcttgaagatagcgatatttaattcctcctcaagtaagacttggatgaacttctccctgaggttgttctttatgttcatctctttggaatttacttcacataaa

SEQ ID NO: 185326 - DNA, 2423 bp, Cannabis indica
cttgcaatgacgcacatagttctgaacagattaatatttttaatctcaataacatataaagggaacaactgatttgagtagattattagctattgagaccaacattatatctaactatctatacttgatatagtggtcaattcatctcaattgattgtaaatataaaaaatttgtatacaaattaaaacaagtactagaatacagtcaagaatacaaggataccaaccattaagaataaagaatgatctaaacctattcttctacacacaactaaaattgaaagaatctgactttacaaggtattcattgtgtgtgaacatagtcagcaacacaacaataacatctcattctttgcaatgagcaattcattagttacataacaattgttttaagagtatatgccatgtccaaaatagttaacagaaacataaaatattatcaacatcatatttgacattaatgtaaagtttcaaaacttttcttttaacattggttattatctttaaaagttgcacaaccaagtctcgggttcgagttcgattcgggtcccgggttcgggtgtctaggtccgtgtcccatgtctgtgttcgcatctggatctgggtctcgggtctgagtctcaggtcctgagtctgtgtctgagttcgcgtctgggtttgggtccgtgctcgggttcgggaccgcgtccaagtcctgatcctgagtctggatcctgatcttgggttcaggttttggtctgggttggagattggggttgaccccgaatcctttgtaaatattataatacaagttaatacgaaccatttattatgtattaaataatacaacttacattgtattaaaaattttagtcgtaataattactacaatacattattttatccatacatagtattatttattatttaatacaataagattcttatacgctctatcaaacgagtccataatgttattaaaagtgtattatttcatgaaaaaaactactatctggtacactacaactaaacttttgctaataaactatatgattgatgtaatttttcaattgattaatttaagaaaatcataaaagaaaagattaaaaacatgaataaataaattttaaaaacttccacatagtcattgtcactaatctctgttaatacttacaagtatttctctaaagtttcagttctcaaagaatgtgtatgttcacatgagaccaacctatttatagagagctagccaaactaccattcctaaaaaattagaagatttgttacttaaattgcctatttaaactaaaagtggagaatcaaataaatatccaaattaattatgatattattgcacatctcgaaaccattgaagtagtattttttgagcaagtttactaagtcatgttgtctgagctaatctcttagcttgatgagacgtgttctccaatcgtgccttcagctcgatgatgcaaggcgttcgagcccaatcttacttgatgatgcatagtgtcctagctcactttggcttaaagtcatgttgcgttcgcgcaaatttaggctcaatgacaagtaatgtccgagcccttttaggtttgttggcctaatcgagcatatttaggtttgttgacatgtactattcaaagcctatttaggctcgatgacaagtaatgtcgagcctttttaggcttgttgacatgtactaagcgagcatgtttaggtttgttgacatttactatccaaaccctatttggctcgctgagtatatgaaaaacgagttacccgagcaatacttatgcttggtagttggtacattcttgacattatagcagagccaacaattattctacatcacataaattctttcttcttttctaagaaccccctttaaaaaaataattttgaattttgaatttattaaaaatggtaattttgagattaattacataataatagcatattgccaaccaatatagatacgtatgatgtccacatcaaagtgaacaacttgggctcaggtcttagtccaatccattaaaaattttaatatcacacatatttaatcaatgtatttttatgaaagaagttgaaaaattacattttttttttattacattaaccaaatatacctctaaataaaatttaaatcacgctcacatcactaaaacataatttcaaatataatagatttgtgttctttgtagaatgtgtaggtttgtgagaaagttgggaaaaaattttgattagagaagaatgaaaactatagtgaactgataagggtaaaattcgtaaaatgattaaaaaaagaggtaaacataatagattttaaaaaagaagataaaaattagagacattaattaaaagaactaatgtagtgtaatttcttctatttaattttgttgttttacagttatagtatcataatgttgttaattaattatcta

SEQ ID NO: 185327 - DNA, 3542 bp, Cannabis indica
accaacctcatacaccccaggataaagccacagcactgttgaccaaagtttggatttcctgtaggaaaaaaaaatatatattttcatatgtggtttagttcctaaaattactaatgttgaaaagggaaaagaaaaaagctaatggaaaaagaaaaaagagtagcaagcagaaaaaatttcaggaaaataagacatgctttaacttttaagcttttcccatgcctgactttaataattatataactttgataagaaaaaagatcgattatagacctggatccagagggatccgtagcagttgattgagggtcttgatccattttaatacaatgatgccaaccattaaaggtaccagttacctccacagtttcaccatccccacaatatgttatctccacctgaaaagtaaattgatttgtcaatcagaacatataactgaaattcatgacatacatatattcaggaagaaggtggatgtgttaacctccactagtcctgaaagggtttcttcagcagcttgtaattctgcatctttttcaaaaatgagtttttgggctttactgatttctgtttcagctttggcttgcaaaactgacaaatcattctgaaaacaagtaaattacagaagacccggttattatttcagtgaacagttcaattggtcactattattactagataatagctctcttataaagtttaaaactttgtggatggaatgcctcaacatagctagcagcgacagacatgaacgtagtgagtgtggatataaatagcttatgcaccttttgtttctcaatttcctctctcagccgagataattcctgttccttttgatgctaaacattgaaaaaaaaaacacaactattagtagctattgaagtcatctctaacaaaaaggtagaacttgataagagcacgaccgcaaaggtacacgaacatcagtaccagcaagaacttaagctcactaatcccaacaggcttcccctttcggatagtctgtatacatcaatgagcaattatataaataaacaataatagcaccaacgccaagaataatgatatcatacagacaaggaatggaaaacaagaataattacctcactatcccaatcattattgaactgagcactttcttcttcagctgataaattctcatctctgcagagtaaaacattgaaagaaactacacttgaggaaaacattttaacccaaggcatgacaaataaacataatcaactgtagatgactaatgtagtaatgtgcaatatccatttccacgagccatggacgaatttaaggtctctttacttaatgaattgcaaaaggcatgattaacaaaaattatgttataaacagagacagaaagtaaaactactgaaagcaagaagagaaaaccaaaaatataatttggtagagatgtacagaaaaacgaacctaagagaacagttccctgctacagcaaccacaacttctgtagattttgttgtactcccattcaatgttatagcctcatttcctccactgagcacattttccgagtgctcagaggtagaagccgcagcttgaacttcgtctgcatccacacattcaatatattccgggcttttttcagtaccagtctcacttagtatgccataggaatcatctgataatcaatactaaaacttagctttctcataacatcatgttgatagcactgacacacaaactaacaagctaacacagaatcaaagataacaaaccttcaactgtatctagatgtccatagtgcataaaatttgccaccttttcctccaaagataaagctgaaagatctacaggaacagaactaggttcatctgaattgaaatctgtgtccgtgtttgagctgttgagatgtttttcagtaatcagagttttgttttccaaggtaaagtcttcggcattactgttatcctcaatctgcaagttttgcaagatcttttcctccactggaaaaatatcagcagattctgaggctgtgttcaacattccatccccaacagttaaatcatctcctcgattgtgaatgccagtattgaagcccgaacttatattagaactaactgagtcacccttctcattgtcaacttctaaactatacaaggatgcttctacaggtccaggcttttcatcttgaacatggttttcagagttgaaaactggagcaatacttgaactagctaaatgattttccatactggaaacttcatttgctaaagaaccatcttcatttatatcatcacccttctcattgtaaccttctaatccttctacaggcacatgataatagtcatctgaattggcatttacatccataaccaaactgctagaacagtttccctccacagaagcttcaattgatgatggaaaatctccaaacacaacgctgtcctcctcatcctgacctttttaaatagtaagaagctatcaacaactgtttcatgtgccttttaacatatacaaaaaaggttcacaaacttaaaaagatactttgacgtgttaccttaacttcaccatcaccatctactgcatctttagtttcatttccccttttctccaaaataaacccttcagaatctgttttatttgaacttgcaagaagctctccaatcactttataccctcttcgcctaacaatgtatgcaagatcactcctataaaaaagagcttaaatttttgctcgaaatcaaaatacatatctgtagtgtacattggtcaattcaacaccttaaaaataaaatatttaagaatcaaaaacaaactaaaactgagaagaatttccaagaagaaacaaagcaagaaccttccacgctgggaaaaatctttcatggtgggtacatgactctccggtagtccaaccacagccataaactctcgtatttctctgcagagctccacattgtctttcatttttctacatatattttcaacatcataaacaaaaacattgttttcttgaaccaaaaattaacaaacccaatacaagaaattcaagagtgtatataaagaaacctggatttcttaacagaagatactcgaaatctgcagcgtttgtgaggtgggttttgttgggtgtaccgggctagcttcagttcttgccgtttatttgggttcaagaagaagagtttatacgggtgaagagagttaaaggttgggaagtggtaaagggtggctgccatggataactggtgcagaattcaatactcaatcaagtgttgtcgttttctattgtttattgattgataagggttgggttgggagggaaggagagggagaagaagaggcttagagaaatatcacacacacaagctttcactttacaaaacccaaattttgtttgttgctaagctattgctcataccattaaaaaataaaaatgctgttttttcgagttacggtctgaacaatattgtaccgttgctatttgtgattctactgtgcccaacgtcactactcgcattatacttgagtatttctatgtagttacattttagcatttttttcagaaaaaaaaaaaa

SEQ ID NO: 185328 - DNA, 3543 bp, Cannabis indica
aaggggtttgtgcaatgtgagaggaaagtggttcaaatcctaactcgagtatgtgtgtacttttttttaaaatcaatcgaatagaaaaagaatctcataggtttctttgaaagcaaacacttagacatcaaaacttaccgaggtttctttctctttcgaaataatatgcagtaatcagaaatgttggactcgtgatcatcattttcagaatcgtccccactactgtcatgattttcagttacagacctttttttcgtataaatatcttggtctttaagaagtttcctttgaattcctgtgtttgactttccttcattcacaagatttacatcagaatttctaccatatgcgttatgtggaacttcattctgttgtccttcagttcttgcagatgggcactctcccgccatcttttctccaccttctgagccatgacacccacctctattactgtcattattattatgctgtgcagaaatttctgcttggtcgactttaattttttgacattgctgatcatcttcttcatttacactaagttccacaagattgccttcatttttctctcttgctcccaagtgttcattttctagattttttctaagaacatcctcatctgcatttcctccaggagaatgatttatttccttaattaaacttctggcggattcttttgggtaacgtttggagcccataagaataaatgcagctagttctttattagccactgaggatctcttcttagcttcaatatattccatgatagcaagagaatatgcacaaaaagggcagtagaagttacccttgtcatcaaattttgctaaagaacctccacatttctcatgaattaccaattggcaattattagtactgcaaaccaacaatgaaccagctttattgcacttcatgcataaatatttctctgtccagtcaacaatcaaggaatcacgaccaacagtgcactgcgcttgcaaaaattcaagttttttcttgtctacatcaaccatctcattacgatatccatcaatatcacatggcatctcttcttccccacaatcatttgtgttctctttggcttcatcagcaataatattctgttgatatctgtcattggacataggatttcgctcttgaaatggaaaatcatgctcacggatacgtttagattctttagtgggaattttatccacagtaccgtgggaaggaacaccaattggttcagtggaaggatcacttgcattattggtgccgtcaacagatagattttgatgggtgtcatctctggtagcgtcttgcatcaaactaggggcatcataaaaattctctgactgattcttataaatttcatcaccagtaatcggctgagacctgtttgagacagtacaatcatcctctgtaagctttggttcctccacagggacctgaacttctaatttagaagaatcttttgttggttcttttccatgcaaagcaactgagttctgctccactggctcaaaagcaccacctaattgagcaaaatggttgctgacaacatttgcttcatcaacagataaaggctgattggcttcatctcctccactattaattttaggcatcacaggggaattacaaggagtctgcaccatatccttatttgagtgatcatcgttgttcttattagattcatcatcaaaaccattctctaaaaccctgctttctcccatggttgccagctcgttttcaggcaactctctggtagtaactggagcatctcttccagatgaatcttctaatgcctcatttccatgaagaggaaattggttctgttcaacaaactgactgccagaagattcatactgcttcaacctttttgcatttgtatgttgaagctcggaattaagttcaccattgcaatcttcatgaacattacaagccatagcttccctagctgacccagacctgtctctctttgtaggtaatatagctcgatcatgatgattttctcccagcggtttgtttctcttctcaggaatcaaaatatcagggttcacttcattttggacatcagttccagtaaaacaaggcctagtagtaacagaatcatgattgctatcacccatcaaattagcatcttccaaacttgttgccaaatgacccttatctctcaagaaatccgcatatggatgagtaccatcaagaattgcatctttcagctgtttgtaaagagagacccaagcccgatacaaacagtggattaaaaatcaaaattgatggataaaaatagggtgcaaatgaagacaactcctacctgctccaaagcacatttgggcatacaagctcttttgtgagcaacgaatggttgaatatcccatcttgacaactccattctcgatattcttaaaattcttcctgatgtctgaaaagccaaggaatgcgacacttgaaatcaatataaattctgtgttagaaaaacataaaaagctcacaacttataggttacgatttcaaactccatcagttctgaaatgaatccaaagcacttgtataccaacaataaataaataaatggaactaacatcttccactatgcgttgaagaacatcttcacaactttctgacaaatcaaacccaactttcaaaccctgggcagaaggaacatcagaagcaatttcatttactgaagataattgttccaaacatctcaaagcaacaatttctcttgtattctttcccaaaccatcaggtaattccggagccgcttccatcacatctggaaagaggaaccaaaataagtaactaactccatccttttaacttgcaaactgattcaaatgacaataaaataagctaatattcagataaaatatgaacacaagatttcaactttaccacataaaagaaataggtccacttctttgaagcttgccattgcttcaatgagccaacgccaagcaagaattgactcggacacattcatgttgtccattaaacccttctctcaaaagcttcaaaacccaaaacaagtgttattcaatgcctcattgacattaacagtcactacaaaacatacaactaactaatccatatgataaaagtttcacttgatgaaaaagaactgattcaattagtcaaacctattataagatataaatttaattgccattacaatataaaactcaaggacagaatttcttttaaaagaaaaaaaaatggagataaaaaaaacacagcttcccacaaaagcaaaagaggaaaagttgattaatttgaaatttacaatcacagaaataattttccaaccctaacatcaatctagaagaatcctgagaaccctatttctttaaaaataaaatcgagtgtcattttcgctacgttcctctacattattatatatttgttcagtgtgatttacgagagattattgattgattagaaaaggtccataatgataccttgaaaaattataaaagagaagataaaagtcaggtagagacagaagcagaattcttgaacgtcttctccaacatttggcttcaacactgttctctctctctctctctc

SEQ ID NO: 185329 - DNA, 2250 bp, Cannabis indica
aaaaaaaaaaaaatcagtttccacaaattattcttagccgttggatacaattaatagttatgagtaacatggtactctcttttgttaggcgtgaacccagatataagagtattgtgttagcaaattagcaatgttgaagaccacataatcgaacaaacctgcattaggattttcaagaataataagataagaaatatacatatagacccgtgaatgcttgtcatacaaatgtcaagaagcacttcctccaaccctatttccttttggcattacacacgttaaagcctccaccattttccatattggtcccatcgtacatatatattatataatatatacataaccatagggcgcttcttatagcaatatacgttattttccctcttttttaataaaaatttagtgaaaattacatattttgtagagttttatatatacactgtaaaactatattttttaaaaaaatatatacacatattaaaaaaaaatagtataaggttcctaattaccttaaagaagtaactagaattatccctctaacaacctataaaataattgattatcctaaactttttttctatatatttttctttctgggttttttttccacaaaataactttttttaaaaaatcataataatttactcatgaaaataataataataataataataataattttgtaaactttgcgaaaaaaaaaccatagttttttttttattagaaccaaagtattattttattcagattataaatatccctacaggccatgtgcgcccacatataattactcaatatacatatttatttaaaaataatggatacttcactttaacattatgggtaagaagcttttgttttttcttcttttttgtattttgtttttacgaacttcataactgttacttatttgaagttattattattagttttaatatagacgaatagagattcatcaaaaaaaaaatatatagaagaacagagaaagagagatggctcagccacggtgctgttggtggccactaacaaaactagtactatttcacctactgataaagtcagccttttctgggtttgagcaagtaacaacaacaccaccattaccgattctacctctgccctcattttcccagctcaaatggcaacaaagggaggtcataatgttccttcactttggcgtcaacacattcaccggatccgaatggggaaccgggcacgaaagcccggtcatattcgacccgattgagctggacgccagccagtgggtggacacggcggtggaggctggagtctcactggtaattctcactgcgaaacaccacgatggcttctgcttgtggccttcaaactacactgatcactccgtcgtaagaagcccttggaagaatggccatggcgatgttgttcaagagcttgtagatgcggctaagaaacgtggtatcgacgtggggctttacctttccccgtgggacaggcacgacccacgctacggtcacgatttggcttataatgagtactatttagctcaactacaagagctactcaaaaggtaatccggtttatatatctatcttctaaaatttatataataagaaaatttggtaaaatgttttgtacaattaagtttctggtgttgtgtaggtatgggagtgttagagaaatctggttcgatggtgcgaagggtgcaaatgctgtgaacatgtcttattatttcacggaatggtttgatatggtaaaagaattacaaagctcaatcaatatattttcggatgctggtcctgatgtcaggtgggtcggaaatgagaaaggctttgccggaagtacttgctggtcgaccattaatcggagcaaactagccatcggaaaagctggcattgctgagtaagctaattactttaactattatttatttttacatatataaattctaccttaataatcgctaaaacatggaaattgaattggagttctatgaggagatcctctcctcgcaaattcatttcaggtggtctttgcgaataaaaatataaaaatgggaatagaataaaatggaataaattaaaatgcatataaaattaaaaaaaaattattaatttttttttttactataatgcattagaatagtcgttctttctctttttctattttaaaatgtaattatcattctactaaaaaagtaaaaagacatttctattggaatggcattccaacgctttaatatgtaaccaaacaaaaaaaataaataaattg

SEQ ID NO: 185330 - DNA, 1970 bp, Cannabis indica
attttttttcttcttaaaaattaaactttcatgggaacatcactaaagcatcgttaaacatcgtattgccccctcccccccaaaaataaatcatggacaatcactaaagcatcgttaaacatcatattttccctataaaaaatcatgaacaatcagtaaagcatcgttaaatattatcttttcgcctaaaaaattaaattttcgtacaacattgctaaattattgctaagtattcatagaatattgattttaattgagaattctgcaatttttaaaccatctaaagcaggcacaaaactaaaatattgtacataggtattcaagaatcaaaatccataaattcgcgtcgcaagtgattttatttttttaatcataaaaatggtaattcaataaaactgttaacgaacatgagtgttttttctttcccttgtgactgtgtgtggggtataaaggaggaatgatagaggagaaagaatgtttgaatggaagatgtaatcttgtctaatttttacaatcacataattttttaataatctaaaataagatgtgtattcagtttctagtgataaataattttaagtggagactgcataaacatgataaatgctaaagggcactagcagtgcctagcaccctcctatgtgtcaatatcgctattggtctaattaagtatcggatcccatataatttaataaattagcttttagggaatatcgctaaccaatcgcaacgtgacatgtcgaaagggtgctagacaccactggtgcctaatagcaatattcccataaacatagctaattatacataaaaagtgtataattaagtatgacaatcattactcttcaaataagagaagtatcatcggaacgcgtataaggtcaaaacaggatttttgcatttgtaaattgaaaagagaaagtttgggacggaagtttcttggtagaaatgttaaggtgtcgttggacaacagtttggtttaatcatacataaaaaaaaaacttgatggtgatgttcaatacttcaatcatagtatcatagaaaaacttcaagcaaagatgttcatctctcaaactagtaaagatcatggagaaggatttatattatacagtatatacttttccaattcaacaaatatattttggtattacaatgaggtggtacgaggagttgaggattttcattttctggacattttggaccaaagataaactaaaaagaaacaaaatagtgcaaaaagaacaacgtggacaacattgtttgctccattttgaatgatgctcttgttcaatctccttacgttgtttttcacccctgcttgagctttgatcagtgtcatttgctgtgaataaaatatgtaaaatgagtttatcagacaggtttgcatccatttcctcaagtaaaatgcaaagtatgaaacagggagacacacagcctatcttaatttggtcataatgttataataaccacgctaaataaacccatgaagtgacacctataaatagaccactgtgaaaaaaggaaagaatagaaaaaaagaggagcctcatatgtatgaagcacattcattctgagaccctcttaagttcctatgaatatgtagaaattatgaaatcaatcacaatcacaaagtcactgggtgacaatggcaatgacatagatagtgtaatttaaaataatcagttttagcttccatacatccaacaatgtgttaaaaacatgcatgttatccattcataatttcaacatactataaataatgaccatgtaaataactattaacccctcctcacaaaataaatagaagtctatcccataaaattcaagatgagagaagagaacaaaagatatttttcaagcaatgacaacaaagttttaaggtgttaccagctgatttagaaaatcattttggaattttgcttctgtcccaatctcttgcgctacctgcatcaggataaattcagcaatatgga

SEQ ID NO: 185331 - DNA, 958 bp, Cannabis indica
attttttgtgtaaaaatttcaaattttaatcactttttcttagccaagggacaaacagggcaaaaagaattatgagatttagaataggaaaaaataatttctttattgatattttgtgttatttgcatagcagggtgtccaaggcgattatgccaaggagcagtacaagtattaattgaaatttttgaaaaaatggattgattatgaggcaatatgtacagcttgccatgctgtttagcaatctcagtcattgtagtctgaggatggccctgaataaaacacacagaggaggtaaacaccaagcagttagttgagctggcaagaaaagctgccactgaaaaaatgtttagtttaaattgaggaataaacaaaataacttgtaaagtaatatgctaattatttctaacagtaccagtgtcagcaatatggacatcctgtaggtaaagtcacgctatgggtaatattggaaaaagattaaaaaaaagatggattattgcatacattgtgggtagcaccactgtccactatcaagtaagaatttggatggattttaccagagaaatttgagaccatgggtgaggctttaggttgaggagtctgtttgagggactggcagagcaaagatatgagctcttgggcctgatttgcagtcactgctaatgagttggggtctggacagggattggtggaagttgagggagtggcatgtgtattattgatcgatggtttggagacctcctcagatcgtttcttgtcaccatatccaggggaaaaccatggatgaaataacatttatcaacccagtgccttggtttgtggcagttggagcatgttagtcttggcttcttggaatgtggaccagggggctttgaagccgcaacaatgataggattaaagccaaggccacgttgtttctcctcctaaacaatcatagaaaaaatagtagacaaggggggaa

SEQ ID NO: 185332 - DNA, 1282 bp, Cannabis indica
aaaaatagtagacaaggggggaatagagtggtgaagaaggatttgggctcgaacctgagcataggactcattgagacccatgaggaattgtaaaatttgatcccgattttagcagtcttggattttgttcatggcaccacaagtgcaggtagtaaaagattggaattcctgaagctcatcacaaattgctttgagacgactgaaataagaagtgacattagaatcaccttgtttgaggttggagagggaggtctgaagctcgaaaatccttgtaccgctgccttagttgaagcgatcatgaagttcattccacatgtcaacaaccttgtcttggaacattatattgggtccaatttcaggggaaactgattgaagaatccaagccataactatgttgttgcaggtgatccaagaactgagggtgggatcgtgagcaggaggggagagagagtgccatcgatgaatcttgttttgttcttggctgcaatagagatcgaagcagctcttttccaagaaaggaagttttcttggcacgttaggggtttaggaatgatgaggtagccggggtgatctccattgttaagatggtagggacttttagggtcatcttaacgaggacgatcgagaccaacacctagacgattgaagaaatttgaaccgacaccatggccattattgtcgacagtagatgtttatagaggaggagcaagaggtggatctggcattgcaggttcctgagaagtgggcaaaacatcatctggagttgtggacaggttgacgacaatgggaatgggcggatctacggccagaggaggagctctgtaagaggagggtcctgaagaccgagtacgtgccattggagaccattggagaagaaggtatatgagtggaagactttaggtttcgtctgataccataacagaaattgaagagctttatttctaagaaaaagcaagtaaaaaagtgattacagaggagtaaagggaaagtcccttttatacacagtaggtccaacaaaaataaacccaatttaaaagagattttcgttagaggctagcaaatttagttaggacaaaaaccaaaaactaacatacgtacctaaaactaacaagttagtacaataaaaatgttaatattaccgtgtcacaatataaaagtaagaaactttagaaaataatataccatataaaaactccaattagtttacataaactcttgttcgcggcaactatatacttctgacccatataattatacaaaacctaaatgttttttttttaaa

SEQ ID NO: 185333 - DNA, 3622 bp, Cannabis indica
gtatgcacgtaagaaaagtcctgcataaatttgcaaaccaaagaaacctagattaacaaaaataactgagaaaaacaataaccgaagtttatatttccatgttgaacatatagaacactagaatgaattagaggcaacaaacgacatttaagcttatattggcatcctaaagaattgataacaaaccaccaatttctacgatctggtttatgccataatcatgggagttagtgattcactacaaagtaagaatggtaaacaattggaaagcaggtccaaaattttaggaacatacgctcattaaaaattataatgcaccaataggaacatatgtttagggacatatcctcttttaacagtaaacaagtaatcaggacaaataggctgcatacctgcaaagaccatacacggatagttttatcaaatgaggaggtaaaaagaaaaccgcctacagaaatgaaaaaaaaaaaaactcaaaaaaagaagataatgatcagctagagatacatgcaacgaatcggcccaatcatcaaaacaccataaaaaaaataataatataataatataaaataaactaaacttttgatctataagttcactgacaccataaattatacctcccacagttattcctgtgatacagtcacgatgtccctgcagatctttagacttgaccaatccctcagaaaggccatcaagaaaattcttatcagctctatcctgcttcactgaaccaaaatctccctcaccaacctcttttcttccctgcaagttgtcttcttttggcattgccttgggaagttgacacatttcccctataaataaacaacgacttcttccaacataaacttcctcccccaaatgcaaattagccatatcaaattgaggtttagctatcagttccctaatgcatttcctcacttcagtcaagtgtgggcgacatgctggatcataagccaagcatttcaagagtatatccttcactcctgcatattctgaaaccaatggagtatccaacaaggaactaactctttcagtccagattgaatagagtctcgaataatcagaaccatctttttcaatcatcttagggaactcctcagtgaatgcttttccaataagaagtctcagcaatagacaagctaatgaccatgtatctgaactaaatctaattgaatatctagacttctcatcctcaagtacaataccctcactgtgcaacaattcaaccaatagctctggactcacgaatgtattatcttccaacagattgcttatagccacatccaattcttcttcagcaatggtattgcaaatcttcctccccatcaccaaaaccccattcaagtctacatatgcatgaccaaaatcatcaaaactaaagcacgaaagaccaacacaacctgcaattaaaccttctgaatgcaaactaactagtgactcaataacttcagtgccaataaatgcaaaagcatacaacccatctttactcagaccattcccctcatcagagtcaagttcatttttcaagacccaaaactcccattcattctctcactgacaatatacaaaaacccatcttccaagttcccccacaagccataaactttactcacccttctactttgcctcaatgaagctatgagaatcacacccaattcgtctctctgctcctcactcaatccactcaagcatttcataactcgcacaacataactaagtttcaagttcgaatcatccaaaccaggcaaagaaacaacccgaacaagactcaccctctgatccttcccaaaacaaaaccgaccagtacacagtgaagaatcaatattaccaattctcccaccaatcacagaaacagcacctcctttttctccttcatccaccaaaacggcttcttcggggaggatccagtccttccacgcagagtaaaactcatcagaccaaaacttaggcaaaaagtcaaagaagtgttcggagggagactttcggggatcgtcaaaggtaatagaattagggatagggttttgggaggtacaaagagagaggagatcaatgttcttggggagaacagaagggccttgaggagggaacttgacgagttgtgtacaagcagggcatcgaatggtttgagggaagcgtgggggaagtttaaggagacaaacctcgcagaccgagtgaccgcaaccgagtacccgaggaatcgtagcgtggccatcgtagttttgtaagcagacagggcattccggcaactccattatcaccgaccacgaccaccaccctcttccgtcgttcaattgtatgtaatgtctacctaattcaatacagtcttaaattttgaacgataaattccgtcgtttttccatgacaatagtcgtttgtcgttttcaagataactgtccttttctcagatattttgtcgtttatagaaggcagttgtcgttttccaagaatttgtcgttctaataaaattgccgtactggtcgtttaccacttaccaaataaggaggagagcagactaaaagaaaagaaaatgatatttatttgatttcttttcacatttgtattaatttaattttattttcatattttttttattgatgtataattttatttaataaattttatcttaatttttttatcttaatgtttaaaatatatcacttgacacaatgactcttatggatgaaaaaaaagtataaattaaaaatgattggggtcgtttgtttattgttgggtttttgtttcttttatagattgtgattttaaagttgtgatttctgtctattattgtgctgtgagtgtttccaagtaaaactattgttagatcttttaggtttctattatttattttttcatttcttcaataaccaatgtattatttcactctccacaataaaattaattattatattaaaaaaattattgggatcgttttctgtatttgttgtcgtttcctgggtgtaaaggcttgatagtatatgggcctatgaggcccattatatgagtttaggcccatatataattcctggagacgacaatgtgtccatgccgtatattcttaaggaatttgctttcgaaattgaacaggtgcagtgcaggctccgttctcccaggaggacaaaactcaaacatcagaactacgcttacggcgaagtgagaagcaactcttttggatttaaggtatgttttattcaatatttcttactctttaatctcaacctctgttattaatttccttaacttttcctcacgttttaatttgattattgatgatcgagtcacactctacgagcgtaattatcatctgggtatttgttgttttagtttgtttgtatgtaaattatcgagtttaaggccaataaatagctgaataagatgttagatagggcctttgagactggggtgaagaacaatttgatgtaccaaatattttctttggcctgaactaaacactttcgagattatattgcaatatacttaaacggatgtacatgttgcttgaaccaagtcatgcagaggaattttatgctttttaatggtatgaaagtgtgttcattcttgtggaatgaccgtctatttttaacattattatttgttagaatccaaaaagggaaaaaaaaaa

SEQ ID NO: 185334 - DNA, 7647 bp, Cannabis indica
ttattaatcttgagaaataaattgaacttaatctttaaataaaagaaaatgaactaaacattcatcaaattcataaaattacaaaacttctcaaactcttataaataattatctatttttactaactcattttcaaaaataacaataaaataacccattctccccattagaagaatccacattcagaaatatgtcggcaacttcaccgtgttcttacacgtggcaaacaaattcaactacaaaattaacatcaaaaagaaaagaaaagattttcaaatttttttaggacaatgaaacaaaaggtcacacagtgatttgtccgcctgataatccttctttgatagcaaacaacgtactcactgccaaaaaaagaaaaattatgcgttccacaacccagaaaactcaccaatccaatctgcaaaacccatttcttcttcttcttcttcagagttgaattcaaatcttgcatttcttttttgctatctagtgctgaacatccatggctttcattctaggtctggttctgggtatcacttttggtctcgctgtgatcgttggattcgtcaagagtgagaatcaccggtccaggcgccggtccgaactggcgaccactgttgccgcttttgctcggatgactgtggatgattccagaaagatatttccttcggagttttatccttcttgggtttcattcactcagtggcaaaagttgagttttcacttaattttagtcttttaatctctggatttttatgaattttttatttgggggctaatgtttttgattttcccatttggattttgttttttaacagttgaaatggctgaaccagcacctttccaagatctggccttatgtcaatgaggtaactctttattttttcaagtctaattattgatttatgttccgttttttgcttataaatggtaatgcatttattgtagtacttatgaattttggggctgtaggcagcgtctgaactgataaagactaatgttgagccggttcttgaacaatatagacccataatactctcatccctcaaattctcaaagttcactcttggtacagtggctccacagtttacaggttagtttattattgttgtgcgtttgggtttccttttccttccatccacactttgcttacaccagatttttttgattaaaatgtggtaatgtacttttgtcaacaatattatgctattttaggttaaggatttatctttttatatcaaattttaatcaaatacttccttttaggttaagttctgatacttgagtaaaagaaaaggaaatgaaacaaaagggaaaaagataaatgaatcttgtatttgtttatgggtcttagtaatagatgttggtcttaattaatggacattaaagataaacttcagatgaatatatcaagaattaggattcttatgtgaactaattttgtcattaggaattcgaattgttgaagatgatggagcttctgttatcttggatctggaaatgaagtgggatggaaatccaagcattgtacttgatattaaaactttagttggcgttcggctgcctgttcaggtttttgaaacttattgctttctcgcctctttgattaattattagtactttgtgaaacagagtgatagagaaccttgttaaagaattttctcaagtctatttagagcaatgaatctgcgtatttgtttcaagcttatgttcgatattttggtatgtaagaaaaatatgtttgctcatgttaggtttgaatgtttgaaaaatggaaaagtggatatcttgtgacattttctctatgaatattacagtagtccaatatcatattatcacataaatttgattaattaagctcagtaaattataacttattctaaaataattttactgtatatgttcataaatcgcatgcagcaatcctattcggacgactagaatatgaattaattcctttggacatgtgcatatacagtatgatttcataacaatgattatttactggaaattccatatgttcattagctctttgtaccagggaattgtaattgtcacctcttcaaatttcatgatttgtcccccttcattcaggttaaaaacatcggattcactggggttttcaggttaatattcaagcctctggttaatgagttaccgtgctttggagctgtttgttattctttaaaagaaaaggtgcagtcttaattttgttagtgctagtagtgaagctgtagacattttacattcatagcattatgttaaaactagtgtaacataatttttagattagtactatgtatgtataaccataaatggagttagttttatttcttataaagtttggttgaaaagtattcattttctaagcctgtatgccgatttctgatttgttgcatgatgttaaaagccaccacagtgcaaattttgttcttgggttcacctcagacaatactattaatcgatgaattccgcctcgcttttagatacacacatagactcaacatatacacacatggttttatgaacatctattgttattcttttttgtgcagaaagatttggatttcacgcttaaagttatcggtggtgacatttcagctattccggggctttatagttcaattgaggtttgattacatttataaatactctgttaattcatcggtattgttgctatgttaacatcgttgccattggcagagttattatggtctttttatgtctcattgtctaagtttagattggatgggtctctcttgaagtatgttgtcaaaaagcaatcattgcatttagtacactcatgcaattcagtgtcagacctctaagcttatatttatgttaacgtcaaatgtacttgaaaagatatgcggtgttttatcctctcataagcttacattcagtgctagtgtaagcttttaagctagcgtacattctttgattctgtggaatactagatattgaaaacaatatttgtaaattctatagtagcatgtttacatgtcagatttgattaatttcagtagaaaaattgacaatcctcaacttatattgttggtttagaagcaaagcatcaccagcattgtcattactctgcgtatgcacaattctctttgcatctttcttgaaattcaacttggataaaactaaacaacatactggcttttttttttttttgataattgagcgaatataaaaatctagaagggttaagtgtaactgtcttcctttgctacgggttttacactttatgtatggggttaaatatactgcatacaacacttgtgaggtgattgtgagaagtagatattcaaggagggagttggactgtgacatatattttggttgtttggaattgatttttgtgatcatttttttacttcaaatggttcataatttttctttgcattcctctttgactgggaatcatttgccacagtgacaatatgaataagtgaattgaataaaataaactcatttttcaaaaactgagtgtaaattctggtcaactgagtaattgtgatggttgttttgcaattaattcttttgaaaagctattgtactaatatatctgttcattaattttaagactggtatcaggttaattgctcagtaaagaatatgcaattgtaatgtttcataattatttgaattacttggtattgtttcatacttttgtataactgtgatgcctctagttcaatgagatgtttatatatatttacaggggacaatacgggatgctattgaagatacaatgacatggcctgttcgtaaaattattcccattattcccggggattacaggtaaataccaaagataactttttatgtttaaaatttttctgtgctcatgttgattactatgggctgttgatatttatgacctaatgtatttctgtgtgctattcagcgatcttgaattgaagccggtggggacattagaggtgaagcttgtgcaagctaagcagttgacaaacaaagacttggttgggaaatcggatccctatgctgtattgtatatacgacctctacgtgaacgaatgaagaccagcaaaacaattgtatagtaacttttttttccctttataatcctgtttttgtcctctttatacttggtttaacaggttcttacattgttttttcagaataatgatttgaatccaatatggaatgaacactttgaattcattgttgaagatgaaactacccagcacttggtggtaaaaatttatgacagtgagagtcttcagtcatcagagctcattggatgtgcacaagtgcggttaaacgaacttcagcctggtaaagtgaaggatgtgtggttgaagctggtcaaggatttggaggttcagagagataataaaaatagagggcaggtaactggaaggaggctgagcactctcttatttttaccaccataatgatatcattttcatttactagtattaggtcttgtgaaatttggacagcaaaataaaaatagcagtcgaacacgaacacgaataatcacatactagcaaattcattctggtatgagtacccataacaaagcataaactctcagttgtaaaccctctgccaacaactgatttcctaagagaaaccttcggaaacacaaactcacagcacaattatctacgtcaccctagtaagtgttaccctgtatacccttgtgcctagagtgcctcaaacgaacttgtggtagcatctttatccggacaaattaggtggctgcaactacgatggcgaaaccatggtttctcattgcagaaaattctagttgcactgctgcaggaatctctcaatcatctaccaatttatgtctttgatcaatgtcggtgctgtctttcccttaaggattttcaagattttttatttttttaaaatttattagaaatttaagtttgatgcagcttgtttcatgcgtacttttattaagcacttactatcatcctaggcatgggagagtattacttgagatttagtagttataaagattaaatgagttagttgataacctggaactccggtttatgtatattacctaaaagcatcccatagatcaacatgcgaacgtattcgaactaggattccagtatgtcgtgactcgtgaatatattttgggcgtgtttcatttacagtataaatatataaaaataaattgtaggtacaattggagctattatactgtccatttggcatggagaatggcttcaccaatccttttggttccgactcctcaatgacctctctagagaaggtccttaaaactggggctaacagaacagatgttactgaaaatgaaaaggaaattacacagaagaaaagggaggttatagtcagaggtgtactttctgttactgtgatatctgctgaagacttgccgcctgctgatgttatggggaaggcagatccttatgcggtgctctcattgaaaaaatcaggaacaaaaagcaaaactcgggtaagctatggaggatataatttacagttcactgatatttaaaaaactatgaaatgaatctttttagttatgaataagcctttatgacattcttttcgcatctgtatcatatcttaagtgggttattcttacatcccgatttatgtttttctgtgattacctctcacacaagtttttcttgatttttaactgttttttttttttaatttattatttattgtttctttttcataggtggttaatgacagtttaaatcctgtttggaatcaaacatttgactttgttgttgaggatggattacatgacatgttaatggttgagatctgggatcatgacacttttgggaaggtaaaggatcctgaatttataaagctgtttttttatttgttggattccatgactttttacctttatgttttccttatcttggttgttttgggctatgatgaactaaaatttataaatatcttttacttaatagtggattattttataaaacactcatttaaatacttgccaataatacaggattatatgggaagatgcatcttaacactgacaagggtactattggaaggagaatacagtgactccttccagctagatgaatcgaaatctggaaaactgaatttgcatctcaagtggatgccacagccaattatgcgcgactcttgaattgattccttttccatgggaaggcaatttcacatgattcttgactgatccctagtctcatcaatggataagtacgcaaagaatagaagctatatactcgggatcaccggttaatagttctctcagtcatatactcttcaccggggaaagttttaagtacttgaatggtgtacataattgtttcataacagagtgatacagagaaatgaagttttgtggtttagagcgactacttgtggaccttgacaaataatttgacttcatcttcatatacattcgaagcagaggtttcaccaccatatagcacaatttttttctttgtcctttttccattctcttttgtatgtatactggagtttgtgagagtgatttagagcattgtctattttaaataaacagtttttttctttttaaatcaaaccctcgaggtcagaactctgaccaagcccattatacaaaggctagtgagatcctgaccaagaggaatcaaaaatcaactcctagagctttttactcgagagacggggaaaaattgttttaattatttgaaatatctaaaaaaacagaaaaattatccatgtactattctacttttagctttagaagggcagattttaaattttaattgggaaatttgagaaatcatgctaaaaaaataacatatggtgtttaattaaactaaaaaaattacacattataaaggggagttttatttgcacctcataaaattataaatatatcccattattaaaaaaaaatatataaacttacattttttttaaaattattcttaatatttttttaaaattttttcctcacattattttatgttaatttgaatacttattttgattttatttttaataatttttctaactcaagtatatatttttttatttttttgtaagaaaatttcatataatgttttattttaattttttttattataatatttaaaatataatttaattttgtttaataggtatattttttaagaatataaattaaaagaaaaagtttaaaaaatttagtataattaaagatataaattttatataaaataaaaattattaaaatggggtgtctttagaaatttttgtttttggggtgtaaataaaattttcttgtaaaaatatgctaatttttcaattggcttccaaaattacccctaatttttcaattttcccccctcctctctaacagctttctctctcctcctttcctctctatttgaacccaaaaaccccgaacccaccccctccattcaaaccagacccaatcgaccccaagctccgatgactccgacgaccctctcgaccccaacgaacgacgaccttgtcgaccccaacgaacgacgaccgtctcgacccaatcgaccccagcgaccaacaagacccactcgaaccccatcaacccataaaacccaatcgcaccagtcttggatcaccgtccccgccaccgccaccgtcccaatcgactaaaaggtattttttttgaaaattttattt

SEQ ID NO: 185335 - DNA, 4841 bp, Cannabis indica
ttttttttttaataacaaataattgctactgaacgttcattaaagataattaacaattatcgtggagacaaaatcttactaggagttattactctgattttgatggagtaatagttgagtaataactcccattttgcgtcaatgctataaaggctcaaaaagatatgtgcggctggtccttagtgaaacacctagccagtcgaaattttattgccataagattagagggcacaataatttctttgcgtcataagaatcacaacacaaaaatatacataacttatagagaataaataaaaaaaccaacataaacattaaccctagccctcattgctctctctctctctctctatatatatatattgttttcattctttctttctcgcgaagtagtcaatgttaacacagattggttatggttataagttttatcgtccaggattggaagctataaaactcgagagaagatactgaaaacttagtgtggatccagaaagccatgtgcagaagatctggtagaattcggaaggtacttccaaataagtttatactttgtatagaatgtctctcctagatagcttgttattaatccggaggtacactcccagacagtttactgccaatcttgaaggttcatctgagaatgaaatcttgtacgtatttggaaggcttgtgtgcttatagagctttcaaattgttcgtactaaaaatgcgtatttgaagatgaagtgaattttttgttgctggtaatgaattggatcatttaaagcggggtaaatgtgccagaatgatttaagagatatttttggtaacattgtaaatctatttatagctataaatatgattgctgctgttccaaccgagatgtattgcattgcacatagctcgaacatcgaactcgttaaatctgatgttattttttttttttcctattttactgcttatttcattagttgaatcttgagacctctttatatattatttcttgattgtattaagtatttgttagtactataaactgaatcctaagtgattgattgattgttttcatttcacacaatagtaatcgtgctgtgattatgcaacttcactagttttctttctctaatttgtgaagaagtaataaaacacttagtagattagattaataaaaccataaattcttacacttactaatataagtgtttacacaattacactaaaagccagtgtagattacaacaaaacaaggcaaaatagccttgggattaaagacaaataattcatccaaattggagtaaactccgacagctccggccaccgagtcatactcctccatacttccctccatattcttcttcactctcccggcgatcaccctgcaaaccagcattgccctcttctcaccttggtttccccccgcctctcccacgtggtcgtgcgcttttccgctcgtcgccgtcgtcagtataccctttccgagcccttctccggtgggttctcctgcgaccttgaacccgttctttataatgctacaaatgttgcattgtggcatcgagttgcagagattggaagagccgttcaagccgagggagcacatgaaggtggcgcaatggaagcggaggagctcgttcccgtcggcgatgcatcgagggtgcttctttgggagcttggtggccttggctttaatggcttctcgatactcctcgaacttggatatggttttctgggtattgtgaactttcagtattcggtcgattttgcatattggggcttcctttttgagccagcttgattgaaatatgatctctactatgttcttgcttgtatcttccggacccaattcagaaactgtggatttatgacaaattaaaatgttaagaggaaatttgactttttgaataagggaactgcgtttatagctcagaaaatcttgattaaatcagttgaaatttacttgcttaaacagggttgcaattgaatttttggatttacaatgtaaattgaagtaaagggtatggaaataagaggtagaaaagatcaaagagatgagacaagtatttacctgcatgcctaacagcttgatgaagctccagattttcagctttcatgaaaatctctccacattcaggacaagtacagatggtggtcctaagagaagggtctcttgtgaatccaagaacaggatcaaccaccattctgcattcatagcaaccagagaatctcctaaatggcattcctctaaaagatccacctacagaagaattggaagagacagataatgaagaagaggaagttgaaacaactccattgagttcatgtactggagctttcatggatgatctgtttgaagattcattgttgggtaatgttgagcccattgaagcttttttcttgtggagttcaggggaacctgtttcaggcctgtgcatgacctttgtgttgctgcatagagagccagaacacttcattttcttgtttttctttgcattttcctctattgcttgctcttgctcttgcttttgttttagcttttgcttttgcttttgtttcagcttctgctgatgctgttgttgttgcagcagcagctgctgctgcttcttttgttcttctggttgtagtgtttgagaatatttgcaagtaagtaaatctctcacaactgcccaagaaggaggcttttctaccttttgggattcaagtttctggctttggtggtgagtttgtttgctgggcttcttctgatttttttgcttagccattgttgaagacatggaaagaaaagactggatttctaacaaaggaaatggtgccttgaagtggttttactaagagtagtttctctttctcatatgggtacctccggagagtatgtgctgaaagagctgtggaagattaagagtgtttagagtaatatgagtacaaagagaaggtttctatggcttttgtaacaagtgattatggtttagggttataaatttaggggctttaattatgtacacagtattgtttgacatgtataaattgactgctacgcagttcaagacaatgtatataatataaaacagttgctatttagtaatactagcactaattcttaaaatttattacattaaattatataaaaattactacttaattaattacacgagtattattattgaacactaatagtgcttaacacctctaaaaatgtggttttacgattggctaataatacttcttaaaaattattatattacattataaaagacccaatacttaattagacaaaataacaatattaatatataaaaaagtactaaacattaataataccttttaatatttctctaattacactaataataatatctagacatcagcagtgccttctcaatataaaaatatccaatttcgattcgtttttagaagaaagagatgtgtgtccccactttggacaagacaaactttattgctccataaattaggttctttttatatttcacatatatataaatatatatatatatatatatatatctttaatgaaatgcattactgtgcaatgcatgctacatggttcaagtcctaacttgtttctattcataaaaatttaaagctagtataatgtcagcctttaatttaaaacctgttcaaatattgctttttgtctgtctagatatctttgatagtattgtaaatttgtgtgtatcgtgttagctcgacctatattatattatgttttctaaaatacgagtcgtgttatattatgtcaatatttttaaagggtacacctggtgttttcgtgtcgtatctaattggtactgtgctttactcgtactgattcgtttttatagtcagacttaaattcgtgctttatttttttacatttatttttacaaataatgagtcaattactaaaatataaatttatcataactttaattatattcatataatttttcaataatattttacagataattatattaaaaataattagagttattataacttaaatatatacttataaatactcaaatttttatattttctttgtaaattaattactatatagttttaattttatattttctaataattttaattataaaattataatattcaattttattatcattttaacttacttgataaatacttatctatttattattattatagtgtttttaatgtaatgtatcatgtcgtgttttttgagcttatttcatgtcgtatttttcgagttagtttattcgtgtttatataccgtgtcatttgtaatttttatgtcgtatcgtgccaaagcttatatttttttatacttggttgtgctcataccacctaaattcgtgctagtttcgtgtcatgtcaaaaaatctaactcatatttacaacactaatatttaatataaataaattggataaacatcataccggtacaaaagaacttggagaagagaataaagattaaagcaagagaccatttaagcgaatcgttagaaagggtgctaaataattaatgttacaaatttgtatagaatggaaaaaaataaatacgctataaattatctattgttttaatttaatcaattaatgattctttatagatggtcttcatcgaatagggacaaaattatcgttttacccatcaatgtattttgtccttaaaacacttagtttcttataaataatattttagtaaactaatataattattgatctaagagctctcccattcatgcattttagccaagacttctaaacacttatagaaattatagattctatttctatgattagcactctcactcaattgtattaccgtgttgccaagatgcaagtacgcactaattctattggtatgcttataatgaacaagt

SEQ ID NO: 185336 - DNA, 2843 bp, Cannabis indica
cctttcagattttagcaactgagttcacttcggtgttgtcaactagatccttgaaggattactcttgagaaatgtcttctctgtcgatttactttcacttcgattttctcctgcttttagtgttatatagttatttttttttttaaaagaatgatattatttaaagctgcctttatggctgtagttggaattctttgatacccttttgtgagaaattgtgctttttgtgggtttagtcatgagtagttctgctcaaattatttagatctgtatgggttttccttcctctgaaagtggattggttttcttggaaagattttatttttattttggatttcttgtaggctgatgccatattagtattactatgctctttctgggaatgaatctatgattagatccttgattgcgattttggaatctttttgggtcttagttgagtaagtagctgtatagtaaatattgtatttttaatcattgtgatttttagtggttggggaacaaacacatgaacacatacatatatgtatgtgtatggaaattcttcacctgtcaatggccttacgtattatgtattttttttctgtgttggacggatctagttgctcaaggcatatgggaactctacatggatatcatgcattctatgcaaatgtattttgtattgatgatattgatctgttgaaatctctgttaaaagtgttgtttttcttactagaatttgctaattcacttggtaaattcttttcttggtttgaggttgcagttgctaaaaggaaactggcattctatgcaaatgtattttgtattgattgatattgatatgttggaatctatgttaatagtgttgtttttcttacaagaacttgataagtaatgttgtctggcattacttggtaaattcgtttctttgttttaggttgcagttgctaaaagtaaagtgagggttcactagcatttattattttgtagttagatttgtctcatttatataagttgcagaacttactggattttattttttagtttttgtgcttgtattaacttgcggaaataaaatagaaaatattatcacagtactttgtcaatttgaaaatgtttagctaatacttaagctgtatgatgttcaacctgtttgttagtcttgacatacacacatgtgtttgatattggatcaagtggaactttttatagctcttttagatcagccaattgattgcatttttttgttgtctccattgcagctagggaagctttagttctctcaatatgtcggaccttgaggcccccttgcgtccgaagaggaagaagatttgggtggactattttgttcaattccgttggattattgttatatttattgtcctcccaatctcctgcactctttacttcttgacgtatctgggagatgttaaatcagagaggaagtcctacaagcagcgccagaaggaacatgatgaaaatgtccagaaagttgtaaagcgtctcaaacagaggaatccatcaaaggatggtcttgtctgcacagcacgtaaaccctggattgctgttgggatgcgaaatgttgactacaaacgtgctcgacactttgaggttgatttgtctgcttttcgtaatgtccttgaaattgacagggataggatgattgcaaaagttgagccattagttaacatgggacagatttctagggtgacagttcccatgaatctttcccttgctgtggttgctgagcttgatgaccttacagttggtggcctcattaatggctatgggattgaaggaagctctcacatttatggcctcttctccgacactgttgtggcttatgagattgttctagctgatggcagtgttgttagagctacaaaggataatgagtactctgatcttttctatgctattccatggtcacagggaacactaggacttcttgtgtctgcagaaatcaaacttatccccatcaaagaatacatgaagttgacatacaaacctgtgattggcaacattcaagatctggcacagggatatgtggattcttttgcaccaagagacggtgatcaggataaccccgacaaggttccagattttgttgagaccatgatttattctccaacagagggtgtttgcatgacaggtgtatatgcatcgaaagaagaggccaagaagaaaggaaatgtgatcaacaatgttggatggtggtttaaaccatggttctaccagcatgcccagaaggcactaaagaaaggagaatttgttgagtatattccaacaagagagtattaccacagacacactaggtgtttgtattgggagggaaagcttattcttcctttcggagatcaatggtggtttaggtttctttttggctggttgatgcctcccaaggtttctttgctaaaggctactcaaggtgaagccattagaaactattatcacgagatgcatgttattcaggatatgcttgtgcctttgtacaaggtcggagatgctctagagtgggttgatcgcgagatggaggtaacaccttttaatccttttgtttgtgattgctatgtagttcaacatatgtaggatctctgtttttaacactgacatgatttatggttattgtcatgtctataggtataccctatctggctttgccctcatagactgtacaagctgccaatgaaaactatggtgtaccccgaaccaggctttgagctacaccgcaggcagggagacacacagtatgcacaaatgtacactgatgttggggtatactactccccaggacctgttttaaggggtgaggtttttgatgggatagaggccgttcgtaggatggagaaatggttgatcga

SEQ ID NO: 185337 - DNA, 3930 bp, Cannabis indica
acttctttttttatttatttttatgcaagtacaaatttggtaatcaagttgtaaattattatcaaaactataagtaaaagacaagagaacaggctattttttttttttgacataaaagagagcaggtatttattattatcaaaaccaaaacaattatataactgattttatgagttagatctgtagagtagaaagttaaaacgagtgcctgcaatggatgggggggaactatctcctcagcaataagctttctaaacaaattcacctccactagctaaaacacatttggtgaaagaaagcatatttgaaaagactcaatttctacaccgctttccaacaacctctaaatcaatgttcttcattcccttggccattaccgttcattaggttatccccatcctcacctgctccatttgcatctccataatgaacccatggtagcattgattcaaacaagacagccaatgcatttcgattcgtaacgtcacgcggtggagcacgtagaacctcatttgcattggcagcaaggccttcattatgcatgccttccatcatccttgggtcaaccatgaagggttgcagattttcaggcggaagagttggcgttgagtgagagaaatccgagaccaataagtggcgatacctagcaaacaaaaagcatcatatcaatctcacttattaactaaattaaatgacatatgctttcatgtagaaatcagcatcaaagtagatattgaatagaacatggtagccaaatcagaaaaaggtgacaatttagagcaaaaagaaaattaagtgacaatacgatatgtatactcactcgttcttctcagatgaaaatgcttcttttctgacacaagcccaatccttagcttcactgctatctcttttaagggtttcaacgatctgttgtgcagcatctcttaataacttttgcagatctgggagcctccatataagataattagtctccacatatatgttgatcaggtgatccaaggatgggattccaacttcttctgctcggaataatgcatccttaacaatacctgtccatgcctggtccttcaaaggcaccttttctatcaatttcttcaagactgaggggtgaagcatcaaagcctgcttcataagctcggttgaactagactttgcagtaagagcatgagtgccttcctctgactcttgtttctctagataaaaccggcatacagcaagggaaaatgagaaatttggaaacaaccataatgagctatcactttgatagtcttctgagaacctctcaagccatgcatactcatctgctctcaatgacaagtaatcaatatagaacttggcccccattggatcatcagaatcgagagaaagcaatagcttgcaaacttccaaagcagaccgatgacaaccacgcttatccatattcttcatgtgagcaaaaagtgtcgtgaacataggtttgtttttctcatcattgaattttacttggcaattaccctgaaaaggggtgaacagtggatgccatgcacattccaatgcatacagacatttcgaaatagattctgctgacatttgctgctcaccagcaaacttaaagtaatctgccatcgttagaagggaatccaagtgataagggttgtacaataatatactggcaatgccattgagatcgtgaatagctttagcagcttcaaaggctctctgagcttgagcataggatgatgaatgcacatatctacagtataccataacagtatcgaaagggtctcaggagaaaaatacaactaaaaggaaaaagagaagagacaacatggaagcaaaaaatgatcttacctaaagtagtggtatccgtctttcacttcaagaaattccatggagaaagaaccatcccacctaggccaatgttctgatgcagttacaagtactgtctttctaggaatataacctccacgccgtccaccacgtacctgtcttgaactgccagggccagtttgattacttttctcaaatgattttaccactttagagccaaatattcttcgaagctcattttcagcattaagatattttggatctacttctaaaattgaggctgcaggtggtttagccaagctatcatgaagttttgtattcactgcttttgctttctcaggagcacgtggcagtgcagaagttttaacatctagacttaaagcttctagaattgcatccaaggacttctcgtctttatgtgtactttcacaagcaccctccttgtttttcttctttttctttttctttgatttgtggctggatcttgagacggaattgctggtacctttaagttcttgaggatcttgtttatcaccagcccctaacacgatatcttctgaagtttccaactcatcatcctgtaagccaattgaaaattaaaaatacttaagtgaacatcatcattacctccaaaacaagatatcagaccattagaaaagtgaaagcgtaatcagtaagctaaggaaactttcagcaatccattgttctcttcctctacaacttataccctacacttagttgcttgataacaatatcagcacattgcatgagcaggaccattttgatgtcctaaaagcctaaaaaggcatcaactaacttttaaacaaggtttcctcctaataccaaactccaaaaggttttcaaaatttcatgaaagggtaatttgtaaaagaaattacagttttgaatttcaaacagaaatagaaccaccctatatggataaatggagactaaacatttcaaatacaaagaagcattgacttagtaagaaccaagtgtcagctaagagagatgtacattttctattagaaacatattcaagtgccccctttctaaaaacatagtaaatcgaatcaaactaatggttttgatatcacgaaattcggatacctacacagaacaatgatatagaaaaaaccaattacttcatcatatctagctgtaaacaactttcttcaaattttgaaaagaatataagttaggaacttcaaagttgagctgggcagtgggcagaacaccacaacaactaattgtaatccagaatgaaagaagatatactaccaacaaagaaaggccttagagactcgaacctgatcgctgacatggtcaccatcattgagaaggtcgaatggattgattgaagaaccagaattgacatgttcttcctcttcttcttcatcgtcgtcattttcatctttaatatgaggatccttctgaggttgcagcagctcttgctcctttaaaaacttcttgaacaatcgagccgacatggccgaaatccaataccgatacaatgcccaaaattgattggggtcgaataaagattagccccttacgtatcagcgaagagataaatcagagggaatgaaaccctaaggtggagaattgagagtttgggcccttgttcttgcttcttgttcaatattgttctatacgataccgaaggaacgacgttaccacaagggccttggtgaagaaaccagctgagccttccactcacttctcaaagctattcaatttattttctttttccaacttaaattaaaattatttattttttaaaaaatttaaacaaatttcttttgtaaggtgattagcttaaaattagttttttcagttatttatttttttgaaaaggttagagcatattaatggagtgctgaaatattagtgtagtgcctacattttagcacttttaagaaaaatgaactctctaatggtatactaaatgttgttttgaatttgtctcttgttacaaattgtgctttattttacataagatgtacaattatatcaaatttggcacacaataaataaatggagcttctttaattacagttttgtcattaattattaatgataattttaatatattttgtttaattataatattatcattaa

SEQ ID NO: 185338 - DNA, 3350 bp, Cannabis indica
ggaacatgtttcacgcctaattgcgttccaaaacaattccttgactgtaggaggaactctcaaatcccacaactctttccaaaatactgagttaccaactccaactaactcacctttaagctcttgaagaagatgatacacactcttgaccgaatatgcaccagaattatcaccattccactgccaaatatcatcagacattgaggagaacaaaggaatgctcaaaataagctttacgatcctctcaacaaaaatatctttaagaacctcttcatcccaagataactctccaaccttcataagactggagaccttttgattaccaaactaggctgatctgaaacaacaaaggtttctatttatccagaagccaaggacccctaagaatataaatactcattccaaatccaatgaccatacggcccccctttcgaataagaaactgagcttcatggatatgtttccatataaaactcaaattgcttcctaactctgcgcccaagtaggacccacgaggataataacgagctttgaacacacgatcaactaaagaatcttgagtataatgaagacaccatccctattttctaagcaacgcaatattaaaatcatgaagcttctggaacccaagtcccccatgaacttttgtgacacacacctgtcccaactcatccagtgaatgccactaccgtttttacacgacttcttccactagaaagaacacattaatttttccatcttgtcacacacctttttaggaaaaagaaaaagatcatagcataggtgggtagatattgcaccaccatcttcaacaaaacctctttaccagctctagataaaaacttaccatcccacccttcgatctgtttcctcatattttcattaagaaagcccaacacggctaactttttttggttcataatatttaagagtccaagatactaacaattctcaccagcttccaccatacctaagatggagcacacacgggcaactttagccttttagcctcatcctccaacgcctaacaatataaataattatcatctacaaagaacatatgggcaataatagacgcaccccgagcaactttacagcctataagccaaccctctgtacatagtcattaataagagtagacaatccttccgcacataagataaacaagtaaggagataaaggttcctcttggtgaatatcttgagttggagtaataggccccaaaaagaaaccaccatattggacccaatatttaacagacgagattgatgccataatcaactctacccaccgactatcaaaacccatcctcaagagcatagcctctaaaaaaggtcattcaaccatatcatatgctttactcatgtcaagcctcaacgccatttaacctactttcccaacacttttccttttcaaataatatattatttcaaaggataccataatattgtcaaagattagtctcttaggaatgaaagcattttgaaaatccaaaattacgttgtcaagcacacacttaaaatgattagccaagactttcaatatcactttgtaaaccacattacatgaagaaataggtcacaaatcacccatagatttaggacacttcttttttagaattaacactagattagtatcattcagccccataggaacagaagtcgtatgaaaaaaagcctgaaccagcaaaacaacatatttacctaccactgaccaacactttcgataaaatccaagagtcatcacatctaggtttgaagacttatttggatgcatctaaaacaaagctcgccttacctcatcattagtaacaagacacaataatatcccattcatgtatggtgtaattgatggttcaatgcaatttacaacatcttcccatcaagtagtagaggccaaaaaaaactctaaaaaatacctaaccatgaggtctttcaaccctgactcctaatcaacccaagcaccactttcatctttcaacttatggatcgtattatgtattttatgttcactatcggaggcatgaaaatacttactattttggtcaccttccttaagccaaagttgcattaatctttgttttcaaaacacttctcgcttagtaagaacttcaaataactccttctcgacttccctatactgtgccacaaaatcttcatccttcctacccttgagtcgatgcaactgagcattacattccataattttattgttgaaattactagtatacatccgagacccggagaagaccaaagattttacccacagggcaaattaccatccaagacctggaagccctgccatccatctgggatccggagaagaccaaaccaaccagacttgcaggaagacacctagaagtcatacgaagagtttaaggcggataccaattgcacaagggaggactaaacgactattatgaagttagagttggatgacccttgtgacggttatacttttttgacatagggttagatcttgtcccctgtatgagagtatggtagtgcacgtgccacctctgaataaacttttttgcctaacggctcctctaagggttttgtctactaagtgcaacctccgctagacacgcatcctgcaccaaaaatggtcccaactgtacgaacctttcgcctcacgaggaagagccttcttaggggcccaatagtgggtgggctctttgcagaaaatcctaagcagccagtcatgggtatacccatacccgtactttagcctatataaacccctttatttcttcgcaaaggggggatcacaaaaatttacatagtcgaagttttgctaaaatactctctaacctttcttcttcgagagagaaacctaaagaaccaaagttagaatttttattgtaaacaccttttgtaatacatttgtacacctacaaggctaatatactaacttatggattagagataattaacgtctaaaccatgtaaaattttttgtctcgcttacttagtcatttaatttctaaagcttttatttaatcttagtaaacagtatattgtatttacttaaaatatataatttaattatactatgttatgtttttttaatataatataatatgtataaataagaaaagtatatattaaattgttaaaaaaaatatatatatatattaataatttgctaatgttattgtccttacatatttgttgtttttagtgttttaatttttttactaatatttttattaatgaaataattatataaattactattttttataaattatttttacggtattctataaaaacaacacgaaaataacaagaaaaatatataaaagtatcaggaaaataacttccaaacaacaacaaaaaaaaaataca

SEQ ID NO: 185339 - DNA, 1767 bp, Cannabis indica
ttataattataatgagtgaatatgataattaaagttataacataacatgactaatacaatataacaataataatttataatattaatttttttaaaaaattaatcatgcaattttatattgatagcaatcaattaaaatagtttgtaattcaattaatacatctctcattctaaaaacacgattagaattagaattgaaaaaacgaatcaatcaatcgactacatgatcccaaatcatttgatagaaggaactaaaataaaattatataaaaaataatgtaacatcaaaatttactttaaaaacacatatattcagtttctcccacacttataagacataacaatataaattattacaatttgacacttaatttgagcactcaacttttgtgcaaggtatgtaattacatcactaacaacctattcaatcgcagagaacttgttatttctaaccacgtctggccctgagtataggcgagctagagtacttgtgtctaaggtccacctagtccaggagcctaaaaaaaaatttcccattttaaaattacatatttttttattgattttaaaaaaatactacatttagtctaaataaagagcctaaagatatttttttttcctatagctctaaaattttaagatcggccctgccaactactaacaacacacgatttgatggtgagccattgaagaacagtaataacgaactaataaataaacaaaacaaaattatgtcatagagacaagactaatcatactaacataaacaaaaaacactcaaaaactatattaaagagagacaaaatcactaatcgtggtaataaaaacctaatcgcaataataaaatcaaagatactgatcaagtcacacctaaatctataaaagatccacaactaaggatttaggaaaaaaaaagctaattagaaactatataaattataatttatttattaattcccttcatatatctatatattattggggggacccataaacacataacaataattgtgtgaattgaaatgtataaggtgttattgtttataatcaaatcaatatgaatggatgaataaatgaatctagttccatctatgaagtggccattcgataactacacattttatacatgtctttcaatattgtcagactcatcatcagaattgacataaattatctgtacctatctatatatgtaatctatactaaattatacataaaaatatgaatatttgtttcttttttaatacatatatatgttcttatcttatatatctcactatagactatatagtacttgtactactactactcttacaataagattccaaccatatttagttaaccaccaatttagtattcaatatattattaattgtgctaatttaatcaaggttaaattttgaagaattttctattataaagaagttgagatgagatttttctatttcgataattaagagctataaataataatatttaatgatctacaattttcattaattaacatatctttattttctttttgtttaatttaataatttagagatgtttagatttgattttgagagctctattgcccaccacaacttgagctttttaactgaaaattggagattttaaaccccaatttgtacattttcttagttttctattgattttttatcatttgttagtacttttctttttagaatacttgtactaattttttagtactagatctagacactagtcaatatgtaatgtaaactaaatttaattaatattata

SEQ ID NO: 185340 - DNA, 5753 bp, Cannabis indica
gtttaagttcaggagtcatctgctaaattgtaagattttttgttaaaaatctataaaatgaatatcgtaacataaattgtaatatgtcgtgaatcatcacgaaacagaattgcagatacgtagcctagtgttctgcgatatttcatgatacgaaagctacatatatcgtgatacatcgctaaatacatcgttaaacaactaacatgtcgtgaaaacatcgccaataaaaaaaaaactaacaacattttaagatgaaattgcaaaaagtcgcgaacaatgtcgcgatatgtcgctaattgtttaaaaaacaagaattcaaacaggcatcaatgaaattcaaacgaaaacataaaaattgaacctaaactaaacagatttctttacaatgaagcacaaacaacaaaaaacccacttaaaataataaaataaaagtttagacaaatacctttttttacgatttcaaatgtgggtttggagtttctcgatttggatgtgggtttggggtttcgtgtttcgtcggaggtggtggttttgttgggctcgctgggtttcgttgatgcgtctgatggtggcaatcgagttggtctgggtttggggagttagagaaagagagagaaacgagagaatgagagttagagggagagtgggagtttcaaatgggaagggtattgttgggattaaaatttttatattactttaagatgcatataaaaataccttatgctttttttaaacatataatgtcaaatttccttttggttatgcacaaaaatatttaattagacaaccataatgattatactcaaaatattctgaataataaaaataataatataattatttattataaaagtgtgtggctgtaaatttataaatatatttggttatgcataaaaatatttaattagattagagcacatataataattgtacttaaaataatttgataataaagtaaataataaaattattgtaattagagaatataataagtatttgattatgtataaaaatatttaattgaattactattaattaaattaaattatttggccaaactaaaaagtttgataaattattgtgaaaagttatataaatttttttaaatcaatagtatttagattgaaaagataaatccccaattcctcctgttgtacgatctggtattgttcgaaagcaatctgagactgtaaacaaagtaaaaataactcttgatgatattgaggaagaagttcaattttggcaagcctccatagtgtgttatgtatttggtgcgaacccaccattacatatactggagggctttgcaaatcgagtgtggaaggataaggtagacagagtgaaactgctgtcatatggaatattcactattcgattcaactctttgaaggacagagatcaagttttgaatggtggctacatatttttcaatcgaaggcctgtcatcatgaaggcttgggatcaaaatgtgaattttaagaaggaagatgttaaaaaggttccaatatggattcaacttgaagacttggacttgaaatattggggacaaagatctttgttcaaaatagttggacaagtagggactccggttatggtggataatgtcacaaaagagagggaaaggttgaactaccctagagttctagttggagttaggatagatcaacaattccctgatatgttggagtttgagaatgaacatggctgcaacacacatgtgggaattaagtatgagtggaaaccgattatatgcaaccattgtcacgggttggggcacctgactgatgactgtaagaagaatgtcaaagaggggaagatatgggttgtgaaagaagatcatagacaaaaacaggtggtttatgaagatggctttatgaaggtcactaaaggaacaaaagtgaaagagagaacacacacaacagaggctatgagggtggaaaatgccttccaagctttagattctgaacaagcacaacaagaaatggcaagaaacaacgaggaggatactggaaatatgagcaatactggaggggggagatccctctctcacaaatgaataagtttttatgttggaatgtcctgggagccaacaatcaacaaaacagagactaatcaagcaatttattagtcatcaaaaggttgattttgttgggctccttgagacaagagtcaaggctcttaaattaggaatcttgtactctaatgtgtttgagggatggtgcttctcttccaatattgcttggcatgctagagggaagattgtaatagcatggaatcctgtaagactcattgttgatattattagttgcacaagccaacttatgcatctaaaaataacaacaatggatggaatgtttgatagctttgttactgttagatatgcctcgaataacagatcagaaaggagaattttatggaaggatatatgtgatttgaagacaagtgaaagattgtgtcttatgggagatttcaatgagattctagcaaaagaggaaagactagggcatcgggtttctagcagccctgatttggattctttgcaatgtgtgaacagttgccaattggaagatataaagagtagtgaaaatttctatacatggtcaaacaaacaacatggagatgatcgtatcttctccaagattgatataatgctggctaaccaaggatggctgaatacgtatgagaatgctgaagtactttttcttaatgagggattgttcgatcactcacttgttgtgctcactcaacatccgcttgtaactagtggtttaaagcctttaaatgctttagaatgtggaaatcccattataagtatgaaaatggcttattaggcatctggtcaatgcgagtaaatggttcaaaaatgtttcagctggtgacaaaattgaagagcttgaaggttgtcctgaaatacatcaacatggagggtttttctaatctacaggtggctgtctatgatgctaaagtaagattggatgagctccaaactaacctgcaaaggtgtccactgaatgaagaaatctagattcgtgtaaaggaggcttgggatacatacgctaaggtgcaaaaagattataactcttttttacagcaaaaggcaaatatggcatcgattcaagatggagatagtaatacaaccttatttcatgcaagtataagacaaagggtaaggcaaaatagaatcttttctattgaacaacataatggggagagagtacatgatccccaactggtgcaagatgctttcattgagtactataagcaactgcttgggactagaatggagaagaggagagctgtaattgatgggatattgagaagaggtcctgtggtaactgaggtacaatctgagatgttgatgaggaagtttactcaagatgaggtgaagaaggctgtgtttgacatgtctgggtctaaatcaccaggcccagatggttattccagttatttttaccaagataactgggataccattggtgaccttgtgtcccaagctgtgatctcctttcttgaatctggtaagatcctcaaggagataaactcaactatgatcacccttgtccccaaggtaaaatgtcctaacactgtcaaatattttagaccaatggcctgctgtaatgttatctacaaaattgcaactaagatgttatgctccaggctaaaatctatccttccttctattatatcctcttctcaatggggatttattaaagggaggttcattggccacaatataatgattttccaagacttggtaaggcattatggtaagaaatcaaataaaccaagttgcttgattaaattagattttcagaaggcttatgacacagttgaatgggggtttatagaaggaatgctagatggattgcaattccctcctaaatttgtgcatttgataatgcaatgtatttcaactcctagatgctcactcatgtttaatgggactctacatggcttctttgaaactaggagaggactaaggcaaggggacccgatatcgcctctactctttgtaataggcatggaatacctatctagactcatggggaagattggagaaagggaggatttctcttttcatgataggtgtggagaattaaaactcaatcatttggcttttgcagatgatgtgctactatttggcaaaggagagacaaagagtgtgatgtacatgttacaagctttaaagctcttctcaacaacatctgccctatatccgtatgctaataaaactgctctttattgcagtaacatgaaggatgaagacattgaacaagtgctcaggtcccctggtttcacaagagggaaattgccctttacttacttaaggatcccaatcaatgcaaagaaaatttctgggataaattgtgagattcttgctgaaaaattacagcaagaattcgaagctggagtacaagaaatctgtcatttgcagctagaacaatgttgataaattctatattgatagccatccaagtgtattggagccaaatttgcatactaccaaggaaagtatactgaaggattgaagcaatctgcagatcctttttgtggaaaggccaagcaaactatgatggagctagctcaattatctggagcagggtttgtactcctaaatcagtgggtggtttagggataaaaaggttgaggaatggaataaagcagccatgacaaaatacgtttggcaattgcaaatagacaagaaagtctatggatgaaatgggtgcatagtgtgtaccttaggaaagatgaatggtggagccataatgcttctgtccatgccagttggcactggaaaaaacttgtggccttgaaagatcagttgaagaacctcatcgatatacaacagttcaccaggcagagatactccatagcagcaggttacaagctgtttacccctgttgatatcaaaacaaaatggagtaataaggtatgggctcgactaaacgccctaaaacattgccatattctgtggttggctatacacaacaggttgaaaacaaaggacaggcttctcaaatttggcttacaaatggaggaaacctgttgcttttgcaaggaagaaaaagagacaggtgaccaccagttcttttactgtcagttctcacaagaatgtttgcagagaattaaagcattacccggatggataggagtgagtaaaagcatgcctcagctcattcgatggattggaagatcaaaaaccagcaagcttaaaaagttggtgttggctgcagcttttgctacacttgtttacaacatatggaaagcaacaaatgcacactatgttcatgcctaagaaaaaaaaagagagaggagaggttatggtttaaacattgtaaaagttgtagttagatattaattctttttgggcctctattgaggttcctataggttgtacaaaaattatttagagcaatacaaattactgattcataaaaaaaaaagattgaaaagaatatttgaaactcatttttggaaggatttaagattacttcaatagagataattttaacaacttgaggctagttcaagtggttatagagggtgctagggatgaagctaaaaaattattttagatgggataaatatttactagaaatatatatataaaaaaaaaagataatttcttatttaaatgtattaattccattttttttagctcttgcaaaattttgatttaaatcataattatatttttttattaatattttcatttgaatagaataactaaaatattctttcaaaaaaaaaaa

SEQ ID NO: 185341 - DNA, 3121 bp, Cannabis indica
aggcacgatgattactatactctgttaaggtttgtctaaattttgtactacacccaaacaattttttgttaatgttgcgattgcttatgattacctctattttgcagattttgaaagctcgggactttaacattgaaaaaacgatccaaatgtgggaagaaatgctaaactggagaaaagagtatggaacagacactattttggaggttagatgtcaacattttacaactctgtaaatgtatgcttgcgagtaaaatcggtgtagctgaaatgcaatatagatttgttatttctgagctcattttttttattgatcaatacataggattttgaacttgaagagcttgaagaagtgttgcagtattatcctcaagggtatcatggggttgataaagaaggcagaccagtgtacattgaaaggttgggtaaagctcatcctagtaaactcatgcgtataaccacaatcgaacgatatttaaagtaccatgtccaagaatttgagagagcaatacatgagaaattcccagcttgttcaattgcggccaagaaacaaatctgttcaaccactactatattagatgtgaatggcttagtaagtgaccttttatcaatgtcttttttttagttgaatttagtccatatcaccttaaaaggtttgtcatttagcgtttttactgcgaccctttttaatgggaattgatttttcgatgaaatgtagggaataaagaacttcactcgaactgctgcaaatcttctggcagccatgacaaagatagacaatagttattaccccgaggtatttgaatcatttcggtgattattgtatttttgctgctaaatcggtgcgtaattgtttttgtaatgaattcagacactacatcgaatgtacatcgtcaatgctggtcctggctttaagaaaatgctttggcctgctgcacagaagtttcttgatgctaagacaattgcaaagatacaggttcataaatttctttgagtgtgtttttcttttccttagtgctgttgagttaaagcccattttattttgtcaggttctggaaccgaaatccttgtccaaactttttgaagtcattgacccgagtgagttgcctgacttcctgggtggatcatgtacatgctccaccgagggaggttgtcttaggtctaacaaaggaccatggaatgatcctgacattatgaaggtatatggtactctataacttaagcaggaaaagaatctgctaaagtttaaaacttttgtggaactaatatctaagattaacataggtgtctcatttgtagctcgtacatgatgtcgaggcaacttttgtgcgacaaatcactagagtgtcacatgatcaactgaaactcgactcttatgtacagatacgcccgatgaaggcaagttccatttcgctattgacataatgttggtttgtaactagcatatagaaatataactggataggatttaaaacttttatgcagggacggagcagtgatacttcgaatgcagaatcagggtcagatattgacgatccttgttccccattaaggcgaagtagttctgcagtacctcgtttggcaccagtacatgaagaagtgggtcttttagattataatatggtttgtgtttatgtttttcgcataagacttaacttccgttttgtgtgcaggtcagggcatcagattcaaatgtatactttagctgcgatgatcattttccttcggttgagaatacaaatggaaatgatgatgaggcagcgcatgtccaggatcatcaattactaaataacaattgcaatgatattaggaatatttctcatcggacacttccttcggaaggtaactttcaattagaatattgttgtggctacggatttccccacctcttggatgtgtaaaatataaagtgtttaattttcatctattttcaggtagttcaattatgcattggttcaaaaacattagggaaaaattcgacaaaagggaattccatcgtgtggctggaatgtttttatcttttttgttcagactattcacaattttccgcagtgaacggtttgaattctggagaagacagaacaacattcacccctctaacttgatcgaacacaacacgagtagccattcagaagctgttgaagctgaaacatcgaatgaagaagatcgtgtccttccatgtatagagcgtcttcagagactagaaaaagtatttagcgaaatcagtaacaagcccgctacaattcctatagagaaggaaaaaattctaatggaatctatggataggataaaaaacgtcgagattgacctcgagaaaacaaagagggtatgttttacttgatcacatctgataattaaaccaatgatttgtttgttggtttggctaataaccatctgtttcgtcgcatcacagctagtccatgctacggtggtgaggcaaatcgagattgctgaatttctggacaatctacaacagtcgagttgtcgagtaagtcaactttttttcttttaaaaacttgatatgatctgatgagccaagtgtttgtgtctgaaactgaaaagagacatctttatttgttaattgcagcaaagaagattgttttgttgaatgaagggtatacatagtacaatgatctaatgggattggtgggggaagaaagagaagacactaaaaacataaatagataattatataataaaaacataatttaatttttttggggggtcttaaaatttcctctgaaaagggttgttgtaacattgcacagattgtagagagaaagagaaagagaaagaaagagagagaattgcggcatgtttgttgttgtttttgttgtttcaattgagcttctttgtgttgtctttcatggctatgtaattgtaatgtacagcaaaaagcaaatccaacactttgaatttgaaaatctctccttttcttccttacctttgttttttcttcaaagcatttcatttgttaattattattattatcattggattgtcaaactaggatttaaggtgtagtgaatgtggggttagacggttgatattggtgtaattaagtatcaggtttcatatttagtgttcaatagcaatgttcagttttattttgagcattgtt

SEQ ID NO: 185342 - DNA, 3874 bp, Cannabis indica
aataataataatagaaaaaggagaaaaaaattgatacctagcgaaaaggaaaaagagatctgcaactcggtaatttgttattttgtgagccatacatgaaagtatgttaggtaaggaagaaaaatatgatgatattttcttttcttttcatttaatagttagtttgaattttattttgattttattaaatgtgttaaatatagtcatcattgcataagaattattttgagaattagtgcatttggaagaaaaatacttgtagcatatgtttttaaagaaagatagctaaaactaaaaaatgaatgagacccaatgtaacgtttgaaattaaaataaaaaagggaaatgtatggagagatagaaacaaaataattataattagattaatgaaaatccaaatggggtacacaataaagattttgaagtatgaattatatgtacaaaacaaaagagcagccaaaatgggagaattaaaataatacaaaataaccaccaataacaattaataagaagaagaaacaattaagagctacaaaatatttataagatttaaaaattattagaaagaaataaataataattatatgtaatataaaataagaagtagctagttaattaagaagtggattggttcctatcagaagccaaagcttggatggaattggcgaggttgttaatggcttcaacaagtccattaatgccttgtctgttgacttcattctttgacttctcaatctcaagtcttctctcatgtaagcttacaagatcttcatgcctcttctgttctccttcctcgcaagcttgaagggcttcggctatgatagaagcactcttggatatagctgtggccactactacttgttgttgatgattatcacttgaggttgatgagcttattaatctcccactactgccactggttgtaggaggaggaactacaggtccttgatgaggttgagtttgagtttgagtttgaggctgagcttgatgaggttgacgatgaagaagatgaggatggtgttgttgttgctgttgctgttgttctggtccttttcttcttctctttgctggtgagtgaggatgctcgcttgtatcagtatctgagctatcacacatctccaaacgatttaaatatgcaaccatacattcaaccaatcaatatatataaatatatatatatatatatctatacatatcctaattattttaatatacatgaaagtcaatatcgtatgtatattttaataatcactttcttttatatatatgtgatattgattaacatataatgaaatcaatattattaatataagaactttgctctttctctttgtttccatgaagtaaaaagagaaataaggttttccattattatttaactaatgtacatttcatgattaattccatattattataagacctggatagtgaagtatcaaacattttgctccaaaaaaagaagaaaataataagttgattttttttcttccttcacggggggtgagaaaaagatgacaatatatagttaaggaaaaatggcattggttaaattttctcatgaagaatagtagtaataaagaaaagtgcagtcacttagagacaaatagcaataaataggtatacagacagagagtgaaaatacctactgtgggcaataatggctgcgcgtaaggaagagcaaggggaggttgctgaacttgtacgggaggtggtggagccaccgctacctctgccacattgacggtaaccgacggcggcggaagtggcaatgctgtaagtggtgcggctgaaatatggtggggctgcattaatatagcctgagaagttgagattaatggagtttgctgtagatgatgatgatgctgatgatgaacaccactgctcatagttctctcaaccatttgatacccaatacttggactcgaactgggtatggaaatggaagggactccagtactactaattccacctgaaaccctctgaccttttttctcaaccacatcaaccaaagcttcatatatctgaggcaacatattagtaggcaagttcctttctttcctctcatttttctcaatcttccaataagattgatctccacttcctcctgctactgttgatgctgctgattttccagctatttttctctcataatctctcactttcttgtaatccctcatgagattatcccacttgtcattacactgattttggctcctgcaacatccttttctccaacagtaatcttccacccatttccatctaagctcggctggtttattacttgtgggagtagtactaccactgcttcttgcttgttcattgtcgttacctgagattctcttcattcttctctcgtcgtccatcttctttgcctcgatcagaatcattgtctcactcaccgtccagttcccttttctgtagtctcttattagagtagttgtgttagtaccttgatcagccatagtatatagtatatatatatatatatatatatttatatatgtacttacttaaaaactctataatcaccaaaacacatgcacaaacgcaaacatgaagaaaggaaaagaaaaaaacactaaggttataatttgatttgggatgtgaaaactatttggtctatttggctttttttgtttatctgtcgtttggctttgatggccttgatttgatgtgggttatggtgaaaaagaaagtaccacttctactacacaacgactcctcccctcccaacaaaagaccgaaactagtcaaatctcaactaaggttgctaatttaggtaagagattacaagtgggtttttgcctaaacacaaggataataagtaactcagtgaaatgataatgagtattaagctctcctctctcaccaccaggtgttgaagtttccaataatgtgtcttttgtgtgtaaagggttgggcttttatttatattttttcccttttcaaattatatatgttaggaaaaactacacatggataggtgagaaagaagaagatcatgagctgtgttcctccatctataccctatgatttttcctttttctttttaactcaaaataactttacttgaaaatttcgaaccctttattgttttgctctataggatatggttgattgataactaaggcaaattacactcttttaaaatcctaaaaaaatcttcaaaagcttaaagttcaaatctaaatctacttattcaaaccactgctagctctccccacaaagtgaggaaaactacaagagagagagagagaaagaaataagggatggtgaagatgtatggaagagagagagggaaggagagagagagggagaggagtgagtaccattataagaaaaggccaagcaaatccattcaaactgacatatcaacaaaccccaaaaatttcagagaaagagagagaaagaaaggtttagaagagagaaagatacagtgcttgctggcacactggaaagtcgacttagagtatgactaccactaccatacacgtggttaacttcaatcatcaccacccgtttcatgtgtaacttattgcaagaaaaagttattggaggactttacagcaaaagcaaaaaagttgaaatattgtgtgaaaagtgaaatggttatccatgtttaatctcctcttaatggttatccgttttaaaaggaaaagaaaaatgttcaccgttaaatttcttacaggagtactgtattcttttatattctctttcaattcaatttcttttagtcccgtgccaagaaaaattaattcttgcttttaattaactttttttttcactgaattttgtaacaggagctaacacacatgtttttctttccttattaataacatcctaaattattttgaaacttttttatttttacact

SEQ ID NO: 185343 - DNA, 8462 bp, Cannabis indica
ttttttttaaatttatctctttacttaatttacctactacagaactaagtaattttgagactattgttagtaattggatattacgaacaaataaccagtgttacctaattagaaccacatagcataagggttaacaaactatgataatcaatgaggaacaaggtttagtctaacctatgggtgtgtccttagattatcactcgcgataggatgtgaaatcctcatacttgtacatgatgttatatgtgtgaatcaaccatgggttacttatcttgttgagttgttgaaatctaagacaaagtccctgattttcatgtattttagaatgccaaataaaatagtagaaagtacccctgttgccataattcagaacgagatgaaatttattaaacacagtgtcggctaaaggaaataacagagtaactaatttgcttaaacgaaaaagttaagaatacataatactaggtaagtcaacttttgatatacatgtctacaatatgttgcaacttgtgcattgtttgctagattttggacacatagcataagcatacactatcgttgtggaataaccatgagacaataaattagtagaaatttgtggtaggcccagagccccaccaagcttgtttggtgttgtggaaagttaaagcagggctgactctgagttgaaatgggctataggtaaattttttttttaagcccttactataaagataaataatatttttaaaaattattaaaaaaaatatgtatattttttaaaaggtaattttctgatttgggcccttaaaataagtaggccctaggcacgggcctagcccgcctatgtccagggccgaccctggttaaaggcataactattggtcatcaacattatgtgacgacttgtgtggtatccttagtgcaatgacatgttcagtttaagtaagtagtacaagctcaatgacgcagtacgattgggtcgagcccatagtacgtgttgttaattgtagaaagtggtcaactccatgtcgtatgataaatgatatttgttaatgaagaaagataattaaagagaaagagaacaccacgattttatagtagttcactctcttgtacgccggtaatagagctacggctatttgggattttattaatcacaagagagattacatgaaaaaaaaaaaaatactaaggagagcttcaacttacaatttctagatagagaaacatgtgaggagagagaacctcttaccttataaagagaattatgaatatgaaaaatcaaccagatagcctcctatttagagggaagatggtccaataaaataataatataaaataatacgaaattcgtaggaaattcacttgaattttttgacctgcttgcaggtagatttttagggcaaaaaatttagaattgcgaggaaactattacccaagagtagatagagcttgaaaagagcttttcaatgcacttagaagcacatcatttcgagttggaacgattaagttatggccaaatcattgacaaatacgtggccatgttaatgttaacataaaacatcaacctacgcgcccataattctgtttcaagagttgtgggcatattttgagatgcctaaatggtgcaccacttagctaatttcttgtgtatggggaattttttgactatttttgtaatgaccacatgattaggcatgaaattaactgattattagcagtatattaatagctaattagttaattatggctatataaatatgaaatttgatatttccatgtgtttaccgaaattttttgaaacatagtataaataataagaactgaagaataaataatcaaaagagaaagagtaaaaagagacaaataattttttacatggttggggcgttaattagccttagtccacgagtcagtgttatttagtagttctttagcttgtaaatgccttcgagaatacaaataatgcatgttctcaagtttgcttgagcaaagtttgcaagagagctcaacccctaatccataggatttaaggggtattaatagtagtttaagaattatattaggtttcccttttccttctattagggagtttacagtaaataatacgcttaggctatcttatgaagtccaacccacaaagaagacgatttcctgactaggcaggttatctttggattaatttggtcaacaccgtgtgtactgattgtggacaattaatctgcgaattaattgcataatattcattataggaagtttccccattaatcttgataagatactctattgtgatttgacaactggaatttccttatttgtgcgtaggactaaaaaggaaaactggaaaggtcttgtagaaactcacggtctagtccctctgatctcgtggtagcagacatgcttccgggtatggctggctgagggcaaaaggttttacgattgtggagctaggatatgttctttgaaggacatatccaagtgggatcaacctactttacctttgctgagggtcccactgatgggtcttgggtgttgaactggaatccatgtatccaatgctaaaaacgcggataacatttacccccaagcttttagaatgctacgtatggtttaagcttgcatcactcttttagtttggaattttagaaactgaggaataaaatcgtgacattttgaatgatactcgagtgcggaaggtggcttccgtctgtgatgataatctgtccacatgtcaatcgcatgggagtagaagggcgcgaccatcgaggagtcattttcttgaaacgactatatttttgacagttgttcactttttggcacgaaaattaaaaatatgcattttcatcattgatctatgcctcagttttggagagtattaattgcgaggatacacgcagatcgttgaactctctaaccgttggatgaaacttgtatctctagaaatgggattgtggaccgtttatccccttttcatgttgattactttttgggtataaataccctttataacttcaaattgccacttttccccatttttcaaactttcaacccttcaaagcttataactttctctacacttttcaaaactaagaaccgtattcaaaacaaaattttcttctttaatttggaaaacaccgtagacttttgccttcgtctattgttgaggattatggcacgatagttctcacatcatcaacccctagtgatcaagacttttacattaggagaaattgcgagcctggatgtcaacacagaaatcgatttgctgattgctttagcatctcgtcttcgtgaatggtgtgatcaacttcccagccagacccaacaaatactagcttgacatctccgctatcaatatcaagtatgttgcttcttcatctatggattgtattttctgagttttgttgttataagaaatatttgcatgttctattctgggatgcgattacaactttttacttgtgtgattgctgtcttaagtagatttaagcaccacaagccatactatttttcaaattccctattggacgttcttggaatttgttgatttgcagcagaggtgctggccaaaattttccttcacccaaaatccttctagttttgggttctccgttaaaatctatcatctttctctctatgttgttcgtaacttcctatttggaaggaatgactcttggaagttctcatttctcattagtatgtctagttgggacctctccaacagatccctttctatgttaggtagttagggtagctaattgcttgggttatcttcttttgtacataaattatgtctaggtaaaatcatcgagaggaagctgattcaaaggaagagataatggagcaagaaaatgctccaaaattggtcatgaataacagtctatgggagatggactagcatgtcaaaaaattcaggaattataataacctaaggaaatatgagacccaacgagggctcgaaagtgttccaggactactctggaataggcttttcgttcatagggagaggcccagtaagtgtctagaaggaggcttcggcatctggaactgggcccatattaagatgggtgcacacctacctttgagatgttacttttctaacttctgcaccgtggctggagtagcacctttataactcattccctaggcgcaccgttgctgtcagggggtacttttttgtgttctacatggcaagcttatgccaatgttggaggagatcttgtagttctacaagatcaaatctcagcccatgaggggccataaagataaggtgggcttctacatgctggaatgctacactaggagtgttccttaccctaccagctttacgaagtacacgcacgacttcagagactactatttttacacctctagcttcccactaaagagggttcatacccttagtttggattttaacactgcaagtaagcgttgttcccttcattcgactttagtgttttgcttttcctcctgcttgatgtattctgatacctttgttgcatctactagactgccttccccaatcacctttgatctcgaagttggaagagagaatagctttttagaaatccttctcgtccaaagagttgcaagtggaggggcttgttaccactaagaaccttaaggaagtacgcctcatttccccgcatcaggacgtaacccacctttttgtgaaggaccaagttcaggatgctctctaaggggatccaaatgaggttaaggaggctattatagttatcactactgaggaggtttaaaggcagtaaaagtcgatgaacaatggttggcgattggaggagaaaattcacaaagacctaagcgaggctgaagaactcattatcaaattcagggaggtagtgcagaatgaaggtgctccgggagcgagcacctccgacagtggtgagacacccttccatataattagggttgacttagaggttgtcgatcaatgtggattcaatctatatttatcaaatttagatcatcataaatatccatacagtaagtatatatataaaatagattggatcattaggagtcccaatcacttcgtttcacctatgcaccatcatttaagagtagatgtgtttagtaaaatttacttcccaggcttcttccaacacgagactaacttaggttaggaagacattgctcttttcgctaggggaaattattttaaagttaatggtttggatcttcttgatgtcttgcatgataatttattgtaaagatcatatcttttactatggccttgtttgatggacattttgtttattttgtgtagatcaaccagctaccttacaaatggggctgctgaataggttcttgggtaacatccaatccaggtctgacatggttcgagaaatcgccaaggaaagcagtgacaaaggcaagaagagccaggcttccgagagcatatcttagcagccagcacctctgactttgaatctggaggttgtttctaatactacgggcacagaaaccttgtttacttccatcatgaatctgacggaacctgttctagtcatggcacctttaaggtaggtccctattgagaactttggaagggacaactctaattacaatgggtcgatcacgatcaataaaaaatggtctgcctcttctgaaggtggcgctagcaagaaggcaagggtggagaccaaggagaaggttttataattggtagccttaagaaggccgacttcagaaactcagtcctagaagggggctaatgtatttgatggcagaaggccgcctaggcgaagcaccaaaacatcaagggacaatcaggatccttctccaccactctcagcatctaagattatcccagccacttctactcaacagtccatggagaggaccaaattacctttgttgcctctagtacctttcaatcttcctatcaaacctttgtcgatgatggaaggagataacatacgcctagaagtcgttgagcaattctattagaagaggcgtagcagtgagtacgaagagatgaagaaactgaccaaaatcatctcctctagacataatgatgagtttgttgactatgacaaatgggatgaacgctgccctcctctcattaacagagttgagacaatagagaagctccatccttgggttggaactaatgtgtcaccgtttctagctgacctattggaaaagagtgctactacacactgtaggctcggagctgacaagttttccatgatggcgagcagggatccaatatacgtggatgatgctatgaggacctagactaatgctctaagtttaactttcctttgacttgaatgaacactttgcacctttcaattgtttgattcatttgcattttcttttttgtaggtgggcttgatggcgggcaaaaattgctccatggtcattcagctggcctacaagcttgaggtgttgagggcggagcatgccaatgccaaaactgaagagggagcaagctatcaatgctttagctgaagccaatgccaggatggaagctatcgtaaagcaaagggtggctgactctttggacaaggccttgattcgcgaaaggaaagcgactaggatagagagggactgtggagacaagtacaaggacttgcattccacagctcttactaaaattaaagacttggaagccaacttgatgcaagccaagatagatgcctaagagaaaaaccaacaacttaccaccctatctttagagtataataaaaaggctaatattattcaggacaaattcattaatgaaaccactctagagagaaaggtgaagcatcatctggagttgtaacagaaggcgaaaaaagtgaggcaaaggctattcaaagggctgaggaggttaagactaaattgaaatcatctatgaaaacctatgaagagtctcgaaaaaaggtcatcgagttagagggtgaaaactcagatttaaagggacaactttagcagcaatcttagagaagcaagagcaagaagctgagcagaccaaggctctagaacaggcatttctctactcagtatacaccatctagcatcatgataaatctgtaatagatctctttgatgctaaagagaggaaagatatgatacctaagatattggcactcaaggagtggactgatataaggaagaaacatagaagacagaagcggtcgatcttggaactaccattcctataggtgagaacacggatgactcagctcttccagcctcttatgttcctgttttgaccaactctgtaatcctagaggtctcgtctattgtcccaactgatgatgcacaattgctgaaggatctagcccagccttaaccatcatcgcctaccttaaacaaatttatatttactattttttcttttttgggggacaagggtccgcctttttgtgtgtcgagacgatatttgatacccttgctatggggttttcaagtacgtagtactgtttaattaattccttagatatttacactttaacctatagaatttgctaaggttatttcttccagcctcatgaggttctagttccaaaggcctgaatctttgtggttttgattaaatacttagacttaaatatttttcttagttttggagaaaaatatttgaaagttttttcacagaaaggtttctctagaacatcaaataactaattaacttgagctaattaattactttagaattaaacctttcttgataaatactacttattcttagagctttttgaacttaactatttaattaacctcattaattaatttatttaagtagtctgaatattctagttgtgttagcctaagttaaccatgaagcctaaaattctattttatgttaacctagattaactatttaatatgtaataattgattccaagtataatagtaggttacttccagttccctaaggttctagtttcgggcaatattccctactcttatacttattccctactctttactttagagttgaaattcttggcaattttgtttgatacttatagagttggaactgtgactgttctcaaagctcctcaattaaagcaagggattcttgaagtagagcatggttttgagttgggtcttagggatccctccgatgtgtaggcactgtggttttaactagattatgacctcacatccataggtcacggagtacggagtgtggcctgtataggctctttcagtgtttctataggcccaaagaacttttggaagttcttatggctagtgtgctttataagcctgaagcttcttttttaaagtggtcttcagaattttattgacggtttccacttgtccatttacttgaggtctagccacagcaaaaaagctttcgatgactccatgtttggcacaaaaatcattgaattgatcactattgaattgctttccattatcagacactattttgtgtggaagtccatatttgcacactatatttttaattatgaagtccaggggcttcttggaagatactatatgttggaagttatttt

SEQ ID NO: 185344 - DNA, 5179 bp, Cannabis indica
ccatttctgtgtatatttcaactaacactatatatattcaccaccatcaatctctcgaactccctttgctttaaacacgaaacagctaaagcataagataatagaaagaatcatggtgaatacaacatgcccaaagagtaagagtgcaagactccaccaccttaaaacacaagggacaagtagtatatatctatatcaaggcaacttttaaaattatagctaaggtaattggaatttgttggattttggctcctttgtgtaaaaagtatcccccttcatcatttgtaattatcccaaagattttgattcattctcttttgtaaacagtggtttgtttagatcttaattttgaagtcatccaatttaatagtgaaatgattagcgatgttcgggactgacgtaatttatatgttagaacctcataaatttcctgtgctcttattttttctatttaattataagttttgtcagcttttattttcttttttagcattttatttcaatatatagctttattttgtcaccctagtttaagtttttattcattaatacattgtcaatataaactttttgacatgaaaagtggttaacatcaatttactagattggtgagatgattaataagtttatgtaaataatttagagatttacaaaatttatatggagctatatacttgagtttttatttctcacaagaattacagaagaaaaaaaaactaagtatttaagctctaggttctagaaagagaaactaaagagactttgaccttgtgggtagtttcttaaaagtgaaaaatcagctaaggaagttctccttttataggtgaaggagacccacaaaaatagaaaaaaatataaattagatgtttttgaccatacatgatgatctaacagtgaaaattagctcttggtggaaatagccatttctcagatcccgacgagacccgctgctggtactcgaagcttatttttgtaactcccttagggtaaaattttatgccaatagctttataattttgattgaactaggagatatggcttgttaaagcattgaattagctttgtaacgcaagttgaattgcattaatcgaatcaatatttagttatggttattttactgaaggcaattcatgacccagcgcccaggttgacatcccagcacctaagtccacatataatctcaatctagacgttgggtaagtgtaaaaacgtccaatggatgtactttgagattcctaagtgatattttggcattacttaacctgtttttatgttctggtgaagctggtcactagttcttagagatgttgttgttctgcataaatgagagactagaaactcttcattttcaagagagtttctcatgtcagaaatgagaaatgcggagttttaaatttgacttctctgacttcatagatctttgttattataaaaaattagactggcagtcgaaacaaaattagaatcaaataagcagaatccaacgcaccagaccacttgtcaacctgggcgctggatactctatataagatctcgttttgatacattcgaggttcttgaacttgaggatgaggtctcctaccccgtttttaaccattttaaattcattgatcgaatcagatttgctatatattaataggaaaacttctggtcttcatccaaatgaagaaaaatctactttatattgttgtggaatgcaatacaatgaactttggatgcactactacaaaattagcttttcccaacggtttacaactgtcttttatattatttcccatcgattcctaaaaccgttagctatgtaggtgtcatcaaaataaagaactttaaaagacggtttataattattggaaaaagtcactctaaatgacggtttacaactattagaaaaagtcactttaaataatggtttataactgttgaaaaaaaataattttaaatgattatttataactgttggcaaaagtattatataaatttaaaaaaaaaaatacatataagctcatttattttatatgaattattatttaaattctactattttgtattacaataataattaaaaaaaataagaattgtaaaacataaattcaaattaatttatttgcaacatttttatatacaaaccactgatttaggagacaataaattcttaaatcacaaacctatatccaacttaaaaaattacactaaatagtaaataaattatacccaacgctttttgctcgttatgagtttcaaaatgagattcaaagctcgaagagaagcctagaataccaagagcagcggttgccaaaatgttgaaggtaataatctcctttagaagatcgaaacaattgataatcatgtggatatgatgactatagttgtatcaaaagtcaagttcaaatattatttttatttaattaataccttgcaaaacttgatttgggtacggcgtcgctaatttagaggtagaaagaatttgttaccaaagtcgtcaacgtgaaatttgttatggtttggttgtagtgtgagtaattatgtaaaatgtcccacattaattttaaatgaaaatttaacccatatttaggccaataaatacaggtcccattactatttgtaattcatttgaaaatttgtattcattttattttataaagggtggttgtttactcaatcttgcctaactctaatcttgaagttaatttattcaatttgatagtgaagtgaatcagcagcccggaacgtaggtaacttttgtatactgaactttaatttattatttatttatttatacatttttgcttttattttctctttgagcattttattttaataattttattttgttgggtcattttaagtttctattcatcaatataatagaaacgaaatatattgttttcccaacacaatccaattatccaaaaaagctttctagataaatttaaattttttgaggaacattacatgtaatttatgtgattatttaataaaaattattattttgacaatttatatattttttggtcaattattttttaagggtacatgttaactttcaatatatatatataaaaaaatatatataaataatgtgagaattttagggttccatcctatacgcacaaaataagagaaaaagggatcaaatttaaatatttaggcttatttaagtttaaattgtatgtttatacattatcaatgtaacagtatccaacaatgaaacacatgaaatatcttaacctttttttggtaatattgcaggtatgtactaatctgattaatttaatatttattgttttgacatataaaaagtcacatatagttaagatgcacacagctaacaaagataataataaaaaacaaggaatataatgacatagggagtctgcatatatttcaaagctcaattcatgttttattgtaagtaatatatatattatagttgcataaagatgagtagtaatatatctcataaaggaataacacaataatattaaccataaaataataacaaacttaaatagtatgctgacatttgctgtaataaaatagtctcatcattaaagactaataataaaataatacaaattaactaattagttacattaaaaaaaattgagagaaaaagatgaataaatcaagaaagcatcctttcataaaaaaatagagaatcaagaaggcatatatgtccaaaatattatatataattcttggtagtagtagtatttttttgtgtatatatatataattaataataaaagtcattatataatatactaattagcatattattattgagcctaatctcacctttaaaaagataaagaagaagagaagaaaaaactcaaaacaaatcatcatggatgtaaccaatgttttccatatgactggaggaaatggccaaactagctacacaaataattcttctcttcaggtactcttattaattatacctctaatctcttttaatttcatttatttaccttaattaatttttttttaattattattattaaattttatagaagaagggctcagatatggtgaaacatataacccttgaagtagtgaaagaagtttatcttacaacaactccaaaagtattgggaatagctgatctgggctgttcttctgggccaaacaccttatctattatcaaagacatagtcaaaactgtccaaacgacaagtcgtatgatgaatatggtttcaccaccagattttcatatttacctaaatgaccttccaacaaacgacttcaattccatctttaaatcattaccagatttctcaaaagaattaacacagcataataataataataatagtactccttctatcttcataggggcttatcctggctccttctatggaagactcttccccaataactgccttcattttgtatattcttcctacagtttgcactggctctctaaggtaatataaatatagtatgaaaatatttgctgtataaatatttaatatttttgaatttatacactttttttgtctttttaaaaataccaaacattacacttcttgtatatgttacatactaacatgtccagacagaaccggcccaattgggccaaaaatattgggaatttttaaactacctacatactgtaattttcaactttttttcttttttttactgtaaggcggaatttttttcaaaaatactgtgtaagttttatactgtatactgtgttaaatttttactgttgttctacggttgtttttaagttgttttactgttgtttttaattattctgttttgttgttttacggttgttttataaaaaaataatatttttgtaaaaaattctgtgtgacagtaaaattataaatttttgttcaaaatccagtatttttataaaaattccaaaatattgtgtgttgagtgagtattattaagcttattttaccaaattttacaaaattcctatttttcactataatttttttattttattaatttatatttcatttttttagattattttttaataaatatattgtcacattactcaagatgtcttgggttagatctgacactttcttatcattattatgagaatcatatttgattgatatatattatgttacatatgtatgtatgtaataggttcctctaggtttatatgatgagaagggaatgtctacaaacaaaggaagcatttacatct

SEQ ID NO: 185345 - DNA, 4368 bp, Cannabis indica
acttcaggcctgtcagtaactcccttgagcacctatattacagtaccataaataagaaagaaaagaaatctactaaaagaggcttataatatgtaaacaatatgaccaagtacatacctgaaatgcttcactttccacacgtataattacaccgaaagtcatattactgcacaagattaaacaaataaaatattttacaattaccattaggggaaatgtatccttaatacaaaaagcaaaaaacaaaaacagcttactccaataacacaagatcatgaagttcgtagtccccaattttggtaacacctgttgtgacttctgagctctccacaacatcatcagcaaacacacgaatctgagaaaaagaatgctcgcatcagcacaattacagttataaattaacctcaactccagtgtttgtaacaaaaactatttccaaataattaaaccactcacatgctcctttgttgtatcagatataataatgagcacatgctgctcaaccttaacaaccataccagttgcaccttcctgggtaccagacacaactttgacatgattgccaggttcaaagtacttgcagagctctttctcatttacagccaacgttttctgcaaaaaaaaatgatatgattactgtcataccatatcaaacattttaccaaatttttgggcaacgaaatgatgcagtcaaacaaataaaggaaccacttctaaaaaatttataacgtaaaaataaataaaagcatatattcttactggaaggcctttcatttctggtctgatatgaacgttatcttcctcaactttctcaacccatcctttcaaatttttaagatctcccttgacaacaataactgcatcgcccttcaaaaagtgccccttttttctgtttgcaaataaagtagacagactagctatatctccatcaccattctcgccaggtttccggaatttctcaagctcatcaaaggtaggttttatattcattgcactaatggatttcatcgagactgttttatataagaaaccatctttaaacagcatgccaccaatattctcaaagtaatcaccagtcattgcatctcgccgacgttccaccctaatatgaagctctctggaaatacatgtatacgtatatataagtaaaccaaaacatgactaaaagagagtaaaaaaataagataagttaagtttagttcagttttacctcgcctcatcaatattcataaaacgtggaggaggaacaaatgccttcttttttggaacttctctaccctcctgtatcacagagcagttatcttaaaatgacatgagaatcaatcactgatacaattgaagcctcacatgaagaaagcataaaaaaaaatacaaaatgacactaatttcatttataaaacagtctatagaatacgactcccaaaaaaggttgtcaacctcaccaatttatttgcaagagcctgcaggtctatccttggaattagtttcactgtaactctctgtcgtacattatccacatcaactacctgaagaaacagagcttgatggtgagccataaacttgaggccaaatgaagtcagcaaaacatggaaagtgaaatcaaaagcgaacaaaacaacaattagatccatactttcgcaagatcccctttgtatgtaccaatcttcatcctgacccatgtatccctagaaagatctattgctttgctctcaactgaaagaacatccgtcatttctctaattggaacaagcattattttctgggcatataagttgcggagacctttgcaagcctaaagcaaaagcaaatccttcagattgcagtttaacaaatatcaaacatttcaaaatgcacaactctctaaacacacgcctactgtcatgaacagagtcaacttaaaacatttgaaaatcataaacacacacctccttcacatgtgcttccttgtccgcttcaatataaatgtagttcttcagatgatcaagtgcaattacagatctgatttgcagttcaggtcccttatcaatgtacttttgcattaagcaagcagcaacttctcgctctttaccaatctgacatgatcaatagataaaatttaaaatactcatccaacaaaggggcaaagttcatatttggagtgaagttctaaaagtagtaatcataccgcacatttcaccatccacaacttcggatccctaacagatggcaacaaagcttgttggtctacatcagtggtttcctcatcatattctgtgtggctagaccttgcatatctttcttgaattcttctctcaagagcttcaacatcttcttgatcatcctcacgtggaagcaatggacggcggtgcatccttcttccatcaccttcgtcgggtaagtcagatgtcccatcgactataaaatctgtatgaagattctcgttattagatattggtgaagcaaaaatgatcatatgcatgcacatctagcgaaaattttcacacatcctcacacacacacaaaaaggagcaagtgtgaaattgccaaccaatatgaaatgcctgagagtttaaactgacagtattgttcatcaatataaataaagggttgtgccttttgaatcatattctaaaatggccattcatcactttttatttttttcccaaagggaatgtgtgtccaccccatgtcaagaaaaaaagtcacaatattactcttgcttgtctaattaccagcacttgaacagagaaagttgtcagaattattaaaaacgaaaaatgtgaaatgtttaaccaatggttcttctgatgaaaatacaaataatgattctactgtccacaatattttactttcactgcacatttcaacgtaaatttgaatataagaaccatgtcgatagtagactaatattagcacacattcaatgaaatattctaaataacaacagtgcataacaaacaatatcattgtatttgttcatagtctgggtagacttagaagctaagttcagaagactaagttgccaaaagcaccaaaattcattatatatatatatacacattttaaacttcatctgagtaaagatgtattgctatattaagaatactgctgagttcagatgcaagttcatctaaaacattggctacacctcaacaatgttaatgcaaaactctcaatttgtttcctccgtattccattctcttgaaatttaccacaacattcaactattacagattaatgtgctattataatagaaaatactttctaacactaaatcataatggtttcctatagttttcattctgtcatgccagaattgatttcttcaagtaccaattaaagccctcaaggagttaacacaggggaaatgcgtccctcaacaacttgtcaatttgaaaatataagaacccatgtccatcatttcgatttctttttcaaaaactagaattctacgattcagaaaatcccaaatatgtttatattctagttcttagcaacatttccgctcaatgaaatcctaatttgttcttttgtcagcgaaaatatcatttccaaacatatatatgaactaattcatttcaccaaccagtctaaaccctaaatccacgaaaaaacccaaaatccaaatcaataaacgtaaacttcaaaaagtaacaaaattaaaaggaaatgggcataccgtcctcgccgtcatcttcttcctcctcatcatcactgtcaacttcagcttcgatttcaaaaaatcgagcaccagtgttcttgtcactgcgtttcttgctacttttacttccaccgccgccgccgccaccgccaaattcatcttcggactcgtcttcttcctcgtcaacgtcatcctcaataaattcggatctccctcgcttccgagtcgaagcgccgccccctccacggtggccacctttgctgacaggttcatcttcctctccctcctcgtcagaatatccatcatcaagttggtcgtagtcctcaccataatcctcgtcagggtccatgtcttcatcttcctcgacgctccgacgcggcatggttgaaaaggatcagcaaagtgggggtaagaaccctagagagagaggagagggattacgttactatcgtatattccttcggttttagagagagaaagagaaagtgactctgatccgagggaagagagggtgaggacagcccactcctataaatactgtacatttatacatagatatatttttcttaatttttttttgctgtaatggttgcggcgttttgttattgggctttttattgggctgcactaaaagagaaaggtaaaattagatggtataccctttttaatttggtgtctctcaattttacccgtaattcaaatttttttaatttataccttctttttca

SEQ ID NO: 185346 - DNA, 3547 bp, Cannabis indica
ttggtatcaatgctcctagcaagtagtggaacctgacaataatacaagtaaaatttaaggtttaaaaacttcattctcaactacgctttattactttatatggcagaaaggtctcctaaagagcaaaaagaacaagtttcttcaggacttgaagtctcaaatgataattaccatgtcaattcaaaaaacaaggagaatgaattttcttctgttgcaaaattatgaaacaagactggtaaacctactaccccgtaatgccaagacaaacaactaaactcatgtccttgacatcctgtctaagaaaccaactgtagtttaattttattttttttttttacagaggatatatcatttctaactttgtttacaatcgatttttagcttacgacaacatttaagtgcggatatcagcaagagaatttctaactataacctaccaagccatgcaaggagaagatttgtacacaatctattgacgatgtcccaaccagaagaacattgaagagtggggcatggctgatcaaatgactctcacttcctgagtaatctgcaggaaccggaggtgataataatcctatgataaaaagacacacattttcctgcaaaaaataaaaagtatatacattagtaactttagagaactagctaaaaagtgggagattagatttaagttgtctgcctttttcattagtaaacaaaatcaccaagacctgaatactccaaccacgaaaaagagatgccccacaaagaatgttagcagccgatatcttctcatcatctgaaccattcaatgcaatctcatatattttctcaatctctgctaagcttccatcaaatccatgagcttaaattcagttgccatagtattgggtatatttacgaagttaaaaaaaacaacacacacacacacatctcaaagacctggcttcaataaaaagaagggtgtaactgagacgatggctatcatggtcaagaaatattatagaaaaacaccagttcaataaatattacaaaaatacacccgttcaataaataggaaaacacatttattcatatagcatcaccccatttagttcctattattaggtttgaattatacaaatttttttaaagaaaaaatagagtattaaattctattagacattgggtatactaactaagcctaaaattttacaaatagaattaaagatttaaaagagtacaatttagtcattttacttgagataaatatgtaaacataaccccccttattatatttagtaagcttttgtttatttctttaaattgggttctacaatattgatagaaaaaatatatatatatcaccatatgtaatgatttttttccctaaccatttatcttgattagatcataatctaatggtggctgttttctttagttggatgtttaaaaaaataccatgtacacatgattcaaaaatgtattacaataattaatcttttgttttgtttgaaactacgatcccacctagccctaccatatttggggactagaaaaactacagcaattgctctgtagatacttagaagttagaagggagttgaacctctcactttgtgagagcaattaattattcattcactttctctcctaagaatacaatttttttcttttcaactgaggaattcaattttttttctaaaaccttactttctagatatagtagaaactaaagacatagtataacttcaattttttttaagagtaatttgtggcataaatacctaagtttaactcccagttgcaaataaatacccaagtttaatttttggcagtaataatacttacgttataattctagaacttcggtaggtacctgactgttaagtgttaattaaattgtcacgtaacaatccttgataggtcaagttcattaatttttttttaaaaaaaaaaattaaatatactaataagaaaatgacaggataatgtcttgacatttaacggccaggtacctatagaattccagaaatataacttaggcattattaccgccaaagattaaacttaggtatttatttgcaaccagaagttaaacttaggtatttatgccgcaaattactcttttctattcacccaaaatatatacatattacaaattctcattttctataatcatactaataaaaaatatttgtcgcagagtaggtatctacggtacaactaaaaattgatcttaggtacttttgtcgtcaaaaaataaaattgtgtaacgtgcaaccttccagtgaaacgaaagtatttttgccacaaatatgctaaatgaaattcttaaggttagttaaatgtttatttcatatcatattatagatgaatatcataatcactctaatgatgcaaattttacatttaaccttggaaaaaggagatttagaaaagtctgttcaaaatcagccatgcatgcaaggttggttcaaaaacgaggtatcaacaaaataaagtaattactccaccattacagattctctagagaaaaaaaggatttaactaaagacaaaaggagcatacctagaagctggagttgcaatcaaagcattaacgagtggtggagttagaggggaccccttcaccacagctccccagccagtcacttggccaggcatatttcgaggcaaatgattgctgcctgcattaacatagcctggccagaagtatgctgaagtgtctagtagattcctagcaatgcaagcctcaacaattagatgtctcatgttgccaactgcaagacagaacaatacgttaggataacaaaagataaataaataacaaaaacagaaaggctggcaaatgtccaaggaaagagcttgctgctctataaccacacagacactacgggaaaatagaaaggaaggagctcctcccacaaattctagtgaatagaaaacactaaatatagcagagatgctatcagcaaatctaagctgacaccgaaatcaggaaatagagaatagaaaattgttaaaataaaacaaaccactggccaagttgaattaatttattttataaggggaaaaaagtaactttgaacatcatagattggtaaacaaaacatagatgaaagggaaacaaagaaactggtgcaccgggtgccaaagaaaagcatccccgtatatgaacagaagttttaaaaaaatgtaatgtatttcaacatacaactacttactacaatttattggcatgtcattcccaccattgctttcgtaatacccattgctgacagtaagacccgaaatggacatcattgctttggctgcggcctgattggccgccaaagtaacagattgaggtggagtcaacaagccctcataatcacctagcaactgtaagctggtaactaaatccttgcgacgctgtccaaaagactgtttgtctatcctttgattagtagagcattgttcagcttcctccatctcttcactttcctcttcctcaacaatgttagtgaccgcaagcgttgaaatagacaataacatgcataagcaggtatcaagacgaggcacaggaccttctctaggatccctttcct

SEQ ID NO: 185347 - DNA, 1903 bp, Cannabis indica
aacacacttatattcactactcaagctcattaatttttatttatttttaatttctaatttacaggtgattatcagaggagtgacttggttactgcaacaatttccccagttagcagaccgtttatgaataagttttctatattaaacttggctggtgtatataaattataattatacttatctttgtattctcaaacactaattaactaacttgaagcttgactcatacatcttcaatggtaattaaaaatatggcacttcaattaaacgtggaaaggtaaaacctcaacttcaaaacctaacagagtactctaacctgttattttgagtctcctattataatttggaagactagggatttcatcaaaaacaatagtgcttggatcgttgggaagcattctaaagtagagatttggaactgttctttatcttgttctgatggctccatcattagtccttcagattgcaacccatacattaaagattcgattgcagctgatgatttggtgagcgataatggttacaagtgggatagagattatgttaactgtctttttatccctaacgtcagtttctctattctcttggctgacttgactctcttaccagagaaggataaactggtgtggatgtcctcctctagtagggagttctctctgaagcaggctttttgggacctaaacaaaaatagatttcaccttgagaaaaccagtgctctgattaggaaaacggatcttcatgattgtttaaaactttttgtggaaattgtttaaggattgtctcccttttcgctctaggctctcagttatttttaacaaccattgtagtgattgtgctctttttccagctttgaggggagtgacaatgcaaagcacttcttgtctgtcttaatgtccagttaccaaaagcttgtggttttctagtagatggggaactttcattgatgaaatccgtttccattataatgtagaggttgtacagtggatccaaaatccacatgactctcagggagtttacattttgatggataaaaaagagttcgtcctgttcgatgctattctttatcaaacaactctggtttataaggaacgagaattaccataaaggtggtaaatggcctgttcatgagattaaaaggaagatttatgagggattcaattggcactctaaggtgttggtgatagggggctctattcattaagaggcgcatcaaattcaggataatcattgggggctacctagacctagtagagtttaggttaatgttgattttgttaataagaattgtgttggggcggttgggattgtcgtctggaatggctgggatggtattctcgccctgtatgtcactaaagtctcgggtacctcagctcttcagggagagttggaagctgtcagaatcggtctggaggtgctttttaagatgggaatttcagaggcttgcatgtttactgattgtcaaagtgttgctgccacggttcaaaagctttctcctcctcattggaagtttttcgtttttttagtattttagagtcattttatgttgttagttgctctgtacagtgggtgcctagaaatttaaataatgtggtacatgtgttagctaagtgaggttaaaccaaggcttgtaagggttttttgagtttctgagaggtgagtttccacgtgctcaccaatattttatcgtcttttaaataaaggtttggaggtgttttcagccaaaataaataaataaataaaaggctaattaggatttttgtctcctgaactttgacatgtatcaaatcatgtcctctgaacttttaaggtcattgaaaatgcccctgaactattaagattgttggatttaaggactttttctaattttaataaaaagtctaactatggatgaaagttcaggggc

SEQ ID NO: 185348 - DNA, 3431 bp, Cannabis indica
ccttcaactaaaagactaataaattgccagtggtaaagcttcaaaatattacaaaaataatagatttttaatccgaatgaacatatgacaaaacacacctataaatgaatcatgctattaggtaataatacatcttagggatcacgctgatgaaagcacgactcataaaatatagggcaaaaaatatctggagatcctccagattctaatacgaagagggatgattggcatgccacaatagtattttgagccattacataacagacgaatgacccaaacgggggcaaggcgattaccccctccataatcataacaatccctactacaataacagtagagtggtgataaaacacattattaaaaataaaaataaatctaaaaaacaaaacatcacaaataaaaacaacccacaaataaaaggttcagtgaccaaacaccaccaataaacctagtgagaattaagtaatggtagacacccttgaccacacgaccctttcatcaatcggactcccaaagccacaacccagcacagccaagccaacacaaaccaaccacaaccttcgtatcgaacgaaaagacctaacactaaacccgaaacctcaaccaaccactaccaaggcctatttttaatgatcgaatccaactaataaaagagatgcatacgatacaccaacggtggcaaaaccgacacctcacacccaagaaggaaaccattagtgaaaagaaaaagaaaacttgattgagaggggagaaacaaggcacaaaagccgaatatggtgggaaaagcaattagaccctgaccaaggccacacccaaagccatggacaggcgacgagccctagttggaatgaagaaaaagggcaaggacgacaataaatttattatttttttaacaaataaattataattttgctttaaatgagaattttggtatgaaattaatttttatttttcgtaatagagattttcatatgtgttttcatttttcaactcttctctcaaaattttctaccacccaatattgatttttttttttctaagaaaaactattaaagaaaaagcatgaagtgaaccttcacaaaatttctctagtattctattcatgatcggagactttcactcattgaaaaatgactaaagcatgtttgactatggttttagttttgttaagatgtgttatcataaataagtgcaatttttttaaaaaaaataaatatgaagtgtttggttaatattctaataaaatattttgtttttatttcattagccaaaaaaaaaaattgtatgattagaacaattatttgatatatttacaaaatatagatattgttaaagtaataagtaacgagattaaattactaaagaaaaattgtaaataaaattaagaaaagagagctaaaattatgaaaaaatagtgacaaaaaattggttattgaaacaaaaaaacaccattttgttgttttctacattttcttttttttagtgtaaataaacttcattgaagaagaataatcatctacaaaaagagacttaaactctgcaaaaacatcccagaatgtagaacaatcaactacaaaaaagagacataaactccacaagaacatcacattgatttatatttttgcctaatagattagtgtattgactcagaaaatatatttacaagagtttcatacagttatttatgaatttcaaatcacttattgttcaatttttccaagaaataatgtcatacacacttttataatacacaaaatcaaaatcattaagagaaaaagaaccatattgttaagtaaacttgtgttgtgtggctcaatcaatctgttctgtaataatatttttaaagagaaaagatactgaaaacatcatgataagaaatattcaaatatggatatggactttaatgtttttgtcttggtgtgtgagtttcaataaatatgtaagtatgttcaaccatgccactcacttattttcaatgaccacacctgaaattcaataaaattcatggactttacacaaatctatatatttataaataagatcacatcatctacttgatttgtcaccatgttatagattttagattggatgggcaaagctcaagcaaacaatggaaaaactctcatgtgggagaaactctgtcaagaatcaatttcaaaatatatgaaaatgtgtcattacatttttatttccttgtatagcaatatataacaaactaattttctagccaaatttcctttgacagcaaaaaaaaaagtgtaatttggtgatcagagaatcttacttgtattcagaacttaatcatagatgttataattgaataaattctcgctcttaccttggtagagtacttgtgctctcttttgtgtgagccagctgactctcctccctttctcttaccttgctcgagctctaatatacatcgaaattgtgtggatatccaggagagactcgaatctcaaaccttatactaacaaaccacatgccagaccatttgaattgctctcgagagtcggaaagagcataactctatctaaggaagcacaattcgagttattttcttcttcttagtttgctgtctagaagcgcatgcaatttggaggacgaaccttggccaatgaaagtattgatgagggaagaatccacaaaccatctccacagatcaaacccgaagcaacagcgggaatcatcagggcagcagtctgatcattcagtttgtgccacacaaaaacaaccaaacttcccacacacatgtcgatggcaaagtaagcaccaaccaagaaaggaacggccatggccattgggaggggaacccatttaccgatatgctttggtgaaaggtctctaagaaggttggctccaatggcgaatgtgaagaagccataacagagctgcaagcaatgctgaggcaaggcagaaaagccttgaacacctagaattgccatgtttctgtagattattgcgtatggagctttgtattcaccattcgggtcccctacattaaaggccttgtagaaaagaaagaatgtgacaggcgccaccacacagcctattgcagtcccgatagcctggcttacaagcatggatcgaggagatgtcagagtgagatggccggtcttgaaatcatgcatcaaatcagaagatatggacacaatggacttgatcaaaccgcaaccaacaagcccagcaaccacaccattatcttttccaacaagatttgcaagaataaaaagagccactttaccataattataagccatgttcatgtctgttaaaccagcaccataagcattgcagaagctcagagaaggtgcaagaatataggcaacaaccacatagtaccatttgagctccgggaacattattgggatagtaatgatggaaatgagagcaaagaaaccataaccgacgcatgctatccaaagaggaat

SEQ ID NO: 185349 - DNA, 1387 bp, Cannabis indica
aatttcgagccatccaacctagttcgtcaatcctttcctatgtggaagataatgtaatttgtatgcgtccttctgacgtttgctccctctggatttaatttagtgatgcattattcttatgatgattatgctatttaagttgtttattctgttttttcattatatatgttttggttttgataatttgattaacagtttttgggtcgtagacgcatgattgagctgcggagggcaggctacaacactgatctttcggctcctttggataacattcccttctcttctaacccggaaagagaacgaattgaagaaactgtatgtcgttttgtgcatgttcatgttgagacaatatcccctatttctgttgttgcatgcacttaatagatgctatagttgttcaaccatacagtaaattacgagtgaattgctagattattgtgggtggtgctaactattttgtacagatatttaggaacaaaatgacattttttgccgctgcaaaggcttcatcatcatttccaccacctgagttaccagagattgccttcgcaggtagatatttcaaaattttcttggtgctcgatttgttaaatagtgtttggtgattatttatttttgatgtcaatccatgaactttactgctcataaaatattacagttttattctgtcaatggctacattttgagtttggttgtggtaacattctgaagaaaaatagaacattatgatgactgtttgaaattcaaattataattcagtactctatagtttgtcaggtactgtcttttatttgtttatttgacagaacttcagctttaagaagtggtcttttgttcacgtctgtttgttttctctttgtattttaagacccaattaaaatatttagtgtacaacattagtaacttatgattgcatatttaggaagatcaaatgttggaaagtcatcgctactaaattcccttactagacagtggggtgttgtgcggacgtctgacaaacctggcctcactcaggtgtgtaaaccttttcagaaactttggtgttggactttggtctccatgccttttaattgcagacatctgacaattgtgacttttctgtagactattaatttcttcgacctgggatcaaagctgtgcttggttgatttgccaggctatgggtttgcttacgcaaaagaagaagttaaggatgcctgggaagagcttgtgagtgcacaaacaaaaatgaactttttattccttcttgcatatttacataatgattggctaattaagtgtaatcttgactcttgatggctgttggatgagaaactctaatttgccctgtcagtgtctatcttgcttcccttagtacgccatgaaggcatctgaaaagctttatttt

SEQ ID NO: 185350 - DNA, 2260 bp, Cannabis indica
ttcttaaaattttgcaggatatcataaataactaaaatgtacatgaccagggaaagattaaaaaattattttggataccaaattagataaaggtacattggtgcatcccttttaagggggtgcaacgtagaattttttaataccattttagaccatgtttttattacaaaagctatatattggatcttttgcttaattcaatgaaaatttagatattgtatttttaaaatagtacaaaataaacagtgaccttaatttgtgtatttttttttaatataaccaacctgaaacgagtttttgcacgaataattattttaaaaaaattgtaattaatcttgttataacgcctccacatcaggttattgttaagttttaatttgacaaaaattaacctcaaggtctattttgtactattttaaaaaatataaggtttaaattatcaattaacaaaatagaaggtccaattgataacttttaccaaacacgtagtccaaaatagtatagagaaattctataatgcatccccttaaaagggatacatcaatacatctctatttgttttagtatccaaaataatttttcagtgaaattttttctcatggtcgtgtaaattataattatttaaggcatcttgcaaaattttaagaaattcagaaaagtttaacacgtcaaaaattgcgttcaagcagtatgttgtatgtgtgattattttattttatacgcgtgtaaaatagattgtttgaacattattttctatattgtaaaatatacagaatttcttaaaaatttgtaaatagctataacgtacatgaatataaaaaaaaatagactaaatttttttctagatgctaaaacaaatagatggtgcataagtatatcctttttaaggggatgcattgtagaatcacccaatagtatataccataacattaattagataataaaacaaattttacaatgcacccgctaaaaggggtgcaccgacgcactcatatctgtttcggtattcaaaaaaaatttttggtctaattttcaattatttatttatttttgttgtgtatgttttagttatttaatacattctttttttttttgagaaattcaaaaaatttaacatgccaaaaataaagttcaaacaatttgttgcacacatgtgacttttattttatatgcgtgcggagtagattttttgaacaatattttttatattataaattattttaattttctcaaaattttgcaggatatcttaaataactattataaaaaaaaattggactaatttttcttttaatgtcgataaaaagtgcatcgttgcaccttttttagagggctcattgaagaaaaatataaaaaaaatattcataagcatttttttttttaaaaaaataataatatatgagaagagacctactaaataaatccaatatgtattttagggtgcttctaccatgtatcccactaaaattagtatattgtacaatccctaactcttttagcttctgaaaaatctcttagtctaattttacataatggtatacgttgtgttaaaactatttaagatgttctcatgttgagaaatttagaataatttacaatatataattcaatgttcaaatagtctattttacacgagtaaaaaataaaaaaacccacgcgtgcaacacattttttgaaccttatatttttaacatgttaaatttgtttggatttcatataatcaagacaaagtgaactataacaactattacaaatgtagtaattcagagttgcattctatttattttttaaacagtttgtttgtgaatgtagtttaataaatgaattcaactcgttgagttaatatttgtatgtttaaatgataaatttaacttttcatagtttaaatttattaaatacactctcagtaattatatcagtggtctataactattggccacatcaataatttattttaaaaataaacaacacataattaaaaatgcacatttataattattattaagttaattagctttatacctttatatattttaatttttatatacttcacctctttatttttttttttataataatacattcttaattttatttttatttatgaatttgaggtgtcacatgtgtacacttaattatgtacacaccataataaagtttaaaagcaaataaaaacatgttatatatactacaatctcattaatatctaacaatgagatttaacaaatttaactggaattcaaatttatataaaaaaaaa

SEQ ID NO: 185351 - DNA, 2001 bp, Cannabis indica
ttttttttttttgtttttagattgattgaaaaacttattccaaattcgccttggaattaatgctattctttttacggtggtattgtgatatttgctttggcatacttgtgtacgaggatgatttcgagagagggcgcatatatgtcctcctagttcgatctgaaagagaattaatacattttttgtgcatttgtgcgtttaatagtagcttgtggtataacacaaacaaagaaattgattagaagaaccaaaataaaattatttgacctaataatttcgacttaattgggtcttgtttacctgtttctatttaaggtacttaatttttagacatcacctctgacctacatataagactattttttttttataattaagaaacttttattagccaaaacaaaaaaaacactacatcaaagtagccacaaagggggccacatttcttaaacaacccatagtgcaaatcttagcacatctcgcccaactcgccaaagcatttgctatgctattcccagtccgaggaatataagaaaaaattacaagttcaaaacacttacaaagtaatagacaggattcaaaaatggggtaagtgccccaggcaaacggcaggcaacccctgttgagggccaaaattgtcaccttcgagtcagattgaacttgtatctttgctattcttctctcacaagctttctgtagagcaaggtaaatcgcaagtaattctccttccaacacacctgaaaccatcttgaatttcgttgccacctaaagcctttcctttgccataccagaaacctccactatagccattcgagcttccatatctaataccgaagcatctgtctggaagaggatgatgtcattttgcggctgtacctctggccaaaaacaatcgtgtgcctcttgatcctccccgagagattgtctcaactccatcttgttgcatcttaccatgatttcctttgcgatttccaccaggttgtagcttccatctctgaaaattactctgtttctccatttctagattcactcgcacagacaagccacatagagcttaagatcattatccttcaaatctctccaccattttccaaactccataatgtttttctaatgcatcacatcaactcggattccccaacgactctggaaccacaaagctctcatgaaactacacatacagaaaatatgtatagctgattcaatctcagagttgcagaaaaaacatctattttccttgagaccaatgcactctttggttggtaggatatcagaccagattttccatagcagtagtttcaaacgagggtgtaaatctactctccaaagttcttcccagaccttattaggttccttgaatctagccttctgactcacccaataagcacttttcattgaaaattttccagacttagacgctttccagaaaaggacatctttatcgtccgagagaggtctgatctgtaatataaaggttaccacgtcttctgcaaagctggccttaataatgtccacattccacatttttgttccatcaagaaataaatctgagaccttcaaaaacacatgtcttctggtatattggaaccttgctttgatttcctccacagttttctccggaatccaaggcctgtcccacaaatcaatatcaccctttccaatcaagatccctgccccttcttaacatatatatcgtgcttcaaaaattccctgccaacatcgagaatctctagcatgcttctcaaccttccaagcatcgaataattgacagcactttgattccataatgctcacccaaaccttattttctttttgtaacatcatccaacataatttagcaagtaaggcaagatttatgtccaaaaatttcctcaaacccaagcctccacatctctttggttggcataagtcatttcaacttttcaaagcacgatatcgcttcttctccgaatttcccacccactataacctagccaccaccctatccaactcttcacataaagt

SEQ ID NO: 185352 - DNA, 4777 bp, Cannabis indica
  modified_base (4646)..(4646): a, c, t, g, unknown or other
atatatatatatatacatcatatatgtatcattcataaggaataattgtttgaattgattccttttgttacattaaaatacatcatacatattatggttttgttatgacattatctgagcaaaactagagacaatcaaaatggaaaagaccaacactacaaaaacatttatacttctacaaacattcttataaatatctatacaaacaacaacagaagataaatctttctctatgctgagcagtgaacaacagtactattcaaacatagtatattctaaggagactttgcagctctatgtctcttggtgaattgtggtgaaagagatgccttggagaacaattagaaagtcccatatttcatatgcctatgatagatgcatttgttgtttcgggattaccatagtaagtaagctctacaaaagtacctccaccttctcccttcgaaagtcttcccggattgatgcataagctcttcacttgctcctccccctcgcccaaggtcagcacctgcatttgacatgacgaaaagatatcattgattcttttatttttttaaattaggttacttgcaaccagaaaactatagcagttgtcatgtagtgcacaagagagactcaaacttcagaccttctcggaacatactatatgcctgattatgagctacctagggtgagaaatttatggaatttttcagacattcgacatttgcatggcttaggtagaaacatggattctatttcagaagtgattttgcattttcttcttgcaattgacttggtataccagttacttacctttgcaaaatacttcatgtcggatggtagaatgagaatatctggaatcgaagagatttcaagtgcttcaggagcgagtgaaaaatccaatggaataccttctgctggtggatataaaggatagaagctgtaccaaatcaaacaagaaatgaggaaggcaaaaacacatgattttcaacaaagtatctcaactcaaagtccaaaccgccgataccaagatcacaaattctgaaaggcaaattattatgttttggtgaaacacttgaatactaatagccaattattacaacatacctacgttggccaagtatgtggtttactagtctacccatgcgatcactaggtcctccacctgctggatttcgtgagatttcctctccactgagatgtttaagaatatctacagagcagcagcctatcttgacctgagcccgaaattgtatgtaagtaaacactcgcactgcgtagtagattctcataaaatagagtaagcgtgcaagggtatatcataaaaaagcacaatggctattaatcaatggttgtacctgatttgcttcaaaaagtcctggatttgtgaggctggctacctgagtaacagttcagaagaatgatcagccatgtaatcgacagtgcaagatagttaagaagattaactgttttgagttgactaaatcaggtacctgatttttaagatcaggtgggtgaatatcaaaggcaggctgcataatcaagaaaatgatattaaaagcttacagcgaccatttgaaaatttaaagtctaaccaaattcatcacataaatataaagcatcagtatcactacctgtgggaaaacaaagtcatgattagcatcccgaatggatggaatgagaatcacacgtgaatgagaccccatgtattctaggtaatcttgcaactgaaaaaataatgagataagaagataataaaacgaaaactgagctgtatgttaattgaaatatcattaaagaatttacccttctgagaatttcaaaatgaaaaatttcattatagctcatgttggtggttcctttctcaatctctgggtgctcagaatcaacaaagggtcccagctggaagaaattttaatttatcaaataaggtgaaacttccctccttcccaatggactagaattccttaaactaaaggtcagaaaccacttaccaaaatgagcaactgaggcagctttctctttgcatatgctagcaactcaaccaaaggctcaaacaataaattgtcagtagttgtgaaagggcctgatgcaataatctgttcaaagtacagaaggaatataaacattgagaagaaagacacttgcacaataggttatatgtattgctaaaagtgaatacacagatacacaaaaatcttgagttcaactgttgcagaaatttaacagtctaattttcacgtagataccgtacaatacatgtatataaatatatatatatatacatataaaaattatcatgtggataattacaatgaatttagactccaaacttgtccatgccctgttctctataattcattatattttagggactgtgacttaagaactgtgccagtgaatagtgatcacttatgtaatgtatactaaaattaaagtagaacaagaatgaaacatctccatttttattccttcattattaaatattttataatatgactcatcaagtgctaaagcaacaagattttgtaccactgacaactcttcttgtttagaggataaatcatttgactgaatctccttatccaaagcttgcttctttgttggattcatattcaaatcagccgtattaaataaagggatagagtctacaacttttgaagcaatcaagcaatgtccactaggattatgcccttcaataccaacaatctgcacaaaagcatgattttcctgttagctttaaattagttataaatgaaaagtgagccataccgcaatggttaatacttcatatttcacacctggccaggaaagattgaatattggttcgtgttttgtaactccagacgaacacgttgccctccagaatgctcaacactgtgagaagtgtaaacaaacccccaagtcaaagagagaagtaaaaggcaaaggtcaatagcaacaatgtagagcttagaacttggaatgccaatcagccttaccatttcgaattgataatctagtcaaatgcatcaatatatatacatatatttagaaaaatggaagcaccacaatctttacctgctctgcagtagggcagacttctcattcaaccgtccttccccatcacaacatatcatgccaacactaaatatgcttttctgaaaaattaaaattgtttaaattctcaaacttgtagaagcaaagtctagggtcatcgattagtcttaacgtatggctttaatctacctgggaagaaactgtaggatccactggttcttgatacaacttagatgaagaaaatgcattcgcatgctttttgattctgttttcaagagcattaaactatatacaaaaatttcatgtaagtacaggtcaggtaataataagaaagaaaaaaaaaatagggtcttaaatggaattgtaacaagtataacataccctatcttctatcctatcatacatgaacctacaacctgcttctggttttgagccatgaactgtgagagaacacctcttgccaggttgaaccttcctgataagatcatcatcagagttctcgtgttcatgttccttttgttcattcactgtactgggtacattattgatgctaaatttcaccacgaacttatgggttcgttgtccaaagggtgtgattagttttgatggtttccccacagaaaaagttctcccatttgtttgaggagtagaatcaaatgactctgaataggggtcttgagaattgcgtgttggtgttccgggtataacttctttctcatctccatcttcatcattcaaaatcctgtacacaatgtctcaccagtattcaaatttaagcacacagtactttgatctgaatttgcaaagcaaggacactaactgatcaaacaatcaacagcaaagtcagatcatcaaacacgaatttctaaaacaacccagactgctacagtaaaaatcaacctgaaatctcaaactcaattaaaaaagaaacataataaaaatcaaacgaacttcaattataacacttacatgtccaaatctttactcgagtagatatgcaaaccaggttcctccttgataattgactctttctgttcattttgcagatacaacaaaacccatccatttcagcattctgaacaatcggttcaacgaattgcctgtccaaaaatcaaatccagaatatgttaaagtatcaaattactgatttaaaaaacaaaagtcgaaatgagtgaaaagagtgataaacctgttgagatagtaagcctcccaactcgaaacgatatctgagggcttgatcttgtaatttatgcagaaagtaaggcctgaatcaacaatatcattagattgtggtcttgcaattagggaatgaaattcagcggcaaaatgggggaagaaaagcttacatttatcgagaatttcttcttcttcgtcaccgacgagagtgaagcggttttcgttgaatagttgtttgatttcctctttcatggcttcctctttggctttggcggtcgcctagggtttcaggatcttcttctacagagagtttcagataaaatggcgggaaagtttagcgctattttaactatacttgaattttagtactcactactcactactcgttaacaaattaaattttgtaggatgctgtcgagtttttttagttagttttttttttttttttntttttttttaagggttgattctcaatgtcaccctcttaaaatgaatgtactgattgtatttttaatttgtttcgtcatccagttaagatttttttttagtttcaatttttttttctatatttcatgttaca

SEQ ID NO: 185353 - DNA, 6090 bp, Cannabis indica
agagaaaacataaagtctctcttctttaatctgacattagccttacaaggcagaacttctaaacttagttgcactttctttataatttggccacttttttcagcatttaaaatgataaaagtattcagaaaatttttaaattctttaagaatcactaaaatatttgagagacacaccgctataagcactcgatccttctgaattagattgtgaatagatcccaattctttaagattgctgcctgcatctgagtcatcttttcccataatggtggatgctagcactgatttgccacaatttacagtttctcgaatcaagtgtgatacaacttgaaaacgggcgccatcatttaacgttttgcactgtgaacgaacaacaagcaaagacctggccagtgtcgattgaaagttacattacataagagaatttgatggatagaatgagacatcatagattatgttggcaactataataaaacatatctggtaattttaaacttgttcgggaggcataagaaacaataccaaatgaacaactgcaatctgttcttgctttgctcatcatcagcagctaacaaacatggcaaaagttgaataacctgttgtacacatcgtgatgctctttccagagaagatctgcagaggtaaatgattacaagtcgaaagattattcttgggcatctttctcctcgtaaaagcatggccttatcaatatttttgtttggttttccacctaatgcactgccaatgcctcctgatacaacaaccgcagcaacttctgcagcaggaatattcaaggactccaccaagccacgtgctctttggccaaaggatggacctacttggggtgaagatttcggtaacattttgcttggccccttaccattcatctcacttataattatccatatgttatcatataaatgccaccacttgtcatcttcatttgtagttggctgattagaactccatgaatttctaaaatttatcaagtgaaactagtattggtaagatgctaaaacacaattaaaataagtaacagaaaaatctgcatagttctgaaaccactaaaacctcacatgcaaccttctggtataggttcacccagcgtgcaatacactaaatatgaaattgagggagagctaaagttaaaactattgccaagcttgctataatgttttgcaaactgtattaggtctagacacttttcaaattatggtagttggtcaacgtatggcaatattaggcactcttacagcatgaaattacacagcaatgacaatgtccttaacatttagtttttgaaataaaatgacaacgagattaactttttcaccaatcaaggcaacatgttacaccgaaaatataaacatcaacttgtgaaacaatccatacacaacctgtagatcttcaattgaaaatatagatcaaaaaacctgccaaaaaccaacaagccatctcttggcctaaaaggcatgaaaatatctcagactaaagaaacttattatgaatagtagggcactgtagcaaaaatataaagaatacatatatatatatgtgtgtgtgtatatgattcacgagagcaaataatttggagctgcccatgatcaaaatttacaaaactatttgttacaaaacaaagttcagttttgcaaaaataccagcattgctaatgatcaacatcaactcaaactaggaattagttgtcaatacctggatacttgactatcagattccccttgcaaaacctcatataaggcagaaccatagtctttgtgacgttctatttccaaagtatcaatagaaaactctgagccgcttgaaggaaactgtttaaaattaaacattagttctaaatgatttgtcttatgcaatgaatataaagtagaaatcgcaaatagcattatctgatgttttaagcacaagaattaaaggaatgcttaaaagaaatgtcatatgatagtttatatctaccagggcaaagatgttattaactatcagaattaagcagctatgttttctcgtgagctattcatcctttgcttgttcctccctatttctttaatacataaagcatgctattgtataaaatcacaagctcaatttatattcaggaccacagacagaaagcagttatgataatatgacacaacaattaacaggggaaactgaataccggaagttcatgatcaatttcagagataagcatctcatcaaccaatcttaaaaggtacaatgtattatctcgacaaggttgggatataaaaatattttcttcagaacatagatccaccaatctctggattaaatcctcatatatatcacgaagcaaatgacgagaaacactcccctgcaaaaaatgttatatcattactacctcttttaactatgagataagacaatagttaaagattatttaaactagttaacaaattagggtagctgctcaaagtcgtttcttttctaatctttcaagggatagagctttgttttgtaatatttcatcctcttcaatatggtgaatttgttatccacctaatcttggtgtactgccatttcacccttgtaataatacgttttgtttccttttattataacacacacaagaaataacaaaggcatggtgaggatttcagcatacatgctcacactgtataagcaggaaattcgaggtctcttctaattgttgccaacctcctttcacataatgcatgtagtgacaaagaacagaacagaataggctcctaacaaagctttgttcatttatcccattgatgtcctgatcgtgtgaattgaccttgtaatcttttaacacatctagctttatacaagctgctaaccaggaattccacccaaattcctatttatggaaatgtagtaatgagataacaattttatagaaaacattttaagcatcaaattattttcagaaaccaataccataaaagcctcaacatttgatggatgtgaatcaagaagatcaagtaaatctcggattattttcactctagcaaatgcatcctcagagccagaaaggaatctaaaaatgagaaccaagatctgaggaaggaaaaaatgagaattatgtcccttgcttctctgtctgttaacttgcttttgcaaaacctgtccataagataaaagtcagacagtatccacagagattttacatttcatatctatttttcaaattttatgtctataaacacctgtttcggactagcaccaccaagaagaacatcaaacaaggtggcacacaaattatctgtctgtggaaacctgaacaacctgtcagccattgctgcaaaaattggttgcaaccttaaactgattttcttgtggtcttcagaaagtgaacgggatcttccaacagccagactaaaaaatctaggtcccttcttctctgatggaagacccaccagaagtctcccaagaaactgtaaaccaagtaatctaataggctcatattccctaagagaaaagacgaatgagaatgaaagtgagagagaggaaagtttcgaccaaacaatattgagttcatactatccacactgatttcagagattcgcaaactgatggcatgcttactgaaccacaattaaatcaatgttcaaattacagaattaagcctcaaatatttaaatgaaaaaaatactttacagcacctaaaatatcaagtacaaataaaatgtctcataaaactaacatacgtaaaatgtctcataaaactcaaacatagcataaaatctctcgtaaaactcaaacttaaaatgataggaaaatgaaacaaaatgctaggatatgctcgtatgtgtagttattatcaaaggatcattttagggtaaagttatgttttaggtttctaaaaatagaaagagaaggaaacaattaagaaaagaatattattctaccgtcatgacagaaatagcaatccatttcttttcccttgattttatacaaggtccgtagattctcccattacataatttcatcagaacacttgaatgacaattatcactccacaaatgattctcactctcatttaaacatgtcatgtgggtttatagttgtagatagcagttacatttctttcttataatttattattcacatcacataaagaagaagaataagcataaggaaatgagcaaaaatagaataggaaacagagtaagttaataattttctaaagtttagtgatctataatttaccagcacacaactagataacacattagaggcagactaagaattatgcatcagttgttggatcaaatttgagaaaattaacaccatttacaaaagttttactttttaaaagcaacatactcacaatatcaattcttaaattaaataattctcagctactttaacatattcacacctctgaagaagattgacaaagaggtgacaaccaccaattaaattgacttgttcaaggaatgctgcaagcagcggcttttgagaaacatctcgaataaccatatgtagaacatcctctatacatgacatgtcatgacttgtctcacaaaaagctatgagggcttttatatctgctgctacaatgttctccctgcatttttcccatgactcttaataattggattatataaagaaaagatgatactaacgatatgcatgtgaaaaataaccaagtcttctaaaaagcaatacctaaggctcatttcacctagactcaacagcaggagacgaattttatggatttcttcattgataggcctctctcctataacttttccaataacagggtgtagaagaggtttgttcccaatagcagattgagattttgcattatcccaataaaactgacgtataatatcaagtacacgaggaagccggcataagcttttaagcaaccgtggatcattatcaaattgctgaatgagaaacatgtacagttcacgctgcaccctgtaagctgtgtaaatccagataagaggattaagaaatatgctagatatagcatctttgacaagcagctccgccaaacctgcagggatgataagtatcaaaaatagagcatgtttcagctttcagagtgtaaaataaatacagcggaaagattaacatcataatcttcaataatatcaagttgagtgaatattaattatttaccacagtttgcaatgacattaaacaagtgtttcaaagctgaaagcatttctaaattaagttgctggggaggaactgattgcaacaaaaatcccagaattgaaaatccagatagaagatgcatctgctgttgattagccaaattctcatcaagaacggaagctataatctcaataacatcagcagatacccgctcacttgtaataggactagtcaaagcaggttcaaactgggcactttcttcattttcatagttatcagactgggcaataagagggaaaaatactgaaacaccgccaacacagtaaattatctgttgcaataagcgtcttgagcataactgtgtgccaatcatcacatttgcttcaaataagtttctatctggtacataatccagcattggtgaaacattaaacaatttcttgccatcacttgcctgaaagaagaaacctactgattaatttttgtttttcatgagaagagacaagtaaataactgtaatagttcataaggcggcaacaaataagtagaaaacaacaagaaaataacagaaaagtaaaaacctgtgcattgattccaaagataattctggaagcaagaccatccttaacatcaagaattccagtaggaattagattatcactggaagggacagcttcattatcaaggaatgaatacatgtagcttggtccaagagaatatataccacggacttgatctggagaaatggtatcattgaataaataaacaggaccaatctgaccaaagaatggagcactgacttttacagagtcctgcggaatgtcatcttcgtacattgccatataaacctttgcaccaattttacaacttgtcaatggttcattaactttagcatatctgaaccaagaaattagagaaattagagtaaagaaattttgtttcaagaaattaattttataaagaaggaaaaaaaaaa

SEQ ID NO: 185354 - DNA, 3562 bp, Cannabis indica
ctaatttggctacagtcttattcacacaatttccattactctttttaagtggtgttgagatgtaatataatacatattctatttttttatatatataaataaaggttgatgctatttctttaggaactaattttactgccaagatcacactaattttacaaagaaaatccccacacactagccgcagcttcttgttactcttgtcaacaaatcagaaaaacaaaaacaccaccccatcgcagccataacacctaggttgaacttgacatgaaaaaaggcactatatgatacataacacgaccccaaaaatcagtagagaaacatcagtgaaagaaaaagatctcgtgggtgtcctctaattttgtacaaccaacccaacaacacatcagattaatcccacaattctcgtggtcagtttcaacagacaagtgaagatctaagagaagtgggcaagtgtgtgcaagaggaccaacgaatgactgattctgtcactatcaaatcaattttctcatgctcgccaagcccaatcgtgtgatttctcttgctgtgaatgcctgctaccttggaccaacatgttagcccagctcttttagcctcacttggcttgctgttctccagatgtctagacaacatgagcaacttttccaagcttgcccctgatttataaaagaatattatgatttagacacaatagctacttgataattgtaccgttcagaataatttaggtactcgaaaataccttcatgtattgcttctactacagatgtgttcgctgaaacctcttcaatacaatttgttttctcgacaacagaagcagggctgaagaatgcaaagcttggcattgacagaataggtgaagaaacatcagtaccaataccaatggattcaccacagctgcgaaacgaaaaaccaccagatgctaagcaaggagttgacggttccactaggaatgaagaaaaagatgatctgcatgtgaatgcaggtgaatgagtgtcgtcagaattaattagtgatccattgccaaaactggggtcttgatttctcgacatgaatggagaagaaaatgagcagccaccctcatcccacgctccacaactttgatttgcacattgacttggttgttgaggctttgattcattagtagtcatccatgaatgatctacaaaagggcaaagtcaaattcaatgaaaagacaaatgggaaactttaggaagtatatcttctttttggttcctaaacaatgcaagacatagattgctaattaaaaatttgaaaagggtaagactaaaacatgaaaaaaggagtacatctaactgatatcaaagcaaaaaaaaaaaacgactattaagttccgtattaaatattataaccccggcctaatcaattgacatattattttgatgcttcaaccaggattcactttgttcctatcaaataaataaaaggaaaaaaaaaaggatcctcttagtaaattgactgacgatgaactactatccaattaggtccaacaattccataaaaagtttgattttagcttttaaatgaagtaacaacagatctatcattccaactttaatcacaaatgtgagatgcttttcaataagtagtgtatttgttccacctacctaaaacctgctgagcactaagcctttgacaaggatctgtacaaagcattctcttaatcaaatctgtagctgactctgaaatatgatcccaaggattagatgggaacctaagatcagctaccctgacggcatcaaaaatccgtgacttagtttttccccaaaatggtgggatcccactgagaagaatgtaaaggattacaccggcactccaaacatctgcagcctggttatagcccccagcaagtacctctggagctatataaaatggactcccaactacccatgtaaattctgtcctgtttcagcaaaaataaatagcataaataaatcgaattcctaagaaagtatcagagaaaacagcaagagaattaagttagatcaagaaattaccaggcttgatatacgttgcaagtccaaaatctgccaatttaattggagatgatgatgctttcgtggccaggaggatgttctcaggcttcaaatctctatgaacaaccccattttcatgacaatataaaaccacctgcatgagatgcctaaagagaacccttgcttcacactcggagaatctcccatgcttctctaacttgtggaaaagctcccctccagcacaaagctccataaccaaatgaacatagtcttcctcttcgtaaacagcctttagatctacaacatttgggtgcccagatagccttgtcataatctcaatttcaagcttgacgctcctcacatcatctgaggtcaccagtctatctttagcaattgatttgcaggctaaagcttcccctgttgacttatcagtacatgccctgataacaccaaactgcccccaacccaattccacaccaagtgtgtactgatctttcagatttgagttctgatttgcctccaaaattgttgtgtttaagtttgcaactttgtaagagttgccgagccatgttgatgatgatggttcactgctgctgttgctaagagcaacagccataccaaaattctctcgaaacaaacacgaatgagaatctcagcctcctctcctctagctttctagtatcaagattctcttcagctttttaaaaaggcagcccaactcccccaatcaaacagaaaagctgaaatttctgtcagttaatagattgctccctttttgcttatatacgcattaaaatagaccatacgtaattcaggataaaaagatacatgcttcttccacggttgttaaagttgacaatgacagtgaacgtgaagaataaggtaccacgtatctggacaacgttatactatatcacaaaccttacaaagaacgaggcaaaaccattggctgggatatcacatggatctgcaaaaagaatgttaaaaagaaaaatttagtctcacgcatacaataagagaacagagaaagaaagaaggtttatacttcagattgaattaagccatcaagtaaacgagacatcactgcatcaaaccttgttattctataatttaaaaagttcatattttttttccctattacttttggaaaattttcatatatatttttttttttttggtcattttatgggatgtcgacatcgttcggcttaggcttagaaaacagaactcgaactagattctctcacgcaaaacacataactcattaacagaagaatcttaagattcactcaaagaaaactaaccttaagtatctaaaacaacccacaatctactcaaagcaactcgccactaatcatgaactaagaacactaaattgacagtaaaaaaagaaagaaaaaacagctaaaccaaattgacccattaaaattaagcaataaatagacagacccagatccaaaattttccatttttaccatagggatgaaatacttgaactcacaagcgcgctaatgcatatgtatgtttgtaagtatagacatataattacaacacaaaaaaaaaaa

SEQ ID NO: 185355 - DNA, 3639 bp, Cannabis indica
ttaattattgatgataatccaaatcgtagaaattgtactattttttgcggtgcaattctggtttgaaaaaataatcaaaaactacaccactcgcactgcgaatacccctactttttaaagaatattaaatgatttttttttttttaaaagaatattaaatgaaaattgccattgtaaaagggaaagtagataaggaacgacatgccgttttcttttgcgataaaaagtaagaaacaattgtcgttacttctcctctctgtctctattctttttcgcggcattgccccctctggtttaatggcgggaatattacgaagttcacttcagcttcagccgcacaatttctagggtttgattattgtcgccatcggaaaacgtttcccgcattttctattggttccaccggaagagatgccgacatacaggattaggggcatcgatgttgattttccattcgaggcctacgattgccaactcgtttacatggaaaaagtcattcaagccctccaagaggtatttgaattcagaaatcggaaacttgagtttttttttttggtcttgcatcaaatttgaagtctcctacttagcatttgctgtagtttcatggtctttccatatattttagggttaggcgggatcctagtttaaaaaagaaaagaagttatctttttattgcggttgatttgatttaattctagaaatacttcttttgtattcataattacatttataatccatttgtattgagtatcacaattacatcttgtaagttgtaaattggttgtagcaagagtttgcaagacttataaacataattttccatttgcattgacggtatcacgtgatgtccaatgttgaaagttcagttttatgtgtcagaaatgtaatgcactgctggagagtcccacaggaactgggaaaaccctgtgccttctatgtgctaccttggcttggaggaagagtttgggtggtttctcaactggtgtaaatttgaagagcagtcagaatgccggaggctcagaagaatcaccatcacaatctgggagctccaatcttcccacaatcatttatacatcacgtactcacagccagattcgtcaagtaatcaaagagttgaaaagaagctcgtacaggttagttttggaagcaccgcttctttcaagttttcaattacgtactgcttgaatctgatgctcatgttccatttatctgggagcacatattgctaagttcattcccatattatacttacgtgtgtagttactagttagtgtcagctcaacagtgcactatctcaatgttgatatcataggtaatttcatttgtgcataggaggctttgtttcatttatttattacccgtgtagatcttgctatttttttttttgctggatggtgttcctttgggattaatacaattattctgtcttggaagacataggctgtggactcaatttatggacaatctacttgaattaaatcatggtacatgttcagtggggtagttctaacttctaagaataaaaacattgtctttctttgtaatgaattgctcttttgagttcatatgattgagctcatatgtcttttctgcttttgattttttgatatgtggaagctaaactagctgaacatctggattggtgtaggcccaaaatggtagtattagggtctcgagagcagttatgtattcatgagcaagttagttcactccatgggaaagcgcaatcaaatgcgtgccaaatgcttcgtagaaatcgtcaaaggcgtgaagagcatgaaaaacaagaaaatcagggaagacctcgctgcgcccactattttcatgttgctggtatgttctataatgttcgtgtgataaacacaagtgtgaaaacaaagtacatttaattgaatatatacattctagtcatgttggctgtgatatataattaatggagagtcttatgcataattaaatcaatatgcacagttccagactgtaacttcaatgagatttatttgaaaaaaaaaagataaattttttagcgtttttttttttttttggatgcatctagagaaaacctagatagcacaattgattctgtgtcaaattagaaagaaaattgaaaatttgtaattttgtatagactttcaaaaaatttacttaatgctagagagctgcactaggtggtaaagacaggtactaaccaatgggaaggcttgtaaaaatggcctgaccattgacgtcattcactctactgtaataggtgtcgagtttccattgagagatttattatgcttgtggtaaattattgtattggtgtgttttataaattgatagtgtgaatttcctcttttcaagtctcaatagtgtgctttatatgattttctctttttattaaagctgctctcttgctgacaataattgcattagaaagaatttccttgcttgcactttattaatcaaaactctccccaaagatcaaagccctgtcaattatgatcaacttctgctatatcccattcctctcacttcttattcagccaataataaaagacctaattagtagctacttctttttctttcttctggaataagtaaaccttttgcttcgattcactgtgtctcttttatgtcatctctttacttatggagataatagagaattttcccatggccatatcatatttgtaattatttacatatgcatgtatgctacaaacttgacaagggtgtatttattcaaattttgtatttggaaagagaaatattattaaatttgttattttcttggatataagaaaagtgtgttgagttcactaattctcccaccaaatgttatgcttggattttgctgtaactttgtgtcatttcttacgcgcgtctccatgtacctttcacaatatttgtccctcctgcaatcatattcatagctgtataagtagttatatgtcacaataaaattttgtcattgcatgttaaattactttagtaaaataaactactgtaatctacataagggaactttttcggttgaattcgggctatggtctttggctaacattgaactttgtttcacaactgatacatcttctctttgtggattgtgcactgcactattgtgagtgttattacttccagaataattcagtctcgtaggtttcacatatatttggttattgtactgtagattacttgaagagcaatcctcatcttggagatgaaccaatagatatcgaggatttggtcaatatcggaaaatcatttgggccgtaggttctcttttgataattcttcgtttctattttacgcaatgtatagtctaatcttactgcttttccctttttgatattcctagaagctattgccattattggcatcgcttgtgcgttcatacatgtatattgtatatgcaggtatataatttctttttacctttttcctgcaggtgcccctattatatgtcacgggagattcataaagttgttgacatattgtttgcaccatataactatctcattgatcgtgcatataaaaaatctctaacaataaattggcagaacagtgtacttatatttgacgaagctcataacttggtaagttttcttctgaactctgaaactggtttatggatattcacttttttcttttttaatc

SEQ ID NO: 185356 - DNA, 3084 bp, Cannabis indica
tttttaaatcactttcccacctcatggctgcgatcgtccatgtcttaacatgttcttgattcgatggccacctttcccacctcatactctgtttggcgtcacttgagcagaagttctccagtcaaacaaaagctcatctcctccaactcaaaggccaattctccaaccttcaaaaattcaatctcttaatatctaactatgttgataaagcacagtcgattgctgatgcactactgatcgtagggtccccagtcaatgatcaaggctccatcttgcaatcgctcaatggcctaggttcggccggagtttgaccctgttatctctggaataacatctcacagtgatctgctgtcatttgaagaagttcaagccctccttctttctcataaaactcgtattgaacatcacaactcggtatctgtccctcaagcttcaagggaatcttgcatttcagcaatcaagaaatgcgaaatctcgttcttatggtcatggaggtgatcgagggaatgccactgataatgaccgaactcattcctttggccgtagaactagagctcgcctactctgtcaagtttgccttcgaacagggcacacaacagctgcatgtcactaccgctttgacaagacttgggtaactctgaaatatggtaattttacccctcaagctcacttgactgaatctgatattctctttgatcctcaggctcttctcacaactatgatacctgaaattggtgatgataagtcctaatatgtgtatactagagccacaaaccatgttgccatgggaacacaaaatcttgatgctgctaccccatgcacaggcactgaaaccatgtctgtaggcaatggtaagaaattagtcatttctaatattggtcattctacacacccttccctctcaaacacacagtcattacatttacattatgttctttatgtcccctccttgaaaaagaatcttattagtgtcttccaattaataactaacaatgatgtgtttcttgaatttcataaatcgaacaaactcacagggacagtgctcttcaaatggaaggctaaaggtggcctatatcagctgggtgatactcttttgagcattgtaattattttatctcttaagaacatgagaaaatatatagaatagagtatgttgatgttccagttttagtgccaaaatccactttctccttctttttctttctttttcctctgctctcacaacaatcagctctctttctttttcttttttgtttgttttgtttcattcaaatggacaattaggctgctgcattttggtccaagcccacaaactgttgtagaccaacaccaataaaaaaataggagaaatttcaatgatatacataatatttagaaaatattacataaataactatagcaattaatttataccatatacggtagagactataccaaaatgaaaataatcactctccttttttagtgtgcattgttagctggtattttttttaagaaaatttatatctcaatcaaaccaaataattcaaaactaagaatgtaattacagtaggcaaagagtgactactaaaaatacgatcagcctcaacaatagaggatcgtgctagacaatgtgcaaccatatttacaaatcgcttaacaaaacatctcaagactttatttacaattaaattacaaaaattttgtgagttaatttaatacataatttatattgttttgggctgccttttttaaaaataattatttttttaagggattttagcttctaattgtaaacatctaagttatgaagacaactaaatatattaaaattttaaggcatgttattatcaattaactaactactttaacaatatgttcagtatcttgaaaactaatatcaagtaacaataaacatgtagtaagattaagtttagcatgcaattgtaatatactaatgaattgattaatggtttataatatatgttaagtgtgattatattgtcaatgtaatttttctgatgcattttataatttattatctgtgaagataatatgaaaaattgtaacattaataacaacaataataaatatgtagcaagattaaaattaccatgtaaataatactatactaatgaattgattacagtaatggtgatatattatgtatgttaaatgtgattatattgtaaatattagtttacatgttagtttactgatgctatttgtatacattttgtggtatattaaattatatacataagtaatcaatgttaagaaataaatatatatatatatttataaaaaggtaactagttagtatattatggggtgaaattttttaaaaaatagtgtgtactggattaagtttttactattatttttaattattttgttttattgttttgtggttgttttataaaaagacagtatttttgaaaaatttatgtgtagtaatatttttgtaaacattaacctaatttttagtatttttgtaaaaaaacttgatgaaatatcacaaccacattgatggtatcttggtggtgtcatagattattacatgtatactttgtttcttagcatcttacatatctcttctttcttcactactcgtttctgtgtggagtctattagagggatagcccaataaacccaaacttgcctcattcttcttcagttcaatatacaactataggagttgattaaaatcacaaaaaaatatatatttgttttggtcctgggttgggagaatcctaagttctggcagacccagcctaggacccacttattctaaaggtttaaaaaaagggctatttacaaaaatatgggaaaataaagataagttttgatatatatggcataaatacttaattacactaaatatgacattttttaaaaaaaacttacaaatatgggaaaaagttataaggaatgccataaaaaactttaaatttgtgtttctttttattttttatctcttttaaaaaataaaacactaaaataaataaaaataatctcaaatatagatgctgttttttttcttcagaaattaaacgtattttttttatttaaactactgtttatttgttttttttattaaaaact

SEQ ID NO: 185357 - DNA, 5593 bp, Cannabis indica
ctaaagtactttgcgtgatgattgagacaggtatacagggctactgttcaaccaataatacctaccattttcgaacgaacaaaagctacttgcttcgcttacggccaaacaggtattttcttcttctccctcttctctatgccactatcgatctgattggatgatctcttttaatttctttttaccaatataagtctcccgcctcagaggtagacattcgggttttagtgtgaatgatataagtgatgataacatcttgattacaggcagtggcaaaacatatacaatgcaaccattacctcttagagctgcagaagaccttgttagattgttgcatcagccagtctatcggaatcagagatttaaactgtggcttagctacttcgagatatatggtggaaagctatttgatcttcttagtgaaagaaagttagtgcatttcattcattatcagtttattctgtttttcttttgttcaattccacttgtatgctgtgatccaaaacttgattctttgtctctaataaactgtgtattgtacgtgtttatctttaaattttacttttcctggatttttttgagtgcttttgtgaaaatttcaaggtattgaatgtgaattttcaaggtctgaattctgattctttcacctgtggggttttgatcacatgtttacttgaagtatctgctacttttatacgtgtatggtctgttttacattcctctgatcatgcactatgtttgatctatgagaacatcaagtattaattagcatggattttaaggtgaatatgtgcgagtaatgcagttatgcttttgatttctattaaattgctaaatgcattctttttccaatagaaaactttgtatgcgagaagatggaagacaacaagtttgcattgttggcttgcaagaatttgaggttttagacgtacaaattgttaaagaatttatcgagaggggtaatgctgctagaagtacaggttccactggggccaatgaggaatcttcgaggtcacatgctatattgcaacttgttgtgaaaaagcacgttgaagtaaaagattcaaggaggaagattgatgaaaatgattccaaacatgggagagttgtggggaaaatctctttcattgatctcgccggtagtgaaagaggtgctgacactactgataacgacagacaaacaaggtactaaagcttagagaagaagtctaccttctttcatttccatttccacaaaatgaggcattctaaatttttataactgagtacttacctgtttaatttttgtcttcataatttagcgtaccaagttatgcggcaaattacttgcccattctcaagtgcttaatttcaaaatgtgatggtataactgatatgttatttactcagcaaagggaaaacgtaaatgttatttatcaaatatataccaacatttattgtcatattctttttatagaaaatttggaacttcagtgtttgtgatttatgtagtatgtgcctcgagtatttgtgaggttgaacaaactgtgtaggggtgggcaatggaataggtctaagccacttctttaccaatcagaggtttttttttttcctttttcaggggctgtacttcttgcatgcaaatatcggatcattcttgtgaaatgaaaaattatttgttttctgttttttcaatgagatagacatgctttatatatcgtccttggcatttgttagagatgcagacaatattgagattgttttcttctacacttcctttatgaagtgtggaacctagaacttgctgaattgaataatatgaaatccaatgcctgtgttaggtaggtgataagatgccttctatgctttagcagctgtattttcatattaatccaatgtgggtactgtactgtattctaattggttgattcctgttatttggttcattgcagaattgagggagcagaaatcaacaagagtcttttagctcttaaagagtgcatccgtgctttggacaatgaccagatacacataccatttcgtggaagcaagcttacagaagtccttcgcgactcctttgttggaaattcaaggacagttatgatctcttgcatttcaccaaatgcagggtcatgcgaacacacactcaatactttgagatatgcagataggtaatggcacattccatttgtttgtcagtagttttttcaggtttttatttatttatttcattttttattaaacagcaaaatgttatttcttgaccagggtaaagagcctgtctaagagtgggaatgctagaaaagatcaagctacaaatatacctcttccaagtaacaaagaggttatatcagcattacatcaggtatctggtgatgcagaagatatttacgagcaacaacgtcaagaggtgaaagtggcagatacaggtagaagagttgcagaaaaggacaactccttctacaactctagtgctgattttgataagcaatcaggaagtctgtcatccagttaccttcctaatggaagggacgaaaaagggattgcttctggttcaacggatcgggagcggtttgaaatgaaaaattcctattgtgattctaatagccaaagaatgtactcttattcccaaaactcgggtgatgtggaagacaaagtgcaaaaggtatcaccacctcgtagaaaagtacccagagaggaaaaatccgataagtttggaaactggctgagaaaagatagtggatcagatgtgtcttcgactggtttaagaccaccacaaaccacgggcaatttcaattcatcagatgcatcttcgacaggcttaaggccaccgcataacactggaaatttcaactcatcagatgtatcttcaacaggtttaaagctgccccataacactggcaatttcaactcatcagatgtatcttcgacaggtttaaagttaccacaaaacattggtaatttcaattcaactaattctgggtcaaggcgacatgagcatgaaagtgctgatgggaatattaatgccatactggaggttggtttttattgtctcacttgcctcgcagtttccattctcacacacatttatatttatgtatacaaagaggtttctttgtacttcttgtttgtcatcttaagctctttggattgttacaggaagaggaggccttgatcgctgctcacaggaaagagattgaggatacaatggagatcgttcgtgaagtaagtgattgcttccttttctagtttctattttacgagtattgtcggttacaggtagactactttcttatgaaatgttacaaagtatgaagagtttttattgagtttctatgattcccgatcaccaggaaatgaaattgctagcagaagtggaccagccaggaagtctaatagacaactacgtggctcaattgagctttgttctgtctcgaaaggctgcaagtttggttagcctccaggctcgtcttgcaaggttccagcatagacttaaggagcaggagatacttagccggaaaagagtaccccgctgaggcaacatttcgtgtgtataatgacggccttcagtttctcttttgtaatttctcatcccagcatttgtttttatccttggtacaaagggatcgaaacaaaaatataatttttttttaatttttattttcgcctctacacagttaggagcaggagggtatctctgagagaggagagtgcagacttgggctgtgcacatccaggcggctgttcatgtctcttgtagtgttgttgtaattcgtttatatttgcaagataagtctgatgaggttcttgccaggttttatgggttgtgtaatagggggctgttttgttaaatggttaatgtgaatttgaactcaaatatttttaggaaagaaaaaagaaattcaatagattcgtttttttttcattctctcttgactctttgtatattgaaatagtttggaaattttcaatatttcaacaatgccattgaaatggtatggagattcaatgacattttgttggtttttagaaagtttgtaatcttgtactgtaaaaagaaaatatatacgaaaattcacttacatttattttttattatgagcatgattattatcatgaaaagaaagttgtactattgttatgatataaattcaatgaccattttatgtaaacacaagaagcatatcattatatcattaaacaaaacatttgtgactcatttctttacacaactacaaattgctaatgctgctggtaaaagattaaagtaaaaacaggtaaaacagtttgagggaaaaaaaaaaatcaatccaacaaaacttgttagtgaaatcaaggctttgaagatggtatataacagaacaaactatggccctacgatgcctcgtaaatcttagctgccggatcaataaggagccaagaatgcttagcatccattttctgacgatgttgcttgctgcatcttcacaagaggaaaggctggaaatagttatttccaacattcgagcatatatgggaacctctttctttgctgttgtttgctagctaattctttgatgagcatcacttttgtcgtcaaaagaatagtaaacttcaaaaatctacttactcagctctcaatcttaaaatctccttcactgtcctcaatcgaaaataaggcatgtgttcctaacaaggacaagagaaacagattcagtacattgatatatataacaaccattgtgttgtaaccaaaaattaggggccaggagaaaaggtctctttcaatgtactatgcattttacctggttgaaacggagccccaaacctctgctataaaagtctgcatatttgatcataaacataccacaatcatacctgtttatagagagaaagttaataaaatcatttagatatccattaacttgttttaagtaagaaattatataaataaatgcggtcaatgataaaactggtaaaataaaatgacagattacccgttctgttgctcaggaaggtcttcaacaaattcttgtttccaagaactaacattaatatcttttccactcttatccttcacttcatcaacatagtatttggcctaccacatgacaacagaaaaatttattaagccatctatctctacaagttaaacagttgtagattactcaaattgcaaatttgaaaaatgacagataaagttaacaccttggacatactgccagtgcatttatatttaccaaaaaactacatgtgctatattaagtgaaacccaataaaatttctatggtaaattaaagagaaagaggacaataatgttagggaagagtttccatttggcttgtatcagtagagacacttgagttaaatggcaaccgacacaggatcaaaatcataccagtactttcatcacccgggtatcctttcctttcagggaatcaaggtactggaatttctcttctttcttattgataactgctaagcaccaatgtatctctttgtgtacagggacaaaaatctgagaacagtgaaaaaaaagagcaattagaacaggttaccaaaattaccaaacaaaatactgtggaaaatgggtatttataaaaagggttactttatcacagtcagcaatgctgta

SEQ ID NO: 185358 - DNA, 4472 bp, Cannabis indica
aaagtcgaagcctccaggtgcaggcatgtatgtgctttcttcaaataatatttgtaattaaatttttttttagtttaggtttaaattaagattctgaaagattaatttaatatctatatcatgaattctgtattagagcacttggtaacgaccacccgttaaaaattttctaccaataaaattaggtatgggtatgggcttgatcataaaaatccttggacctcattattgcagtagaagagctatcatgtactaaagttagtgtagctacactgagaagaggccataaattttcacgtttcagagatttagttcaattaattgatgtcattgtttgtgtattgctttggatgcctgcattttaatatcgtcttatttatttaatgatgaccaacacattgctgtgatattattcaaagttttattcagtcacgtagaaaaatatttaagaagtcatgttccatttgctgcctgaataatcaacactagtatcctactgtcagagactggtagcacaatatatgtcaattgttcccttcaacattcctgcactggttattgagagtcaattgtttcaagctcagacattgatctgttattgttttcacattttgaacctgtaatattttgatgcagagagagtcagagactgatagcacaatatatgtcaaacttgggcgctgaagttacctttcaaaaatttcatccccaaatggttcagtttcatccactacactttttctccagtcctaattctagaaaaattgagcagaatatcagttgttcatcatatggtaccaacactgttgggataataagagctccacgtggtgatggaaaggaagctattgtccttgtaacaccttacaattcggataaaattacacagggggaggctttgtctctaggcatagcatactcagtattttccttgcttacccaagtcacttggttggccaaggatgttatttggctggtttcagattcccaacacggtgagcaagctgcagttactgcctggttgagagattatcacatgccagtgtttactaatctccacaaaataaattcagaaatgtgtcctgtgagcagttacttgtatgaaatgaatgattactcaaacacagaaaaaaatatatatgatggatttaagcgtgctggtacaatggctgcagccctagttattaaagtagtggataaaagtgaaaaatatgaggatagtttaggcatcaatgctgaggcctccaacggacagatgccaaaccttgacctaattaatattgtaaattatttggctgtgcataggcagggatttcgggtaaaggtggagaaattatggtctctacttgactccaaattgcttaagattttgggagaactatttgaatcagttgggaaagttgcaagaagcttaaatccccaatggaaatttggtatcccagcatctgattatgttgagggcatcgcaacacttgcaagctcattgtataaccaggtacatctacacttcatattcatatttggaatgacatgtgatatgtcttttatattttatgcaaaataaaattctattatatcctttggtatctcttttcaaagaactaatttatgtctttgcatctatacttccttatactgtatgtatattaggctttgggagttcctactggtcctcatggtgcttttcgggattaccaagttgacgcaattactttggagattgcacctagagcttcttttgaaagcatgtcgaggagaaatgacttcctgctacgaggtggtcggttagtactttaactttatttcttccagtaattaccttcaagtgtgtgtgtgcgtgtgtgcgtgtgtgcgtgtgtgcgtgtgtgtgcgtgtgtgcgtgtgtgcgtgtgtgtgtgcatgtgtgcgtgtgttcgtgtgtgtgtgttttatgtttttgcatagtgtccaagttcatttaaacatatcaattatttcgtaatttttaaactgaattttcaaaaattcattttatacagagctttagtaagaacaatatattttgcagtcttgatgacattaattccttttttggtatcatttgggtgaaaagtgtcttcttttctctgttgcaggttaattgaaggagttgtgcgctcagtaaacaaccttcttgagaagtttcaccaatcgttttttctctacctactaacttctcccagtaaatttgtctcagtgggagtctacatgattgcttttgcacttcttgttgcaccacttcctatggttgcagcatctctctatgctgatgcaactgacttaaaatctacgcagagaaaagataaatctactcatgctgctgacactgatgaatctagcatcgctctcagatcgtggaaatgggttcatgctgcaaagaaagtttttttggttcacttgtggggattagttgtttctttacttccttattttatttgtcaaatacccaattactccccaacaaacaggttcatcatctggtttttgttttcgatgcttagctttttgatcatgtatacgcttttggcttctccattttcacgtgcgaaggtatctcaagttcacgttggagaatgggctatcttgaaatcagtgaccatctcaacagtgttcattggtctgtgtctcatgtcagttgttaacttctctacagcagaaattgggggcttacttcttgttccgctgtgtttattggctcatcccatacaacttgatactagacttcggagcttgagaactctttcaagactgggatgcaatctcgtttttggccttattggatttcccccaatcactttcgtgttgttgaaaggtgcatttgtaggtttcgacagagttaatgttggtgatttctggtgctgggtggaatctctttgggcttggagcagtgccacttacctttatataggtatggttcacttaccatgctgggcactgtgtattcacatcttgtttcatcgttgttgacacatcacactcaaatatttcatgtattattgattgattagttagatcactaaatcagaaaattaagatcatttgtatgctgaagttatgtcttatccggggtgttaagtactagccacttagggtaccaagtcccatcgggattttctatttccttttcgaaagcatactataccactaagaaaaataggggatctacgagcaataattttgtggacgacatctttaccattttgtttatcgcgtggtcacagaatattatcatcacattgtattaggttgttccgttcggagatgagtttgtgcacatcaccaactgaattggagctaactttgaatttattgtttatggatatttcatcatatgtggggctagtggatttcacacgagaaggggcttgcttttccagggttttagcctcattgtctggttcagtcagtagtagtatggaaggaacgaacctggaccattcattagtagattaagtatcaaggaccttccctataagtcatttatggtgtaatggttgctctactaattggattaatagaatgttgggagagaagtctgaaaaatgaaggcaatctttattgatttaattattgggaggattaaacaaaagggttatagggacattttcttagacagggaatcaaggaagaagtccattttgcttggtggtacttgggaatagatatagttgtaggttgcttttcacacatatgtatgataagttaatttgaaagtaaaagggattgataaggacccagtgtcttgttgaagtgagatcgtgctcctatcacatcagaatatttactttttctattctaccataaaagaagatgctggaaatttaaagatcaaattcttcacccactcaaaagagcaaggaattcatgccatcatgaattctttttataaaaaacaatgctctcattgaatttttatttttaatgtctttggtggagcaaagtttcaactttctcttaattgatgaagtgaagtagccactccatctactccttaataatatattattaatgcttgaaaatgtaattttattaggaaaatataatctatttaatggtcgtagatgtgcattttcctccattattaatcatttcgtttttttgaatcaatcagcaaattgtgagggaaagaatactgaaatatatataagtgggaacggctgcgatcttttagcggttggaatgggataatagggaatagaggaatcttgtatgaaaaaaataattctggaagaaatatactaataaaaatacttctagagctgactatgttatatatttatttatattaatctggtatatgaaatgacggcttaagttgcttacaggccatcaagtctaaattagggttgaacaaagaaaaaaaagaatacttgaagaattcaatatttttttagattactgtttatctaataattatagataagatttgaaattcgaacgaaaataaaacccaa

SEQ ID NO: 185359 - DNA, 2177 bp, Cannabis indica
tattaccagaattcttctgatctaggtgagtatcatcaaaccccttatgcttataattctaatcattttataactgatcagggtggctcagtagcttactcttcgtacaaagagccaagtatctataatctctttgactataatattccaactccttataactatggtgctaattacaacaaccattctaattttaatcatattgctactactagaactgcatactctgtttttacttcgagtgaaccactgtcggttcagtatcatgattctgtctcccattacaagatcagttattatgatcatcaacctaagagtacccagttcgtaatatcttacaactcggtctctccggagtttgctatacctgaattcgacgactatgatccaaccccttatgatggtggctttgatataattcaagcttatggaaagccacttcaaccctcgcctgaaatttgttatcctcactcagactctacaactggggaaagggaaaagcccccaccttccaacgcagaggctaaggagaaagagaagagcgagccccaaaatgggttaaagccgatggaggcacataagaaggaagaagagaaaaagccaagccatgaaagtgggcatggagatcatgggactcataatgttggggttgggaatgattttcaatacgaaaaacaggtgagtggtagtagtagtagtagtctgattccaagtgggtatggcttggaagccatggatctttgcgaaagcttgttcggttactggccatgtttatcacgttacgcaaagagatcagcaatgaataataatggcggtggttgtcatgatgagtatggtttttacgagggaatcagcagctgtgggagtgggaaccagtggaatggggctgcagattatctatttgggggttcggatccgtacgtggagaaaagggacggtggaggaagctatggtcaacctattcattgctacgaaaagcattatcaggagactcctctgtatattcaggttcagcctcaggaggattcttggtcccaaaatttcaacaatttctgagtatattcattgtcatttcttttcttttttttaactagttgatttcaatagaagaagaagaagaaagagaattaggattattggattaagatagtggcacagtgtcgaaagctactagccattgaaatgtaagcaaatttgatgaaggaattgctttaccaataagtaaaatgttgatagatatggaattcgactgtaatggtcactatttgctcttttacaacttaagttacagttttaatcactatttctatactattatcttcaaaattatgtttgtttattaggtacacttataaatagacaaactcaacaaatgggtcatcatcattttttgatcgaaaggaagcatcatcatcacagaaaaacaatgatacccgccaacaattaatttggttactcgattatgcagccaattaagtcaacatcatcctcttttaattgcttttgtataaatacaactgaatttttgaattttattttaacatcataaattatttaaattttttaaaaaacgaatagaacacaaatcatcaatatcaatatatataaataaaaaaaagtacacaaaatttgaggtgttatcgtataattttttctttctattttttaaattttacgagttttcttatggttggtgaagaattattttttttttttacacatttttattttattaatagtgaaactttttgtattcttcaattaattaaaaatgagttgtattctttctttatatagctcttattattcttttgtatatttcatgagattttttattatcacaaaacttttcaattttctttaaaaaaaaactcttttaacttttttactataatatatctcactcaaactatcctatatatactacaatatatatcttagaactttaagcaattttactttagaaaaattatcatgaagctaaattgtaagtatatatatatttatgaatattaaaatatgcaatttttatttttaattattatgacgtgatgttttatatgaattttttatgcacaaacgacttggccatatgagtgaaaggatttgcaactacgcgcaaagaagaagttcattcatttggagaaaggtactatatcagatccttgtgagcattg

SEQ ID NO: 185360 - DNA, 7031 bp, Cannabis indica
tttttcatacaattttattctatttcatattttcaccaaatctacaaattctgccatttcttcccaaatcccagcaaaaacacccaaatcgcttatgtggcaagataactaagaagagtttctgtcactccagtcctcactagtgttgagcttacccagaggaagtaccccggtaaagatggggcatttgacctccacacaaacgagcatggcgagagtggtaatgaaccattcaacgaaacaagtttaaaaaatagaagactttacaggagtacaattccattcagccttcaaatgctactactaccctctactcaagcacagactgaaactaattctatgcagaatctcccatttccttaaatttcatttaaatttaacaacccaccagatgccacataatacaagacagtagcattatggctctatatgccttatccgtatcccacacccgatagggtacttgctttcgatagcctttgtaccataaacaactaatttccaacagaaatggctggctttataagccttatccctatcccatccaggttttgattgcacgtgaccgaatcatttatcggaatattccacctttgggcatccgaagggttaaagagagccgtggctggctgggtgacctagaaagagagggagtgagcagaggtttcgtggttgatgagagatagaagagtattaaggggttagggtttaaaattaggtcatttaggtatttatatattttcagaaatattaataataaataaattgttttaaaaatacatataactataactttcggccgtctcagttattttgcaaaaaccactctaaaaccctcgaaacctctgcgtctagatttcttctttctaatccaatggctccaagcttcgtattcgaacccccaagcgatgaagaaaacgagctttcggaggctgaagacgaaatagatgaggaagaagaagaaggagaagtagaagaagttgagaaacaaaaaccctcaaaaaaatctcaatctccgtgggacttcgctgcattttctgagtcagtcgccgaagaacacgcccgtagaagcacgacttcggtcgatttcaagatctcaaaagtcctagagagacagtctaacccagccgccgctaccgctacagccgaagaagacgaagatagcgatagctccgaatcggaggagccagacagacaagaagattacagaccggaagctgatgaagacgatgattccaacgctgttgttaacagtaagtcatttttttcctcttccgatggaacatcgttccatgctaattcattcttggagctcaatttgtcacgccctttgcttcgtgcttgcgaggctttgggttacgccaaacctacgcccattcaggcggcgtgtataccgttggcgttgtctggtcgtgatatttgtgggagtgcaataactggttcgggaaagactgctgcttttgctttgcccactttggagaggttactgtatcgcccaaaacgaatgccagcaattagggttcttatcctcaccccaaccagagagttggccctccaggtaaccagcatgattgagaaacttgcccaatttaccgatatcagatgttgtcggattattggaggagtttcagtaagggaacaagaggcatccttgagatcaatgccagatattgttgtggctactccaggtcgtatgatagatcatttacgtaattctatgtcagtggatttggaagatcttgctgttcttattcttgatgaagctgatcgtcttttggagcttggatttagtgctgaaattcatgagctggttcggctttgttccaagaagagacagaccatgcttttaccgaacaagttgatgaacttgttaagctttctctgaataaaccattgcgactctctgctgatccatccagcaaacgaccagcaaagcttacagaggaggtggttcggctacgacgaatgcgcgaagtaaaccaagaagctgttcttctttcattatgctcgagaacatttacttctaaagtgatcattttcagtggaacaaaacaggctgcacataggctaaagattttgtttggtttagctggcttgaaagctgctgagcttcatggtaatcttactcaagtccagcgtcttgatgctttggaactcttcaggaagcagggagtggattttctaatcgcaactgatgtagcagctcgtggacttgacatcattggtgttgaaacagtcataaattatgcgtgccctcgtgatctcacaagctatgttcatcgagtgggtcgaacggccagagctggtagagaaggatatgctgttacattggtcacggataatgatcgatctcttctgaaagctattgcaaagagggctggttcaaagttgaaaagccgcactgttccggagcaaactatagctaagtggtccaggttaatcgagaagatggaagatcaagtggctgcagttattcaagatgagattgaagagagagcacttagaaaagctgaaatggaggccacaaaggcagaaaatttgattgctcacagagatgaaatcttttctcgccctaaaaggacgtggtttgtgacggaaaaggagaagcagcttactgcgaatgcagctaagtcattttctgacaaaggaaagatctctggaaatgagataaccagtgctcaacaagctgaagatctaaagatgaaggaaaagaggaaacgggagcgagagaagaacttaccaaggaagaagcgccgaaaacttgaagcagctagagaaatgttggagatggaaagtgaaaatttagaagatagtggtgataaaaaagaaatgtcactagttgacctggcgtatcggcgtgctaaagctgtgaaggcaaagaaaaaggccgtggatgctggcaagattgtgatgaaggttgtcaagaaatctaagaattcttcgaaaagaactccatcgaggacagaagagatgaaagagctatttgaaagcgacatgactgacagaaaacagaaaagaaacttcagtggggaaggaatgaaaaaatccaagagttcctttaaaagcaagtcaaggtataagcgcaaatagcaacttcaagtgcgccttgttacagcagctgtgaagtgagttggcaacaaaacaattttacttgtttttgctcttgttatgagtatttgcaaagcaattttggcagagggaaaagagtagggttgatacttatggaatggagttgtatttttatttatttaaattctaaagtaacctagttaatgatctgtttttgaatttgaactcttcatctatgttatagggagagaactttccttgcccctatttctcttgtaactgcggttaagaaatttttattcttctttatcataaccaacaacaaaaaattataagcaggaaataattaacatgaagcatgaaatgaaatgaaaaaaaaaagagagacaatatatactatttaatttcacaagacatacacataaggagtagtgaaagtggtaaagcttctaacttggttctggaccacttgagaagctgctctatagcgttcgcgaatcagtttccctggttctcctgaagtaaaacattttaaattgctgcggaattcagatgtgtactttcagaagaaaaagaatcagacatacttcagtacaaaaatatataaatgaaacatccttgcagtaatactattcatagaaaacataaaacaaaaagttcccacatgtatttttatagaacaccaaacagaaaagaataatagctgtaaaaatatgatcaggcatgtgatcttagtcatgatagagaatcatcttaccagctctttctgactctagttccccagctgacataattacaggttcaactcccatggcctggaatataagttcagtctgaaatgattttccttgcccttttcctccccaaatacctgtaagagtaaattttaaaattcagcatgttatgtaaagctctaaattctaatcattatcaaccattcacaactcagtacaagaggttgacaataaaatagcttcaaagcacaaaagtttattgagaagaaattcagaaaaagaaaaaatcacatataaaaatcaatttgaagatttcctgtaatattgataaattcatctgttcttacaaataaacgaggtatcacattacagtttgccatgctttgttcttctttagtgtaaatgtgatataataaaggagggtgtcacaattccagtttccgattattctttgttctttatagaggcaaaggattgctattagtgcaatatcttagtaaaatttgaaagttttttgtttggctatggtatttgaattaataagcaaagtgtgcttttaggcatcaatgctcaagaagatttcaatatgaaactagctgattcagtgaggtacaaagatggtagttggccattcatttatctgggttcgcctatgagagttaatcctggaatgctgtattctggcagtgtaatagctttgtgaaaatatcaagtggaaaatggaagaagattcagattttgggaggaaccttggtgcactgatagaactgtagcaatctcttctccagatttttattaagttcctagatttcgacaaaggtttgattgatatagaactgtatgtagttttccttgttcagactccatttcataagaaacttgaccgataaatttccttgttgggactttcattttctacaaactaaaatgccgtaatcgtaaacaaacatatttgcaacagaattcaaatagaagggtctggttgccagatccctcagccagagcaacaggactatttacgccaatgtagtgtcgctccagaaccattccatggagtaatgtacaacatcatctatgtaatttattctacattgcttcagtaatactatagattactccagtttggaatagcactggtgccggagcagcactctcatccaaaagtctatactatatttacacagaacaaacttaaaagaacaatcaaacagatcttcaccttttcttatattatctataagacacaagactctaattggctgccctcaacaaccgttacaccgttacacatcaaaattttaagtatattcatctaaacataacaaaacaaaagagtatgggctagtagctaaaatctcttaaaactaatcaaccttaccgctgcaccaacaacagcacagcaaaaataacaacagaaactcctattctctcaagcataacaattagaaaattcagttccctgacatttttattaaaagagactaacccataatatatggaattaaggaaaatgtgctggaacttaaactattataatgaagtaagaataacatttaaaaaaataaatgtgacataaatacctaggatcagaggaacttttgtcttgaggatatgagctaggtagtttttggtaatgtggcacactgcataaacaaacaagcattagagtgagacagaacaagaaaaataagtaagaggcatgagtgcgagaaaatgttgcaccaatgcattaacatataagaagaggcagagaagcttcactcttcaataaagaataatatgattggctttatggttttttatatatggaaatcttatgtaaaataaaagacgacatatggaacctcatttaactcccactcccatgacttacactcaaaccaagacctagggaaattctaccatatctcaccgcatatggtttgttgcatattttccagaagagaaaacaaaaaaataagagcaactaaacaattgttgccaatgaaattaaacaaaaagtattatccttctcaacataaatatgaagaaaactagaatatttctaccacatttccgatatagcttccttgtgaagtcttcaaagaactttactgttttcaaattacactgaacttaccaactttatcctgtcaattcaaacagaagccacaagcaattagtaaaatggttgaacatatcattaaacattaattcgtaagatgaaattcaacaaaacaacatactaaagagagaaagaacaaacaatcagtaaggtaaatgaaatcattaagagagaaagagagagattagaaatcgctataaaatttgatttataattaggccagcaatagcatgaaatgaaataaattatagatgcatcgtaacaacatattagaaagaaaactattggcaaaactaacatcgaccaggaatgatgaatatgatccaatgcagcagtggaaatggagataagtgtaacaacgataacagctaggaaaattgaagtttgtgtaaaggtgaagtgatgaagatgaaaataccatgaagagaggagcgatgtagtaatctccttgaaggtactcaaatgacttcgtcaccttttggcgataatcaaacacaatatccgctgccaaattcatatgaaaacttctcaatcaaaaccctaagactttcgtatgcgaaacaaaattgagaattaaaagtctgcttacagtctcggccgagaaaattcccggcgaagagatcatcgatgacgccagacctagctccgacggcgatattcatgttatctgcttctttacccaatctgtagaggtaatcctggccttgggagtctttggactcccaggacgactgctttgacagcctcttcttcttcggggcatcatcctcggcagcgggaggcgaattcggtgcacaggaaagggaaaatgaagacaatttgttagtgttggggagactagaagagtttgggaagaaggaaaatgtaggagatgaactgcagagcgccattgacgccattgctgaggatgagtgagttttgagttgttatgtggatagggaaattctgtttggcgccacaagttaagttaacggaaacacatgatctattctttaggatttggaggtaaaatgtcacactaggccactaaattaaattaggctgttgataaatcgatccaattcaataacaatagaaggatacaatcatacaattataatcgactgctaaatattagatatcca

SEQ ID NO: 185361 - DNA, 1614 bp, Cannabis indica
gtttgtttgtttttaaccacaggtctccatgaaaatcaaaactttcatattagattgtaggagtaagtcatttttcttcatggtgaaagtacaaagattcaaaagctacatattgttcattatctctaggacatcgttttaatgtttgattattatactttcatattcaatgatgttggccattattagatctattaatttagtacttttggatatgaagcttgaagattgttattgtttgctttcaattctgttgttggaaatttgaattttttcttaattttgggcgaaactacttgcagtgtcagcactcttccttgctctcatgatagatagactacatcactacattagagaacttcggatacgaagaaagacaatggaggctgttaagaaacagaaccaaggatttgaggatgctaaagccagtggttttgacgaaatcaaagccaaggaagaagagatggcaaccctgcgggaaaaactcaagcagctagaatctgatattgagacgaagaacaaggatgtacatgctgcagaagctaatgcagttgctttaaggaaacaatcagagggatttcttctcgaatatgatcgtctactagaagaaaaccaaaatttacgcaaccggttacgagctttggatcaaagcttgtcacgctcgggtagcaagaaaaatacttgaagaaaaaagaaaggaaatactgacgtcttgaaaattatatttctttcaaattcccctccctctttgaaattgttacattttatagtattggttgtgagttcaatgatggattgattgattagatttcaattttcatctttgcgtcattgtaagtgtggagaaattaaaggaacaaacagaacatagggctttttaccttttttctttttttgtgttcaattcaacttgagttggaactgaagtagaatattgaatcaattgtagaatatagaaagcttctactgcttatattggtatgtttgtggacagactgttgtttcatgtgaagtcagactaaataccaaacgattattcctaacaccaaatgactaaacgtctatatgtaattttaaatttttgccaaattctaccattaatgtgttgtttaatagaaaagggacttttttatatatacatatttatatattgtcgtctgagtacaagcatggtatccaagcgagttacattacatgcctctaggcttgattaaacaagggaatcatttattactatgtggttactcaatctgggttctcttaacccaagttcttattattattcttttcttcttctttaaatcattagtaaaattcagtagtggaataccttgtgaacaaaagactgtttgtgttcagcgcagtgagcatcatcaggccaagaaagacgaatattgaaagcattgacagcacaagcattaacgcagaagccatgtgatttttctctgtctgtacgtactttgaagaagccaaagcaacgaaggttagaggaaacgagtaagcccaccacactacattgaacctcctcattgatttcttgaacatggctggtctacaagcctgttccaaagcagagtaaaaacgctttaactataaatatatatacatataaat

SEQ ID NO: 185362 - DNA, 1834 bp, Cannabis indica
ataaagaaacttctctgcatcttgccattaagaataatcaatttgaagcagttgatgttatgctggcatggattagagaaaagaaaagagatgatgtattgaatatgagagatcagtttggtaactcagtccttcatctagcagtttggagaagacaccatcaagtgagtctctcttattcttgattgaatgcttgtatcatttatttattgtttttgattggggcctaattaattgggaatcttagattatagtacttgatgcattaaacattaatagtacaatttattagaagtatgtgtaataccataatacatcaaccacttttcaacgcatcaagagattaattatgtgaattcgataatactcttgttttttggctaagaattcgacaataattttttctttgaatttttgacacaaatttgtacaattttgacatgtgcctctattgcttttctaaaattaactaaataacattgcgggtctgggttgagggcgagggtttgtgttggggtcaggtttaggttcgggtaggggtcgcggtctgggatttgggtttcgggggccacaatttgggtctaggtcgatttcgagtcttggttgtgtccaaaccgtgggcctggttggtggtgtcaaggttggagttaaaatcatgtgcttcaaatgtatataaatgaagcaaatattgatgaaaagaaaaatacaaaatatactataattaaaaaaaatgtttaaatttcttcaaaaaaaaatgtttaaataaattttattaactatttgtgttttcaaaattttgattctcattcattttagaaaaagaaaaaaaaattgattctaattacagatataaaaaattaaaatagttttaccaaatcaatactaaactctaatggttatagaacacatcctacataatttgttttttaatgttaaaaatcataattaatgaaaagtgttattaacaagctaaactaaacctcaatgaagaattcactacttttcagtttaaacaaaaattaatataaaatcatcagagattgtttgactttataacttaaaaattgttttttgtttttcaaaactaaaatattttttaaaactaataggggatgtttggcaaaaaatttcaaaaacagttttttaaaactcgttttaaaaaattagaaaacagaaaatatcaaatgttattttcaattttcaaaaataatttttttgtctaacatattatattttatatttttgcttgcatagtcggatcttagacccgaaaccatacccgaactcggatgggttcatatcatggtatagtgttaaaatattaatttttttagtaagaaaaaatctaaaaatatttttaaaaaatttgtgtcaaacaccattaaattttaaaatgacaaaaaaatattttcgattctcacttttaaaacacaattttaaaaattaaaaacaaaaccaaagaggctagtttatactatttgtgagtgtgttctcagtctcacgcatgtcaattaataaatttcacaaattgtacaggtagttgaatggttaatcgggtttggaacaacaacaacaacaacagacggtactactactactgctgctttgatagtaaatgctgtaaacaacagtaacctcactgctctggatttgctacacatgtttccaagcgaagcaggcgacatagaaatccacgagctccttcacaaagctggagctaaaagatcaaacgacattactcatcatctcttctcttctaattcattaacaaacgacactaatatcaacaacaacaacaagacatggtagaatacttcaagttcaaaaatgggca

SEQ ID NO: 185363 - DNA, 4854 bp, Cannabis indica
tttgattggtggtatgagggaagcactaatttaaccagcgctgaggatgatgccatccaaggtgagctttaggcccccccgtttgttaataagtttggtctattctgaaatttcatccaactccactactttcttttcttttctactccgacccacacctgagcgagcgacccagcgagaaagacaattatcacaacccagcaaccgagtccggacagtttcccctccagatcttgaaaatggctcagcctctggtgaagaaggacgacgatcgcgacgacgaaggtacgctacaccatctccatatccatctcctcattctctccaatttcgatctgatttattattataatccgctttatttctttacttctggtcgtcacagcttctaatcagccagttgtttctcagatctcttggtttatgtgttttacatttgaatcgtatcttagatttgagagaattggggtttgtctgtgattgatctgctttagtttctggttgatctgagttgtttagttatgttaaacttacttctactcggaaatggcaatgtagatttgtttggatttaagtgtatatcttggtttggtgttggattcaatgtacaaagcttaggagtctagatcttgttgcttccatgatttggttgaagacccatttgataatagggctggaattgtaatttatatgtgtatgacgagcttaattttgatgcaatacgatgtatttgtctatcgtttccacagcggattactctccgtttttggggatcgaaaagggtgctgttcttcaggaagctagagttttcaatgatcctcagcttgatgccagaagatgctcccaggtgattaatatacctcaagtgactacttgtttgtgattttgattatatccttttgtgctgatcaggacttatttgggttgttttgtattgatataggttattacgaagcttttgtacctactgaaccagggagaaacctttactaaggtaaggtttcttacgtactttgtgtttcatcaattccattttgtccagatccagacaatggaattttactgaacaatggaaattacagaatcgttattgtattccatgtcatctcttgagaagtttttctgttaaattaataggttgaagctactgaggttttctttgctgtgacgaagcttttccagtcaagagatataggcttaaggagaatggtttatcttatgataaaagagctttctccctctgcagatgaggtgacacactctggaaatggttctctcattttctatttctaaatctgaaatctgaatgtgtgaaaatcagtactaactttaatgatattgcattcactttgaaggtgattattgtgacaagctcccttatgaaggacatgaatagtaaaaccgatatgtatcgggcaaatgccattcgtgtgctttgtcggattacagacggaacacttcttacacagattgagcgatatttaaaacaggccattgttgataagaatccagtggttgcaagtgctgctttagttagtggcatccatttactacaggtatctttgctcaattccttgtagtgaaattgcatttcatacctgatttcctcctctgatatatgctttttttgatagacaaacccagagattgtgaaaaggtggagtaatgaggttcaggaggcagttcaatctagagcagctctggtgcagttccatgcacttgctttgctccaccaggtatgctggcattgtgccttgttatgacatataaataggctcttattacagacatttaggtcttttttgtaaatgaaatgcaattcttacgatgagttgaccataacttttgttctattttcttcttttcatttcctagaatttatgtgaaactttttaatgattgttccaagggatgaaaagaacttatggcacgttgaacacacattgcagtaattccttttccttgagttgattgagattacatttattatgggagtttttagatttatataattatataagattcctgactgcataatttatgttgatcttactatgttagtataagagtactgattgggacacttccagtgtacacaatctaaattagacactatgatgtgtctataattttcactatgaagtgtgtgtagcattatctttagtattatcagtctactttatgtttccaaatttgtcattgagaagccaccaaaaaatgtgttattatatagttattatattaaagaatttcatttgcaacacagattgttctaaacctttttttgttttgctttgagaagttattttgttctaaccacctaattcatcacaggaagttatttgttatttctaatgtacaaattgcatgttgctgatagagtgagtaccttataaaatgaacctctactatgaaaacatagggctagtcttgtggggttcataactacttctaggtttgcttttctgagtgtttcacgttgaaatctagctcacttaaattgcagttgacaatttatggactcttacaaaatacttacatacatagccatagtgtacagtagattgtattatgtgctgtcttcttgtttacatgctagggtcatcacatgccattaaagtcattcttcagcattgtgtttagcgaattgaaaggttgtagaacatttgtggaaattgcagatacggcagaatgatcgattggcagtgagcaaactggttactagcttaacacggggaactgttcgctctccattagcccagtgcctgttgattcgctacactagccaggtgaatatttttctggagagagcagttgcatacaaggctttattactgctgatcttattattaagcatgtatccaaatttatacaggtcatccgagaatcaagtaacatcaaccaaacaggggaccggccgttttatgactatcttgagagttgtctgcgccataaagcagagatggtgattttcgaggctgccaaagcaatcacagagctcagtggtgtaaccaacagagaattaactccagccatcactgttcttcagctctttttaagctcttctaagccagtgttgagatttgctgctgtgcgcactttgaacaaggttctcccgttataagttgtgataactcttggttttatccagttttttgtgctctaattatctggagaaattaaaccatcttgtgcagcagatactatttttcatcatatcatttctactttatttagtctggaaaaagtagtctacatttttagcatttgaaaattgttgatgccaagtatatatgtgaatgactgatgcaggtggcaatgacacatccgatggctgttacaaactgcaacattgatatggaaagtttaatatctgatccaaacagaagcattgccactcttgccatcaccacacttcttaagacagggaatgaatcaagtgtggatcgcttgatgaaacagataactaatttcatgtctgatattgctgatgagttcaagattgttgtggtggaagcaataagatcattgtgtttgaagtttccattgaagtacagatccttgtgagtggcttatcacattttctacgtttatgcaattcataatttgggggtctgatttttatttttacacatgagaaggcttaattttctttgtttctgttttcaacaggatgaacttcctaagcaacattcttagagaagaaggtggatttgagtacaaaaaggcaattgttgactcaattgtaatccttataagagatattcctgatgcaaaagaaagtgggttgcttcatctctgtgagttcattgaagattgtgaatttacctatctgtccacacaggtaagatttaaattgattataaatttgctaaacaatatctttacttttgagttgtttcttaaatgatactataactaacattttattgtgggattggaattttgatattgtagatacttcactttttggggattgaagggccaaaaacttcagatcccagcaagtatatacggtatatttataatcgagtacatcttgagaatgctactgtcagggcaagtgcggtgagcacattagcgaagttcggtgctcttgttgattccttgaaggtatagctttcttttattttttttgcttttgctgaatgagctgtcttgtgtatccgttttggttactagtataacttgaaatgataattcttttctctgcttcagccccgaattttcattctgctgaggcgatgtctgtttgacagtgatgacgaggtcagttatttttgatatattgaattccagatcactgatatgtttgattttaaattatgacatgcatgcctatacattttgaatgcatgtgggcctgcacgtgtttttaattgtttgctttggcggatagatattatattttattgtatataatgatgtatttatatgtttcagttttctctatggttttgatctgaaatttgattttgtaaacaagcacagttcattagatacataaaattatggctgcaattgatctactttctaggttcgtgatagggccacactctatctgaatactcttgagggagatggctccattgttgaaactgatgaagaagtaaaggacttcctctttggatctttggaagttccacttgccaatctagagacaagtttgaaaaattatgtgagttatcccagtctttaatataatatataattttttggggttgcaatcttattgttctgtttttttttttcttttttaaattttgttacaggagccttcagaagaaccttttgacattaattctgtacctaaggagattaagtctcagccacttgcagagaagaaagctcctg

SEQ ID NO: 185364 - DNA, 7744 bp, Cannabis indica
aagtggttataaaatacatttttgtttaaaattctattactttatttttgtgattaaaaaatttaaaaacaaatatattacaaaacgccaccataataagtaaaaatagtttcgcatagggtcatataggttaaaagctaaaaggaactaatggtgcctaataataagcgctttacattagtaaatatcattttggaccttatattttgtaaaaattatttattggactatctgttttgttaaatgaaaaaatggaccttatattttttaaaatggtaaaaataagactctaagctcaattttcaacaattttattttttaatataacaaactttacgataatttttaagacgaacagatactaataatgtaaccagttttgtcataatatttttagatcatattattattaaattttattttgacaaaaaattagtttagggttctatttttacaattttaaaaaatatagaatctatttaatcaatttaacaaaacagaaatctaattaataatttttacaaaatagtgtcttttgccatatatttgatggtattattgttaagattcataacatgaatgagggattccgattcctagatcgtctaatgaagttgctaatgttttagccaagtggacttttctgtttctttgaactgtaaactctctttctgttaataccaacagcagtgtggtctgcggtgaactcatcgatgcggttgttatttatccaaatcagagggtatacaacaaacgttgcaagttcctttaactctcttatatcacgctatgcccgtctcggccaaattcataatgccagaaaggtgtttgatgaaatgcctcagagaaatattgtgtcttggaactccattgttgctgcttacttcctaaacaatcaacccggagatgcccgtaagttgtttgataaaatgcctgagaggaatctcatttcttggaatgcattggtttccggctatatcaagaatggaatgctaggtgaagctagacaagtgtttgattcgatgcctgagcgtaatgtggtttcgtggacaactatggttagagggtatgtgcaagagggtatgattttggaagcagagtcactgttttggcaaatgcctgagaagaatgttgtgtcatggacagttatgttgggtggcttgatacaagctaggcgtattgatgatgctcatcgcctttttaatgagatgccggagaaagatatggtggcaaggacaaacatgattggtgggtattgccaggaaggtcgtttgaatgaggctaggatgatttttgatgatatgccatgtaggaatgtcgtttcttggacgacaatgatatccgggtatgtgcagaatcaacgggtggatgtggctagaaagctgtttgaagtgatgccagagaaaaatgaggtatcgtggacggcaatgttgatgggttacactcagtgtggacgaattcaagaggcttcagaactttttgaggtgatgccaatcaagtcagttattgcttgcaatgcaatgatacttgcttttggccaaagtggagaggttgataaatcaagaagaatttttgatcagatgatagagaaaaatgaagtgacatggaatggcatgattaaagtttatgaaaggaatggtcttgaattgcaagcacttgatttatttgcttcgatgcagagacacagagttaagttaaatttcccttcactaatcagtgtcctatctgtttgtgctagccttgcaagtcttgatcatggtaaacaagttcactgtcagttgctaagatcccactttgataatgatgtatatgttgcctcggtcttgatcacaatgtatgtcaaatgtggcaatcttgagaaagctaaactggtttttgacagatttggtgaaaaggatgttgttatgtggaactctattattacaggttatgcacaacatggtttaggagaggaaactttacaaatttttcatgagatgtgctctttgggcttagagcctaatgatattacattcattggagttctttcggcatgtagctacaccggaaaggttgaggaaggtcttgaaatttttgagacaatgaaatgcaaataccttgtggagccaagaacagaacactatgcttgcatggttgatctgcttggtcgtgcagggcaggtgaacgaggcgatgaatttaattaaaaaaatgccagtggaagctgatgctattgtttggggttccttattaggtgcatgcaaaactcacatgaagatggacttagcagaagttgcagcaaagaaacttcaacagcttgagcctaggagttctgggccttacattttattatcacatatgtatgccaccaagggtcgatggggtgatgttgaagagctaaggagtgacatgagagcaagaagtgtaagcaaatcacctggctgtagctggattgaagtggacaaaaatgttcacatgtttactgggggagatagcatgggacatccagagcatttaatcatccttagaatgttggatagactaggtgtattactgagggaagccgggtacaatccagatggtacctttgtgatgcacgacgtggatgaagaagagaaagttcatagccttcaatatcacagtgagaagctggcagtggcatatggactgctgaaggtgccagaaacaatgcctattcgggtgatgaagaatcttagggtctgtggcgattgccattctgcgattaaattaatagccaaagttacagggagagaaattattttaagggatgctaatagatttcatcatttcaaggatggactgtgttcctgcaaagattattggtgatagcaagacatttatggtaagtctgatttcagtttagcaatgagcatacccaagctatcggcctattgcttaatttttagcacagaaacatgacagaactgagttaatgcatcttaagaatgtctgatgctttaggtgaccacatttccataatacttgataacactggagcaaccaatcattctcatgctctgtcatgtaaaaatggttaagcttctgtatcgttacagtgagaatttttacactgttgactccaaacgatgaggcgcataaactttaaattgcactactaagttattaaccaaccgttgaagcattcgttcaaaatttcgctcttacaactcctatttttgattgcacatagaggtatgtattggttctgctattatatgacctattagtctggtactcaatctgtatgcttgctaactagataatttgttgggtcacttccccaggtgataatgtaatttattgagaagtccagctggttacacaaacttcatgtttctttcataatccatttacccaacccaagtgttcaaaatagaaggcctttgttgggtttgaaacatactcaaaaagaggtatttttgttactcacatgtctatgatttacttggttttgtttctgccatgaagtgttgtttgttactttggtccttagttatcaacctcttagccaatgccttgtatgtatatatcctacttatttattggtatattccattagtgaaaaggtatttatttaattggtttgggaagctgccaattatgaaagttggtggtgacatttcctatcgaaattaagcttgatcattattctgcttatggagaatgtttagctgattaggtcataatacttgtgaatttatttttcattttgttttggccgtaaactgccaattaaattttaatgaattgaccaaaagcactttaattataaaaaatgaactagttgtttagagaataccttactataatgattatggatttgttcatggtcataactttccaaccaaactaacaaaaaattacagggttaatgataaatatacactcaactccttaagacttggttggctatgattatataattatatatgactatgcagtagtagtttaatagtttgatacagttatttccctacataaaatgtgagtactaaaattctaaagattttattagaaattgcatgatcagtgattcagatgtaacccagtctcttctttttccttcattcttcatttgctgctctcaattttcgtaaaaatgattctatttatagtttatactttcgttgtcatctttctatgccctgcaaaatcttcaacttcaaatacaggattcgaaggaccatatggtttgctctcacaaagtcagatgttcgagttcctcttagatacctacttagtaattgttatagttttctcgtcccccaaatattctcaatcttgacttcatcttcatcctcatgatcttgctaaaaaaaagaaaaaaaaatcctcacgatcttgctctaccattccttctttctcctcaagagtagctgtgatgatcataaccctccttttgccttctctttctatgttgttcataaaaatcaattaacactgtctgttttcagtttcaccatctataaatacaatatagatactcaaatgaattttaattaatttgattatcaacattcaacaatttaagtatataataatatatagtcctttgattttgttcatttttgtaatatacgaaataaatcatgtgttaggcaccaagactcaaataaatagatataaattaggtagtggggagtgtgaaatatttcttttagacgtgagtagcattttgtggagtgctaagaagccttcggtggtcatttgtggtttagatttggtggtgctcgagaatgggatgcggtttgggtggggcctttgggtctgtttcaggtagcgtggggtttgggtcgtgtttctacgactaagttggtgaaggtgcttaggcggcctgtggtggctgtcggtagggtcggtgtggggtgttagggggttgcgtctaggggaggattttcgggaaaagatgcatttgacagctacagaatgcatctagttaccgattttcatatttatgttttatttttatctatgttctgcttttatttattattttttttaataatgtgttgtagcacgactctgctattggtatcgtattagagtcatatttgtttatggcgaggtcttttagtcttccctccagtagggtcgtttgtgttctcttttacatggatggctcaagtcgtttccgtatggttgacacagctaccacttaccatattcagatatggggattctcggattgttattgacccatgatttattattcgatctttcatcaaaattatcataggcatggttgattttttattattttagtttaaataatgggattgtcgttatttaattttcattcgaagatctttaggtttgatttgtgatgtgttcattcattatagaaatttagcactcactactacaaatgtggtttttaatgtcggttttgacgttagtaaatttgaatagccgacgcaattaatcaggattagaattttgcatcggctgtgcttcgacgcaatgtttgtgtaggtgtggggaagaccatcatgtgttggaagtttgatgtattgtatggtgtgtatgaaatctaatttggcttatggaataatcatggtaagtaagttcatctcagatccagggaatgaacactggtctattgttaagtggatcttgaggtaccataaaggtacaatggtcttgggactagtgtactacaacaacaaaaatattgagacagaagtcacaaggtttgtggactcgaattatgctaggagcagtgacactaggaggtccataacaggttatgctggaagtcaaatcttcaaaaggtggttgcactaatccttcacagaagttgaatatatggcaaccactgagacaataaaagaaacaatctggctaaggggttatacaactgaattcggattcaattctgaagaccattttagtacattgtgataaccaaattgtactacacttgatgaaaaacccagactcatagtatatagacatcaaggggaggttcaagttaagaagattgagacaaaagaaaatatagcaaatatgctccctaggtataaacctctagccaagtttagactaagtctaaacttcctaagcatacttagttgttgctgagattactaagaccaagaacagtcattactcaacagggcaaaaatacttgacatgtgaccaaggtggatggttgttgttatggacacatgttaagataactaactacctagatggaactaactaactgttagctagttatgacagttagtactcgagttgagccaaatgctattttatacccaagccttagagtcatttgtaacacccaaaaaaatcagattcgagtacgagagagttagagtgagagttgaggagggttgttaatgtcatggtgtgtgtgtctgatcaccattgacacaagtgaggttttgttgtaaagaagctttgcttcttgggtgatatgttgaacaaattgtacaaaagtgtattgggttctctcatctgctattagctcaataaagatcttaaaaccttatttttggccaagaagtaggtaagagtgattcatcaccactccttgttcgaatcttgtaattgttgtgtatttctttttatgttattctatttttgtttgttcattcatttttaaatttgtctacatgttttacttttgatttcttggttgagttttattcttgaagagttgtatttcacaacaattattgtatttaaaagaataaattattattatgttagagaaacactatatatacaacttaaattatatataatttattatacttattatatgtaaattatatttttttttagttaaataagacataaatgtattaaattgttcataaatatgtcataataataagattgtaaacatgttatgcttgttataaatatgtaaataagaataagtaaacaaaaattaagcatgatcccttctataaatgggttaaataggtcgggtccggtcaacttatttattgatttaggttttagttttgacacgattaataaataagttgacatttactcatatacttaagcctcgacatgacatgaacatacctacgaacacgaattgccacccctaattttgtaattaaattgaattggttctaatcatgcccaatcctaatcaaatacactataaataccaaaaccttataaatgtgattttaattctttttaggtttataaaatatctatagattttcattctatcatataacctaaggttttatctctcgttctcttccctaaccctagccagtcgtcgtgtcaggttcttctttttctctgaccaaggcgcgtcgaccctccactgggtttggatgtggctctagttggggttattaatttcacacagtaaggcgtttcaaattctctgttctcttccttgcttggaatggcttttggttagtgtctctttgctttgctagggtgtttccttttgtgccgatctattcgaagggcttccctttagagaggatggatggaggggcatgtgatttggggttgtcgatgttagtagagtcgttgcacagccatggttttgttggacaaagatcctccattgagggtcgtggatctgatgtcctgagaaatttcctatttggttgagtgtatgagatttagtgtagggttgatggctatgaatctgtgtggtgttattttaagttttattgttattttatttgatctaatagtggtggttattcacgtcccattagatgtttagttattgtctccagtctctctctctctct

SEQ ID NO: 185365 - DNA, 5698 bp, Cannabis indica
tgagtcctcttgactccgactctctcgtgcattgtttaaaaagcaaagatttgagcaaagtctttcttggatcttttgggcagtacccgtgaggtgagggtgagagtgtgaccgtaaaactaaaacacgtgtctattttaatataactttacttactttccaaaccccagactaaacctacactcgtgtgtttaattcaatttttacgtccactaatgatgttattaaaccatttaatttagatgaaaaagaaaaactaaaaagtatgaaatttgcaatctcaaagctcaaaaggtaccattattttttgtttatttttttagtcaaactcaaatgcccttttaaaaggcctccacctgagtctccccgccactagagctcccattcctgtgatttgtacgttacccattacgagttgcgatttcactcacccaaaaaaccaaaataaaggttaaaccacacccacagtttctacaaagtgctttcaatcataggatcaggtcagatttctattgctattgttagtctttgtatatgtaatttatggaacaacatgaatgtggtcactcaactactttgtcgaatttcacaggcgcatttgtgttttgatttgagatgtttgtgttgatcattccattcatgttttcgagtacagattgagaattgctggttttggataattcaagtaagcttctagctctgtagactgtaacttatgaacattgacaaattcatctgctctttattatccagctgctttttttaatggcctacatttacatatccgttttgggattttctggtggagttatttcacaatctgagtcgtattacttttatgattttatgttgatctgatgaatttaagaatctgggtcttattaataatttatttatattgacttatttgcttagtcatatttgatttagtgagagtttttgttttggggggtgtttgatggtgattgtttaacaggaagaaatgggtgctactttattgccttccatggcatttgggattcttccccgctatgtcataggttctccaggtgctgattgcagaggtgtttcgggttcacgtattggggggcatcttgtttgttataaaactgcttcaagaaggaaaaagtgcgtatacaattgttcttttcttattgacatgttggaaatttgttttggagatgtttagtcccattttcttttgactataatgacacctatgttgtgtcatttgaagttttgagtttgatcatgataaaatctaattcctgcagaccttctagcaaatatcagattgtttgtaaatcaggaagtagaattttttcaagcatggtatgattcttctcacctcaatttatgttcattccaatatgagaagaaaaatgtaacactatattccttgatgcaatcatcaagtattattcaaaatggttttagtgtaattgtcaatgaaataatgtgcccagaggaagaaagagttttgaagggtcattttctaggaggaaaataacaaagttggaaaagaaggcagcttattttaactgctcttacatgatttatgtgtcttctatattccagaaaggcaagcgagtaaaagagtagttatctgttttattttgatggcaggatgattccagtgacactatcactgacttgggcgatgggagggatgttttttcatcagacagtagtgaaacattagggatagaagaagttgaactaatagaaactagaaaagctctttcaaatgcccaagcaagacaaaaagccattcagaaagagagagatcaactgctagaggagttggcccgttctaaggctaaacaacaggaatatgttgctaccatattgcatgataaggaactggctattaaagaacttgaggcagccaagtctttgttccaccagaagctgcaggaatcagtggaggagaggttctcgttagagtctaagttggtccttgcaaaacaagatgctgttgaacttgcagtacaagtagaaaagtttgcagaggttgcttttcagcaggctacttctcacatactagaagatgctcaacttagagtttcggctgccgaaacttctgctgctgaagcagcctatcagattgaaaagcaaattcaggaagctactgaaggtactatattgtcaattgtggaacagtctaaagatgccatagagaaggctcttgatgtggcagagaaagctggtgatcacgtagcaaaagcggtgtctgcatttactgatggcctcgatcaagttgatgagattgtttttgtccaatctgaaaatataaagttaaatagggtcgtaactgatttagaatatcagttattggttttaagaagtgaggttgataggttgaaattggagttggaaaatgtccacacacagatacatgcatctgaggctcgtgctagcaatgctgagaaagcattactggaatttcaggaatcaaacagtaaaagaactctcgagaaagaggaagaaatcatgtccttgatggagaaaatgaggaaagatgcctcagaaagaaagaaggttgccactaagtcttttaaggctgagttacaaagcatcaaggctgctattaaggctgccaaagaaactacacattccagagataatgcctatctaagaagatgtgaagcacttcagaggtcactgaagacatctgaagatgcttcaaaaatgtggagacagagggcaaatctggcagagtcattgttattgaaggaaagtccaatagatgaagtgagtaaagattctgttcatgttattaatggtggaaggatagatcttttgagtgatgatgattcaaagaagtggaaacttctaagtgacggtcctcgtagagagatacctcagtggagagcaaggaggatacacactatccgtccaaagtttccaccgaaaaaggttgatgttgctgaagccctaacttcaaaatttagaactttggacttgcccaaacctaatgaggtatggtccattgctcaagagaagctgaaagaaggggatacattaattgagcatgtcattgaaaaagaaaccatcgagaagaaacgcaaagcactggaacgagctcttcagcgaaagaccatacagtggcagaggacccctgaacaaacaaaattaggtaagttttgcttgtgtcttcaaatattttcttttacctattctttttagttttattaacatgtaatcttgacatgaacttgaatgcagaaccaggaactggaactggacgagagattgtggttagtaatctgatcaatactcattactaaaaaaatttgtgttacacatggcttggacatcatccatagtaatatgataattaaatcatttccttctaaatttgtatattgtagaggtatcattatgttccgttccatatttatggaaatgtttattatctgtttcttgattataaagaagtgaataggattgcttgttgtactagttaccatgtttggatatgtaaaataactagggttatttggcctgctgtagctagtcaatttattctgtatcctggattgtccactcatactcatagtctgatagtcatgctatttcaactatttggactctgagaaatactttttaccatacttgcattagaacatatatgcacgactgatctaagttaccttgaccattatttatctttcaaaatatggccaaggtggcatcccccgttaagtgtcgttgcttatgatttcactatactgtcaatgttacatgatgtgccttttcttttctgtgtacaaattcatgtacgtctaaatttattaaaaagttaaaaatcacattgtctaagcattctttttctatgaagtttcaagctttcaactgggaaagttggagaaggcagtggtacttggatttggcacctaaagctgctgatttatcacagtctgggataacagcagtttggttacctcctccaacacaatcagtggctcctcaaggtcttacatatgcttcttttttcttccatcacttcctttttttttttggagggaaatgtaattgtgatgatctctgttgactttatgaaagcgtaacgaccatcttataattatttcccccaaaatgccatgaggttcaaatgtctttttagatctgttcttgtttagataggcttttggtctgataacattgaaattttctttccttttatgcaaatatataaaagtaattttgtatataaatatttttatttcagactttagatattcattatctaatgacatgcaggttatatgccttcggatctttacaatttaaactcggcatatggttctgtggaggaacttaaacactgtattgaagaaatgcattctcatgaccttttggtatgtttgtggttttttattttttatttgaggttgagctttggataataaactgcttaatacatgtttggtttctaaacctggtgctatgtctgtatttctatgaatataggccttgggagatgttgttctgaatcatcggtgtgcacataagcaggttagatattgctataaaaattgttcttcttactcttttttctcaaattaacctgatttcgagtatatttatcacttctaactctaagaagctaatggtgatttgtcatatggtaaataaactattatgaggaatttctttctatcatatccattgtcatgattcagtgataaaatagtgaatcatctataattttaggttcaatttaagaattatttttgaggtccctattatagaatacatatactgctgttttcagagtccaaatggtgtttggaacatttttgggggcaagctttcttggggtcctgaggcaattgtttgtgatgatccaaattttcagggtcgtggaaatccttcaagcggtatctttttactcaattgtttattaatggtgtaatttcaagagcttgacacagaatttcttgcaatagtatattgttaggcctcaatatatgctcacacaacaagtcagttagagagttaatacagtttaaattcctatagggctggttgtattgctagttagttagaaatcttttattcttttctgtgtctatataaaggctagtcctatcctacaagaggtatcagttagaattaatatgttaaaagaaagtgaaatactttctagggagatgccaaactatcttgaaaagtttggaacattctatgatatcaataaaatacttttcattagtgtatcatatatgcacatatggatgcatacatatgtatgtgtatatgtctaaatcacattatcagttttgaaaattaagttggcaatgaacatgccaaaatatgtcaaaaaagttatgatgataagctagaaattgagatctcattccatctcactcagttgctcttaatttttgcataggtgatatatttcatgcagcaccaaacattgatcattcgcaggagtttgtaagaaaagatataaaagagtggttaaactggcttcgaaataatattggttatgatgggtggcgtctcgattttgtaaggtaatgtgttctcaagtttttttttagctgtaacatgtgtttcagacactttctgctgatttttgttctaggattgctttttcatagatcacaattataaagctctaagagaagaatgtagatgagattagatcctcatcaccattcatttttattttttttcaaaaaaa

SEQ ID NO: 185366 - DNA, 2707 bp, Cannabis indica
tatatatatatattaattaaattcaacatgtcaagtgtgcttatatattttttaatatcaattttgtcttctcatgaatcaggttagcaaggatacagaggagtctgtaacagttaaaattaaggagcaaaagccagtggtggctacagaattgaagcctgtgaaaaatgtggagtttatgctggaaaaggacgtacaggagttaaaaccagcaaagggtatagaggaattgaagcctgcaaagcacaaggaggaaatggagcctgcaaagaactcagaggtgttgaatcccactatgtacacggaggagttgaagcccgtaaagtacacggaggagttgaagcccgtaaagtacacggaggagttgaagccctcaaagcacacagaggtgttgaagaccgcaaggtacatggaggagttgaagcccgtaaagtacacggaggagttgaagccctcaaagcacacagaggtgttgaagaccgcaaggtacatggaggagttgaagcccaccttgtacgcggaggagttgaagcccacaatgtatgcagaggagtcgaagtcgtcaatgtactcggaggagttgaagccattaaagtacacagaagagttgagccctgcaaagtacgtagaggaattgaagccatcattgtacccagaggagttgaagtctgcaaagtacgtggaggagttgaagccatcaaagtatgtggaggatttgaatccagcaaacgatgtcatggatttgaattcagataaatatgtagaggaattgaagccagcaaaggacatagagttaaaatccgtagagagtgttgaggaatcgaagccagtgaaagatgttgagttgaaaaatgtaaaggctgtagaggagttgaagttgtttaaagatgttgaggagattaaatcaaagctaagcaaatttgaattaaaacttcatcaggttggtcttgtcacaaattcattaaatgttggtgtatggcttttattgatttcctttaactttcatattattattattattataattctttacactttgtttttgctttttttttttcatgtaatagcggaaagtatttttgaacccaaaagagtggaaagtatttttttaacccctgtatggaaggaaaaacagaaaactatcctcagtatttggatcataataacatttggtcttttacccatggattttttatatctcttcattaatcaagagccataattaactgatatttttcctttgtaggctgatgctactattttacagctgatggaggagagaaaatcaaacattgaagagagaaaatttttacaggagaaattagtaattctttcaacccctattctgttttgtggttctcttactattttgttttgtatttcttatatatttctctcttactattatctcctgcaacaaaatctgagaaaaataaattgtaatcactatagcagcagtgggatgaatttaggaatctcagatagcgagtgggaaaaatattaaaaataaaagtacaaaaaggttaaacaagaaataatttcacagccatgtaaaacaatgtctgttactgctttagttggactaagtttacatgctagattaagttcttacttatctcttagttccgacaagtatggggtagagtagaagtaaaagacggaggcttacttttcattatttgccttttgtcttcttttgatatatatatatatatatatatatatgtatatatattgtcttctaaaacttgcttggagcctcttatattacacactgaacttttcgtagtatgaaaactgtgttgtcctcttcttttttgtatttatctgttagtactagctacaaaagcaataaatttctctgttttatcttctgttttgtttgcataagaagtcacgagttcaccctggacttctgcatctgagacatgtcttaagtattttttgttcttgtttattgctcactgcaggcagagttgagcaaaagaggcgtaaaaacggtccaagtcgggtttcctcttctgtttgtttttatggttgcatttatcagtatcgttcttggttaccgtttgcaccactgaaaaacccttcaccgcctgatggttcagtgaagatgaagccattattatctatgcaactgtttgtatgtaggaatatagtcgcataggtataagagtttctttacttctctttatttactttacatgtggaaaaagaaaaagatgaatgggtggatggtcagtattttatccacactccaggagcgttcaactcttctacatgccgctttttacttctaatatatatatgtatatttagagaacagaagataaagtgtgtaaagatttttcgtatcatttgaaaaaatttagaaaacaaaaatggtgctcattgtattgggagatgttaccaaagtgaactggtttgtaaatttagggctcgaataaaaggattatctgtggttatgaaagtaggaacagagcttgtcttagaatctttatgtcgtttattaattataatctttatttttattcaatgagcacttacatcactatttttttttttttttttgtttacgaacgtggtaacaactttactttactagttaaagtaaaaattaaattttttttaagtttttttacgaaaaaactaaaaaaattaagtaaaaaaaagttaaaaaacttctaaattaaatttaaaagttttt

SEQ ID NO: 185367 - DNA, 1353 bp, Cannabis indica
ctgggtttgtataacatatacaattcaacttgagggggagtgtagaaatatctttgtaaatagctagagttatttgtacagctatatttagggtgtatttggcagcttagtttaggatgtattttttcctaatttccttgattgttgcctaattctactatgtaatcaacctatataaacacctcattttcatcaataatacattagaagtatcattcacaaattactacacgttataccaactttaatctcattgactatttacaaagtagtaaaagagaattcttcatttacacagttgtttcaattcctccatatgttgtagatactaccaacaagacaagcataataaatgctcatactctgccctttacccttgctcgataaccaactcaagcaaccatcaaaattcaaaggccaagatttgatacctagccactcaaaaaccgtagtaatcacctgccttaaaaaaacacagccaaagaaaaggtgtttatggttcaacatttcagaattgcaaactggacagctaacattatccatcacaatttgaaatcttacaaacttatttttgataagcaattgatcattaaccacttgtcataacatgaacttgtgcttcggcaggctatttctacaccagactgcctctttatagcaggctttccccacctgcaatgttataaacagaagctgcactaaatttaccattcttcccttcagcaatgaggattgcagcattaaatttcactcttaggtgacacaatttgcgccaataccagctagcatccgtggtttgattgtagtcccagatgtttgtgttctttaaatacaccacattaacccattttccccaaatcaaatcatgtttgttcatcatagcccaaatatacttggttaggattactctgttccaagtagcactatccctaaatccaagccctcaatgagactttggatagcagattttttcccgagaggctatatatgtatttcgctcctgttacctttgacaccccacagaaaacccgccaagtatttaagaggaaaggagccctcctctaactgaatatcctcaagaatagcttgtttatccacatcatgaacacccaccaagaacacttgggacttagctaaattagcaaccagccctattgttttgctaaaatcatccagagccactttaatgtgatgagtatcctgcttagagctcttgcaaaagagaatcaaatcatcagcaaaacataaactgattaggtttacacttttgcacatggggtaatgcctgaaagttttctccttagcctcgaatttgagccttctagtcaagtactccattattagaacaaagag

SEQ ID NO: 185368 - DNA, 2764 bp, Cannabis indica
atatatattacatcactaaaattaagtagaagtctctaatcaagagctaatatttgcggcttaaaaacaaaactaataattaaaaagaatgaaacaaggatctgacatgcaatttaaatactgtgcttcaggaggagtatcataacatgtttcagcttctaggcaaatattaaaggtgtgaagtgtgaagcacgtaccccaattcttacggctgcctaaaatgccatgaagaaaaacagctgttggcggatcaggtaacgacttatccatgacagaactccatctaacctgcatatgtaatagtttatactcacagttacacttgcattcattgaaaaaaaaattactcacattgttgactgcactttggttgcatttatttctttactgataattaaccagaaataattaacgttactctgcctatagtaaagggctacaaactctaaatttcacaatcaaactaaattcacacaacagaggacataagtagctaaaactcacaagtgctccctgcacgagttcgtatgcctgtaaaaggaaacatcacaaaagttcagtcaaaaatacgaacctaacctctgtctaaaaattgttgtaatcatagcaattttcattaccagaacttcagaaggccttgacaaatctttggttcgtgtaaccttctcgtctactaacgccatgcgaacacaacgacctttaatcctcctcctaaaatgtctctgacccaaacaagaaccgcaaaacgcttcattctggaagcgtaaataagatattcgccaccaaaattaatcaatgtctccattaacttacacagatgcattgcacgaaacgttatttatttttctggtttcaaatctgaattcaaattagaaagaaacattacctgaatcggccatgaaactctgtaattaatgggggcgaaagaagacgctaacgtgttagaaaaacggaatactgagctcccgtcgtgaccgcacatcgcgagattcgaaatcgtcgacatcttcaccagatcgtatcaggagtaagaagacgatgaagacgatgtttaaggggcaatgagatcccacctccaaaaaaaaaagaacaaaaatgcaaagagagagaaatgtgaaatgggaggcggagacaccgaggttaaaaaaaggcggtgcctctctctctctctctctcagagactcagacctcccttattcccttatttggttactaacccaattcaaagaacgacaagtaagtaaccaacttttttgcgactgcggtggacgttcgcttttttcttttttgatacttagaatgactaaattacccctcttcatgtaataacatgtggttgcctatagagaaggaagggaaccaagtaagccaactgtacaagtttgtaaaggtacagcacaactaattattagctgttgccacttatgtggtaaatttgtaattttgtacactaccgaccatagtgggccagggcaacttaaaataagagggaaatttacttttatactcacacacgcagaaatttacaaaatagtgtctacacttaaattttttcttttataatgtagagaggacaaaacaaaaaagaaagcttcattctcaagacctattattgtaattaggactgaatattttaattgggtttaatttaaaaaatctattttatccggacggattgagtccaacccgatacacttctgggtaggtccgggatggcagaatgctggagggcaagtctccgtgtagcccttgggcttagtctttttccagactcgcaaagcttctccgtgaccttgcctaattaaggggacttaattagtgattatttacggctgtgtttcttattttatgtgacgtgtctcttgtttagaaacacaaataacaatgtttttttggtgtatattttgtattatttagattattgaagtgaaaaattaaaatcaaaatatgaaatttaaattataattataaaaataatagataatgtatagaaatattttatttgaggatatttgtacaattgagtaaaatgattaagatttaagagtattttgggggataaaatttttgataccgtcattattgaaggtgcacactaaaatccttttaattaaaggtaaagatgactatccattagagttgagttttgttggtgaaaaatggatttaaagcatctgattggagatgtcctaagcctctttagtttggagaccaaaagttacaaattatacataagtctcaataatgccaagtgcaaagcgcataagtttatatttatttagagcataaaactattcacttttgggtattaataacaattgtacaaccaattttcaagtgggcatttggtctagtggtatgattctcgctttgggtgcgagaggtcccgagttcgattctcggaatgccccttgtagagtttttgctactcagaaatagactgtaatttctcataattttctgtaaatctgttgcccattttcttcaatacccttattttttctctctctctctctctatcaatctctcaacccagcccaaatcaaaacctttccacaccattggcctatttacctttcttactactaaaatggcccagctggaccaaatgacagctctcttacccaaaacacaactttccacatttacccttctctgtactccatcaaatctttatcactcgttttaattccattcctttaatctctcggccccaaatgggccttttcggttttatgtagtttaccctaaaaaaaaaaaaaaa

SEQ ID NO: 185369 - DNA, 2772 bp, Cannabis indica
tctcttcatgcaattcaatgtgtgtaacttggcagctcgtgttttggagagctattcttcaatatttttgcctttgtatttacctctgacccttttttctcgaactgttgccacctggtgtagacatactacaaatatatacaacacatttttttatttaaaataaataaccatactcaaaacttattaaacaagaacaattttaatttttattcctattaaaacactattacaattacaattcattatcatcataatcagttacagatacaacattatcatcactgtcactctctaattctaaggagttatcgtcttcggtatttagacccttggtatcatcatcgacaatgaaatcatttaactgttaatcatttattatttaatcactatcattcataagggcacactgtgtatggtaaggagagaacatggtcatctactgtgattctctctctatccctcgttgtgtcttatttcttttcttcctggtctgggggtctctcgtgttatgattcttgctgtttcgtgtgtccggtttgttggctttgtccttgtttgtgtgtgttatcggtttgggctgctcgctttgtttgcttttgttgtctaagtctctttttcgtttgcccgtgtttatttttctctggggttttgtagtgtgagtttgtgtgtgtttgctcttattcctcattgttgtggtctttggtggtttgttgtggtttgtcgtttgctatcggcatttatggaggtagtaaatgcttctttgactccccctcttaaaggcaaatgcctttctgtcaatgatgcgttggttaagttggttccttgcaaatcttctcgaaaagctctatccaccttttgtctgctgggaaaagtcgtggcccccatgtctgtgagtgaggccaatgttatggagtttgtggccaaagcttggaaatttcctgtgaccgtggtggctctatctgagggtactaaacataccaactgtttcgagctaagttttgctcgtgtggaagataggagctgggcattggaccatggcccttggtgtatccgtggctacaccttttttctccaagtttggtcttcaaccacggaatcccctgttcttagcgacacgatgcgtatttgggttcaggtacacaatattcctcatgaatttttttcaatggctaacggtttattactaggtggtaaagcagggaaagtcatctatgtggatttgaaagagaacaaccctgcctcttgggggaaatacctcaagattttgatcgaaaaggatttcacttcacctctgttttcgggttgttttttcgacttggattcgggagtcaagagatggctccagttcaaatatgaacaagtaggcatcttctgctatttttgtggacgattaggacatcaaagaagaggatgtactcttacttcaccggagttggtgaccagtgacaatgggatccctttccctctgtttgggtcgtggttatctacgtcgtcaacctacagggacgttttctccagtgcaaactctttctctccctgtcctgatcactctggttatgctcttttttctccattccgtcgtccgtccaaggtggtagctctcgtccatggagatggtggtttcaggcgaacaagttccatcctttctcgtggctcggacgttcagggatggtgactaagcgtggctttctgtccgctggtacttctcattgatcggagtgggtctccaaatcgagaccagctggtggtgtacctcttctttccaaatcgggtagagaaggagctgttgaatttgctcaaatggaaaaggagtctgaactttttcctggattagaaccgcctatcactgaagctatagaagaccgttccttgatgattgtgcctaatttgaatttgtgtgaaaaagatggtgttatttctttagtggatcgggcccaagtggagcccatttctgcaggtgggccgaaagttggtattaaaccaattggagttaataacttgaacaaagaaaatttgaatattacttcttttggagataaaagaggggatgttgggcttattgatgttgggccgtgcgtgaaggacagtgggctggccgcccctcatgtggacaaaattattagcccaatgctccttgatgtgaatatgggtaatattgttagtgggcctcctctcattaataatactcctatttcatgtgggcctactttggtggagtctcaagtcttgtctaatcctagccattggttaatggggccgggttctttgggtgttaatgttaatagcattgggccaaataatccatctcaagctaatattgggcacgtggaggctacttctatttcgcctaatgcttcccatggtgccgtggaacaagctaatgaagaaaaagcattaactcaattttttaatgctcaagaaagcttattgcatgacctcaaacactttcggaatcttgatttgtatgaaatacggaaaatcggaggggacatcggggtcccggcttcgtctgaagttaatgagagaacaactccattcaagaaaaggaaatttgaagcgtctgcctctctgtgttctcggcctcataaaattcctcgcaagtatccagaagttgttcgtgattttccttgggacactaggcacaaagctaatgattcaaatttggtgattgatgacccgtctgaggatagttctagctccccgagctgctccggaattttgaagaatgccctggttggttcatttgtgatcgatgactctgtttcgagt

SEQ ID NO: 185370 - DNA, 4252 bp, Cannabis indica
gctccccactcccttcctctctcccccctttgctcctcatccaaccaagggagctccccacttcctccttctctctcccctttctccctattcaaccaagggagctccccactcccttcttctctctcccctattactccccacatgtaccaagggacgctcacctctcccaacacttagccaaaatgctaagtgttgctccctctcccaacacttagccaaactgccaagtgttgctccctctcccaatacttagccaaaatgccaagtgttgctccctcttcaaactttcaaccaaaatgccaagtgttgctccctctcttaacacttacccaaaattataagtgttgctctctcatcataagtataggtggtgatggaaagaataccaaagggatgtacaacaatgagcgaacccgttaaagctagcacgtcttcgacaaagcctgaagagagaaggtggttgtacaacgaatatgacaagtacaagcagcggaaacactatttgtctcactctatgtacgagctgacattcgaccaacactcctttactacccatctaacacgctgaccctcatagtacaaaaggaattttgtcccttaacttttgggactacttgtatcttggagccattacaactctctataaatgaagagggggttgaaaaatcgttacttgtaagaaatctcttatattctatacaatatcattttactcaattgatgacagaatatttttaattttcttaagtcttttatcatcaactctttatatttgattttctactaaaatttagttgacgagctcctaccgtcaacacatatcaatctactcagatactaaattaaatctaatttcaatatttgtaaaaaaagaaaaatccaattcaatatacatttatcactgagtgtgtgagatgggatgctttgcataaggttggaattcccatggtgacactataatcctgaccttaaaagtggcattcctatggaagcaacacgtaacagtttgccctattgggtaaggcatagtttccatgcgtgggacggccaaagctctcaaccaggtaagggattgtgtataagccagtaagccacgactcattccttattccttattggtctttggaattgttatcaagtaaaaggagctgaaaataggatgtgcaccacctagttctctcattctttaataataaaaaatctatattcattcccgaattatcaatgtaattcttattccactttattactatttttattctattacattaaatcgaataataggtaagtaacattcttaataaagacttgagtaattaaattttgtcatttttcaataagctaaaacaaaaatgtcatttttctaaaaccatcttaaaattagccttcttttcaaacatgggccaaaaaaatgcttagaaataaccaaaatcactagagcataatagattttgtaccaagaaatagaatccaaattggattgattttcaattaaattcaattctaggacaaaaaaatagatacaaagatgacgtatgatgacatagacagcatcacgtgcacaagtctctatcacgtgtcaaacaaacaattaaaaattaattatatattttttataaaaaaaattaaaagggaaaaatcccaaaccccaacacacaccaccaaaggcttccaaacccaagccattagtcatagtccaaccaaagagcaccaaagtcattcagttggagggaaaccccatctaaccgtccatttttgatccaacggtggagattgtctctaaccacaaaatgagaaatccaaaggtgaatttagagagagaaagagagatatatatatacacaaaatacagaaaaacagagtcttctggtgaagataacagagaaataaaaaaaaaataatcagacacaaccactctctctctctcattttgttttccacgaaattactcatctgggtttccttcattttcccggaaaactcatctgaagagagaaagtttccttttttttttcatctgaaagagttttttttttttgtggtggtggtggctctgctactgccgccatagaatgcaactttcaatcaacttgtaaatcatctctcatctctattttctgattttcctttcctttgcggtgtttgtttccctggaaaaaagttaaaagagaaaaatttgtttctgtgaagaaaatcaaataaagagaggaactttctttaatataaactgatcttgttttctgggtcattactaatttcattcatttgcatgataatctgagagaaaattgaatagatcttaaaaggtaagttactctctttcatttcaatatgaaaataaagtttcaaccttgtttttttcttttcttttgtgttttcccgggaaaatcttacatggtttcttttgttttcttagtagagatggaaaaggaaggaaagagccaaaaagggtcgtcggcggcgacggttgtggcggcaccgacggcggcggagactgattttgtgttgcagtggggtaatagaaaaaggcttagatgtgttaaagtgaagaaagatcaaaactttaatgggaaatctccttcagattgtttggatagtaagaaaattagttctcgtttgttatcttcagctaaagattcttcaccattacagcaacgtctcaacaagtaattataaaccttttttttaatttattttattctctaaaatggattgaatctaaagttgttatatttgtttttgttttgttgatttttagtgttttttattgttttgatttttaaagcttaggaatctagaaggagattgaaaagaaaaaggaaaccaggtctgatttttttagttttttttttccctaaattttcattgaagaaggagagagaaatccgtgtttggtagctgagaaagtgtgagaaaatggaaagttcaactcctatttgtatggaagttctgctttttctgatggctattattattagataagttactctttttttttattagtattattctcaaactaatttcattgaattagcaaagataaacccttgattggttgataggaaaatattagaaagaaagtagaagaaagtctgatttttgttattagatgaatttggtttttttttttccccaaattaatttcattgaaatgaaccccttgattggttactaagaaagtgcaggaaagaaagtagaagaaagtttcaatctttgttttactcttttgttgtttggtattaaatggttagcttatgattcaatatttttgttgtaataggagtttgaattctccaatgaacaaccgaaaatcatcatcggtgatgacatcgccggagaaggaagatcgatactacacgacgaggggttcgttgggattagatgagaatgggaagatgttgggattggaacatcatcctcaccatcttcaccattttggtcaaaatggagataacaaggctaagattgtttggccgaaattgttcgtttcgttatcaagtaaagagaaagaagaggatttcttggctatgaaagggtgtaagcttcctcaaagacctaagaaaagagctaaattccttcaaaagagtttacttgtaagtgttttcggctcaaattttgatcttgttcgattggttactccaaaacttttgacatttggatttagtgttcgtgtgtttatagttggttatgccaggtacatggctaacagatttgtgtcaagaaaggtatgaagttagggaaaagaaggcttcaaagaaggtacttttgtgtaaagatcaaatttttattttacttttttcaattcaatcaaacttgtttggttcccgagaaaattgatggaaaatgattaattgtgatgatgcagagacctagaggattgaaggccatggggagtatggaaagtgattcagaatgagaagttattaggagttgaagaagatatgtttaaagctttggtttttattttgaagagaatcaaaacatgagtggagggaaaaaaagaaagaaagaaaaagattgaagatagaaaaagaggttataaatgttgttaaatcactcttttctcttcttaggatcattttgagttttgagaaattataaaattaaaaattgaaacaaaatgtaattttattttcttctcctaattttgatatgtaatatgatatgatgtctctacacttttctttgttcttctaattctttaattttctctattataatatttaaatcttacttgaaaattatggtt

SEQ ID NO: 185371 - DNA, 9673 bp, Cannabis indica
agagagagagagagagagaaccatacaataatagatgattgattcagaatgaagaaaatgagggcatttctagcgtaggaaaaaaaatatcatattgatattgtataagcaaaacaaataagaagtttaaactttaaagtatactactgtaaaatgtaaaaataaattctagaaaaatgaagaaaaacctgcaaattataatttgctccagatgataggagtaacccaacacatgactttgcccctctggccagcgcgacatgaagaggaattgtattatgatcgttccgtatgttcacatcaactccagcatcaagaatgatctatacaataattgtaaattcacaacaatgtaaatctaaaaagctatagaaaaaatccgagaaagcagagaagcagacacaataattactgtagaatcaataaaagcttaagactttctaataatctataaaagcaatcttgcatacctttaccaagtcaacatcattagccatagcagctgtatgcagtgcagttcgcctatgctgggtatcttgagcagttggatctgccccagcagcaagcagtatctgcaccatttctctcccctctaaaacaatcataaaaataatcattattattatactgggagcaaatgcaataatgtagagaaaaagtataaagaagacaattgacccttaaccaaattgactctgtacttggatacaaatgcttctttttaagataaatcttgctctttctaagaaaataaacacataaataataatcaagtaacttcaaacaaatctagtttaaagtctagcattaccaatttcatgatctttctttactgcagctgccatacacaaagcagtaccgactgggctgaaaatatcaattgcatcagcaatttcttctggagttgcaacttccacccaccttcttacaacagccacattccatgttgccacgcataagtgtaatggtctggtgacaccacaagaatttattagcattcatgattcaaaagtaacagtacacatagttccaatgattcaatctaattgtaatgcacattattgcagctccatttgaaacactggaaaacaaccaatcaagcaccagaagatcataactagtaaaagctgcaggtttacagatacacttaacaagagaagtgaaatagtgcttttttttcctcttatgtaagataaaataaacatgtagtttgaactgcatatatcaaattgaactgttttctcaaaggccacagaaatgtcagggtagaatgacatcaaaatgaaagaaaaaaaatgatgtaagatagacgtcaacaaaaactacaggctgctcatccaaagggattccgtaaatggcaacccagaagtgaagcattaagttagccaccttttggaaaacatttcaagcattttatataaatatatatatacaaaaaagagcaagctttgaattccttcatcatgttctttcaactataatttcattaattattgatcagaaattcttgtttttttttttctgttgctgatattttgaaatttacattgttgacaacgaacatctatttttctgtttaaacatacatttaggcatttgtcttttccaatacaaataaaagaaaaactttctcaacactaattattgttaaatcgagaacagaaataatatgaatactcaaattcatcaatgagaatattgacattttttgtttataagataatgagaattttattgagaaaacatgggacaataacagtatatttcccatgaaaaggtgagtcatgactcatgaattaaaccacatatggagcaagaatagttattttaaggccgcttaaaaatacaagtctggtaaagaaaaataaaaacgagcttactgaacaattaaaagcagcaaatctgttctttttttttcttcatccagttccaatttagcccaaataatatccaacaaaatattatacacgacacagaagcagaacaagcaccaacacactcctttctttccatcacaaacttttatccaatctttgttgtcaatcattccatatttccctctcccatcatatggtaaatgtactgtgtattaacaattgggatgtttggtgtatgagtttcacttggtggccttctctttctcaaaaaaaaaaaagtttcactttgtggattttagttgagaggggttgagattaagggaatctcaaactcaaatatttaacgagattgagattaccccaaaaaataaacttaaaagtgggacccactcaatcataagccctcaactaaaattataccaaacacaagtttggttttacatttccattccaaagaactcaaacccccataccaaacatctcatatctatcccttttctcagtacttatacttacaaacatgttcatgtctggagcccaaaagttcacttcccacagttcatgaaaaactttctttttcttccccatttgagtcataatgtgtgtaaattatgccaaccaaagttgaagaattcaaatttatacttacgttaaattttttgagttcgaaaaagccattgacatacagccaccattttccaatatgacaagggcacagtctgtatatttcttggcaatagccctatgcagcacggtctcgccttcatcatccacagcatttggatcagctccagcaattaataactcctgttatgaataatttagagagagaatctcgtcagacaggaaagagcatcaaacgcaaatcattgatttatctaattagcttcaacacctacacgcatgcaatcaggttggccgtggtaagcacaaacatgagcaacagatggaccaaacccttcccttaagctagatttcacattagcacctcttctaacaagagcacaaacgcattctggggagccagctgctaatgcaaaaacaagcggaggatccccatctttatcaagcacatccacagttgcttctctgtattccaagatagcatcaacaagctctgcactaccacgcctacaagccaagtggagagcagtttggccatctgaattttgagcttctaaaagtgaagatattgcagtactatcatttcccgatgcagcctttgcaagcagatctctgagtaagataaaagagtaaagaaaatatgacaaaaatatcccctaaggatacaatgaaaaaagagacttaagtcaagggtttacctaacgccatttacatccccttcagacacaagtctatgtaaaaggttggtgttatcttggaatacttctggatcagaaacaggtgacggttctgtcacatttgatccagagcatttagcgaagtcactgtatacaaacaaaaagaaacaatttaaaactgtctaaaacattaaaagtgacatatcgttcacccataaaaatcttcggagagaacattcattggaaaaatccacaagaatcaacaatcaataagtctgatgaactaacaatgtacagacacatggtagggaaaaagacatgaacaaaacattaaaagcttacttatcagggcttgctggagggctacgaggtatctcttgcaaatgacgaaggaaagtagctaacattgcgctgaaagtaggtcttctggctgccttaaactgcagacactcaccaatcattttccacaattccctaggtatccctacacctactacacttgcatattgtggaggtaactttcgagccttcacgacagctcgataaatttcttctgcacttaagcccgcccacctacaaaataaatgtcaccataagtgatgaaaaagattaaaatttttaaatagtacatgtgttgttagacatacgggatggaaccggtgcacatctcaaccaaagtacagccaaaactccaggcatctgactctacagaaataccaattgcatcatcccaaaacaaatttaacgacttttttactggctcccaagcctctggagctgcatagtgcggacttagcattgtacaatccatacaagaatggacccttgtggtatcacactctgatcgagatttccgacagtcagacttcttaagaattgcagcaagcccatagtcagaaaccactgcatgcccatttgaatccaatagaagatttgatggtttcagattcatacacacaacacctgccgcatgaagttcagcgacccctcgtgctatatcagctccatatctacaattacaaaatactccatatgtgagaattacaaaacaaaaaactcataattatgtttctttattttcagtcatctattgtagtggtgcactgaattttttccatcaaaatagtttttttttctacaaccctggattaagctttgtgcatactctaacatactaaaataccaacgttcaatacataatataatgtgcacctttaatagacaaacaacccaattaatacatggccagctagtttttttttttttgcctcagaattggccagctagtacttgaaatctggacttgctggtacatattaaaatacccatgccatgataatatacaattagaaattggattctttatgcagtgataaaagccatcaaaatccaataggataaaactcgtatggttacttgctggtacatattttatggtcattggtcataaaatatgaaaatgttgaaaaggataattaaataattaatcgtatggttgtacttttgaaatttgtggtataagttgatgataaaaacacagcaaagttacaaaaattcaaggcgaatttcattgccagttacataaaaatgatagtacaaacattcatagtggatcttccagttaaagaagaacatatcacctcatttttctaactttctgcgttataatatagatttttagtgtattacgaaaaatccatcatgacattcatcatattatagtaatgatgtgatagaggaaaacgtattgaatgtatcaagattgttataagcttattggtgatattatcaaagtttttcccctaaatagaatagaaaaggcttatcaaaaatacaagtggcataaatatttaatctactttcgaacatacttttagtgagttatagtaaaataataaaaaaaaagtatactttgattaccgctacagcagtaaaaaaatttacaacattgggggttttctaaatatcgttcacgatttggcattagtgtgtcagcaaaacgctctttaatttaaaatccttaaccttattttgcagtacttattatagtgcaatgttaataccacaccttcaaagtgtgatacactaaatttcaattgctagacctattgcgaagttaatcagttgcattttcaaacttgagtgtgatgataaataaatagctattatatctcaaaatgtattactactaaattcacttagataatacatatgtatacacacacaagaataagcaaacaacatattcttaatgttcagcaacaaaacaaaccaataacaccaaaaaaaaaaaccaattatcgaatctaagacaattaaagatggaccatctttgaagtctttatgattggagatccatactcaaatttaaaccatgaaaaagtcttcattctcaatgtcttggcaccctcaacaacctatggttcctttctaactaaagatcccgaagaatggctagcaccacactttcagaaacatgtttccacaatatgctttgcgcacctaaattcctaaataagcataaattaaatacttactagaaacacaagcaagaacttctattccttagcagtctaaactaaatgcaaaagccacctaacagtgaaatgcaatcgttttatgatattccacttctattcaaaatatacttatgaaagagaaatcaaaacatcggaacttctgttgcaaccaagcaaacacctaaatgttagaaggagcatggagataccaagtaaactcagaaggggcaaaaattagaatgaaatggaggaatttataacacaaaggttattgaagaaagaaaaaattgatacatgaagcataaacgaattttgttttctagattaaattcatattatatgtaaccaacttcaacaatgaaaagaaataaactttcattgcatgcaatacttttctttagctaccaatcacagcctgctttatgtttcacccaagaaacaatctaccccactttgtaaaagttaagtctagttctcagatcctaaaggtccatgcttttggtctcccccattagtaaagcctctgtgtgcaatttcacaagaggtcaatgcatccacaaagttatccttttttaagcaacacgcagtttttcaccatgaacaaacactaaatagaccagaaacaaatcattgattccacaactttttttcccaaaagaaatagcatcaagtaaattatgagggtgaaaagagataagaaagctagaaaaccttaggatttgctccaaagtgagtctgccctcattgcgttgcatctcggattgaacagacccgtaacacctgtccataacaagacaaaacgagccttccattctcgtaaacccgtgaaaagtacatacattccgacaccacattgaggcacgccgcaaactttcgagctgacccagcacccaatccacactcgtctcctccgaaatcaccaccttcttcacagccacatggtggcgacaacgcactaccccaacaccactcataaccgcagcccacatttcaacaccagcccgtctcccttcccctatccgcttcaccaatctcaagtcttggtgcgcaccaacttcgattactggtccacaccgtcccgagctcgatgcagcagaagcacgactacatcgacggcgcaagaaggagtcaacatcattgtcccctcccgctcctcctccttcatcgtcatcatcatcttcctcatcgtctgtgaaatcgcaatcgaaattcggagcagcggcagcaccaggtggagctgagttagagttagagctggaatgaattagggcgagaacagcgtagttcttgcgcagagcctgtacggagtttccgacaagggaaacatggcggcacctgggacaaggaagggtcgtatcgggactagcagagaacattttggagagacactccttgcagaagccatggccacactgaagaagaagtggaactctctcttcttcgttgtaccgcgtttggcaaacggaacaacacggcactttcatttattctcttcttcctcttcttcttcctccaaagcctaatcgaagaacaactcaccagagaagaagaagaagaagaagaaaagcttagtacttcggctatggcggagtacaggagtaatctcaggtgaagatctcggtgaagcgaagcagatccatggacgaaatgagagagaaaaataaaaataaatataaaaataattaattattaattttaagaaaaataaataaataaaaataaaaaagacaaaatggagaaattatcaaaattttcaggtgaggagagagaaagagagagaaaataatatgtagtaagttagaagaagtagaagtatgaagggttttagagagagaaaagagctattttttgtatattcccaaaatgcccctctatttttttcaatttttcggctacacctttcccactaaaccttcctacttctttctgtctaaactaaaataataataaattaaggtgaaaaagaaatactcaccaaacttcttaagacaagtattattgtacaacaattaaaaataaaatatgtttttatcaaaattcttagataggatttttgctttttttatcatggctattttgtatttttggtacattaaaagattacataaaagtcttgtgtggaaatcaattataatatataagatgaatagactattttttttattgctaattaattttaaaatcgaagctcattcattttatcttcaaattcatctcattgcaaaaataaacaaaacaaaaaacctctaacaaagaaaagagccaccgtaaattcaaaaaaaaaaactaatccaaaaaatagacacttgtgattcggagatagtaagtcaaaagaaaatggccaccaaagatccaaaaaatactgattcaaaaagtagagcaaaagagccacttggttttgagataaaacttcattcatattatcccaaattctaatattatttaagttttcgatggcagttcgcaaaatgaattttacagtttatggtttgacaaaacatgtatcttcagttagaaaataagttattctggtttgagaaagttttaccactaattgtagtttgttatattgttaattatgtgtatttttgttcaacatgtcaatctcaatttttatgtattatagttatattagatattttatttaattatggtctaactcacatgtttggtctgtttagtcgatttgaccctctttcaacaataattggtgttcttctaatgctaggattgatggtgaacactgatacaagaagttgttgaggttatagttaatatggcaagtaagttgattgtggaactagaagaagaatgggaggtgaatgaagataatgttgtcgaatttggtgaacaatcattggttggccgagttatttcgaggaaaccatttaatgttaaggttatagctgaattttttacctagaaatacgagctcagtcttgtaaaaagttgccatgtggagccaatttttgtaggaaaaaatgattaaagaatgatcatctcaccttgcttgatgagaacttgcgagaatatgcgaacagggtctaattgcatacaatgcattgcgtagtataagaataaataggatcaagagaagttaatattggtcgtgcgtatactgattatatgcgatgatcaagtatatctctcattcaacgagttaaagatcgtttctttacataagtttggtctaaatgactaatatgttcgatgactcgtcaaggactaacatgttgcaagttgtcgacgcatgggatgttctgttatgggattaaaagtgaatgcaaacattcaaacagatcaggccgaaaggcccatcttgcgagcataacaccataaagctcgtgagctcatgtgtatggaatatgaatagacaagatgcgacttttcaagtcgcatacgttgctgcaattaagtcaagaacggacggaattgttcttcatttattctttaaactttgattttaatttaacaatgtcatttgttgtaaaaaaaaataattttaaaccgatcagttatgtaattctaaagggcacttactttctatataaaggggtgatccaaaacaaataaactaagctaaaatcattaccaaaagtagaataagcagaccaagctctgactgaaccactataattctcttgttttctctttatatttcctttcttttttgtctatttagtagcttatactttgaactcgctattctaagggagcactagcacaattctattgaatattcaattttttttatatttgacaatatttggtgttgttcaaatttctctgtacaacattttagcgtcgtttgtgggaaacattatatttctaagattgtggaggagaatcaaaaatggttacagatcaaacgcacacgaacaacaacaatgaatctttcaacgttggcactctcaatgttctcattttcggagaaggacagcccccgttgatatcgtcatggaggagtaagaggtac

SEQ ID NO: 185372 - DNA, 3504 bp, Cannabis indica
gctgaagctgtttagtcactatgggtggtgatttcgtgggagctgctgcttcttttttttttatctcttttactatatcatttggagactcatatgttctgaggatcatcatcatgtaaatttttattttaataaacttataccatgtcttagaaaataaaaatggggacctggagacatgttaaaagttataattacagttctacgtttaactttatttttaccctgaaggaaaaacgaataacaaacattcaccaggaacaatcccagtatgttaagaattttctacaaagcccaaatcatgagaatttcaactatacaatgtagccattagataataatagactgagcgtatttacttttataagatataacataggtaataaggtagaattttaaggtcctatgtcagtaaatttcatgatgactttccacatatttctaggaaattttcttaatctgtttgtgttggttttagacctaaaagtaaaaattaagcacctaatccaacttgtttcaaaatattttaattaaaatcaaggcctattttactctttatacaaaaaaaatcaaaactttaaaacacagaactcaaaggagtaatgttgtgaaatacaaaatctaaaaaaaaaaaaaaaactataatgttgccaacagtaattagatgttatttatttaagaaactttaacctgaatgcagtgtggcaattatatgcttatgttcagcacctgacctgagtgagagcttatgcttatgcatgatatgcttatattatcaatgcttgaaaagaaacaataaaaataaaacacaacaaagctacttccattccacaaaatacatatataaatataacaccctggttctgaacaaaaattattcaaaataatacaatccaagattaaaggacaaacaactgctgacataattttcataattttggcatacactgagcataaagtacaagccagtttagccaaagcgatacccagttgcaaaggccactcttttacttttcttcatcactatcgttaccaaaaactgaggcaacagctgattttggcttccttgcaacactaccaaatgacatctgtaaaagggaagaagaaagatgttagatgggtgatatttagccaatgtccagttcttaatttcttctgcttgaaactgtcaaatgcctgaacaggatttggaaatctcagaatatctagcatcatatttgtttagaaccagtgttaaatgcttgtatggaaccacaatgaacctagactcttcttagcaggtacataccttagaagtgccacccttggaagaaaacccaaattttaaagtcttccgctgatcttgatctgcaactacagatgcattttttagttcagaggctactgcagcaaccctagattcctcttgttgctgttgtagttgctgctgctgcttccgggcatcggcttcagccctagttggtattaaggaaaacacaataagaaggtgacaaggcagcaatgctaataccaaagagaaaagaaaacaagaaaaacacaagggaataaatgactgcatacatttgagcaaacttggccatctccctctcttgacgctgctgttctcgttttaggcgatcatcccgactgcttgtaccaagcatctctctcatctctttaaaacgctgcatatcccatttgaataaaaaatatcagacaaaattgacagaaaaataaggcaaacaagattttgcatagtcaaatgatatatttatacctttctgtgattatgatcatatgagctaaggtgggcttcaaattccatggccaatttgtattgtttgttgcaaagatcgcaatagaaaaccttgcgtatttctttcacctcggtttgaattttctgctcacgttctgctagaacctggattttcataatgtgcacgaagcaggcagtagaagccaccaggtaataaaaactgcaggaaattctcaagaccttccaaagttgatggtctcctatgataaatctttcccgacaaaagacatgcatacaatctatatgcagccttctgctatttagatttaggttccagaaaaagtaaagcatcaacctcaacattatctaatagtcttagaagcctttagtatctaacagtttgaagtacttaggttacaaaactttaaaaagcatacctcccgcttctttgcgtcctcctcagtctcttctagctcaacatcaagctttttccgctgaatattttcttcagaagtaaaatagtcatcttcttcttgtttccccacccctaattttggatctcttatcccagatctaattggttcaacaatccctatacagaaaacaaagaatataaacaagaagatttaatttgggtccaagactacggacattcgcgggtatttgccttatcatgttgagctgcactaaagctacatcagtctaaattgtagtatatatcaggtatattttggaaaaaaaaaagttcaaggcaattctcagtttattgaagaaaattaagttcaatagtaggaaagaaaataaataacaaattaagttcattagaaacaaacaaaagcagctttgtgacagcatgaaataatgttgaatctcaaattttttcacttgaaaatcagcaacgatgaagacggtaatataatggcattagaagttaaaatttctatacaaagtaaaagcattgtgagaaattgaagaaaaaacagatttttgtgaagtatatacaagttttgtacatcgattcagcaaagcaataacataccctgctcatccttcccgagaccttttcctttccaccccattttctgaagaagtctatatcccacattagatgaactcaaatgtctatccagtgatgcttgttccacattgtccagatcaacattttctgttggcctttggttaattggcattcgaaattcatcagcgaaatcttctataagagattcctgataagcctggcccacattaagttgataaaattgtggcgtgaataacattgtaacataaataatagacatacaaatccataattggttaactaaccaacaaggaaccatcaccatcagatagttttatatacttcactatgagagtcacttaattgacaaaccaaatgacccaataatctattccaaacaagtataaatttttgatataactactacgggatacctgctctttttcatagtgcctcttgtcccgggaacctgtttcttgcctaccaccataaccacggtagtccattttgcctgcttaatcaggtagaaaactcaaattaaatagaatacttccatctaaaattcagagcagaagagtggacatgaagtaaacacaatttaaattcttaaaaaaccccaataaaattaagttgtatataacaaaatttcatcctatttacatagtcacaaattacttgaacataatgctctttccaaaaatataaacacaagactaacatgatcctctatttcaaagccaaaggcataata

SEQ ID NO: 185373 - DNA, 3648 bp, Cannabis indica
catatttttgaaaatagccctaagtatttatctcgcaaattagtctaaaaaataccatattttatattgtgctattaatgtaattaaatatcaaatctcacataagttaatttaatacgaaaaatttacataaaatactattttaagtaaattttttatacttttacatttttacaacgtcctataaaaacataaaaccaacaagaaaatcatataaaaagtaacagagcactaacagcacaataataatatacaaaaacaaaaaactaacaacaaaattaagagtataatataaaaataacatgaaaatataaaaaatttatattttctatcaataaaatcttaaaaaccataacaatatttaaaattctatacaaccgtaagaaaacagaatctgtctcaatatatgaatcagaaacaaatagaggtaggatataagacacccgaataggagttttgagtgtttataagatcactagcttatgctctgacccgagtagcatgagacacgtggaatcccgtgtgaatcaacaagtagattgctattcctttaatcaaaaggaactcagatctatctactttaagaaggaacatggatttatgagaactcagctgaccagcttctatttataaagctctaatgagctgttcaaacaaagatggaatcttttcgaaaatccatgatttggttcatacctattaacacttagatgttttaatgaataaatttaacaaagtaactttagaagaactctgtgttaaggaattcagctaattcaaaaagaagaaaccgaaatcgactaataaagagaaaggcatacacacatttatgctttttttcgaaaaccggtagctaaaatacattaacaaagaaagttaagggctacccagtttccatttcactatagattatagcttaatacaatgatctttctcaagtagtcatatgtttatttcaaaaacaatattaagtttaagcataagttgattttgacattacaaccatcacaatcaaactcccaagaagctaaagacatcaacaatggaagaaaataagggttatccattttccattttactatatattataacaatggaagaaacaataatctttctcaagtattcatgctaatttcaaaaaccagcccaagatctcttccccaaatatcaagtttaagcataagtgtttttccattacagagtttgggacttaagctaaagacatcaacaaaggaagaaaataagggttacccattgttgggattaaactcacttcatccatgtcaagtcagtagttttatcttgacacttactggttaaaacggaaaaaactagttagttataacagttggctttgacaccaacttaaaaatagcctcaccaatagctataaatagggtctgtctcaactctcttagagatctccaatgctcatacttgagaattcagagtctagagagagattgtccaaaattacagtgcgtgtatgaagggttgtatataggtcacttatgtatgaagggttgtatataggtcacttatgtatgaagggttgtatataggtcacttatgtatgaagggttgtatataggtcacttatgtatttgatcaagtgttccttagtgtgagattgaatgtaattgaggcctgatcctcactgttttgtgttgtaattcttggaggtgttaaattatgtactactgaatattcttatcaataaaaattcatgattcattcattctcaagctaagtttattcttgcctagcttacatctaagttcagttttgattttgtgattggttctagttttgattgtgtgttcttgaacaccactactgttaacagatgtgttttgagggtgatccttcaccacacccattttccatttcgctatataatatagcataaagcaatactctttctcaagtattcatgcttatatcaagtttaagcataagttgtttttccattacagagttttgggtcttaaattacagccaccacaatcaaaatcccaacaactaaagacaacattaacaaaaaaaaaaataaataataaataagggtaacccattttccatttcatcatatattatagcataaaacaatactctttctcaagtattcataagcttatttcaaaaaacaccttaaatctctgcccaaatatcaagtttaagcataagttgattttccattacagaagttgggtcttaagttacaaccaccaccacaatcaaaatcccaagttgctaaaaatgacatcaacaaaaattatagcataaagcaataatctttttaatcaaaaaccacaatcaactttagctaaagaacatcaacataaactcacaatcaacttaagttacccattttccatttctctatataatatagcataaagcaataatctttctaaagtattcatgcttatatcaaaaaccaccccaagatctctgctcaaatacaaagcttaagcataggttgattttgacattacagaaattgggtcttaacttataaccataacaatcaaaatcccaacagctaaagacaacatcaacaaagaaaaataaaaataacccaatttccatttcactatatattataacataaaacaacaatctttctcaagtattcatgcttatttcaaaacccaccccaagatctctctacccaatttgattttccattacaaagtttgggtcttcaattacaaccatcgaaatcaaattcccaagcaactaaagaaatcatcaacaaagaaaaataaaggtaacccattttccattttccatttcatcatatatatatcataacataaaaagaaagcaataatcttttcttactcaaatcaagtattaatgtctttgatagtacctctacatccactgataacctcacaacctctactataaggattagctggtccaacatgacaattgtagtaaggagcacctggtcttccacatggaatcatgtctctccttagggtttcatagcttatatacctcttctgcatagccaaaactcttctattgatctctgaatccatttccagctcaccactcaagcaatctcccatccttttcttctgggaacaaaccctttgctccattctatcaatttcattcattttcagtgaattaaggtccaaaactgagaccccatttgaaaatgagaaatgggtttggattaaaatcagtgataataggtaaagtgaaatcatgggatagggtctgagttttgacatttctaaaggttttggctttttgggtgttcttttttgtggttatggtctgtgaaagtgggattctttttggggtaggagaagaagaaggtgtcctccaaaaatgggccaccactacactacacacattacttggtttcaatttccactagtgacaagcctatatagttacatataaataaaggagatgattagtagggtttatattacacttatagatactaagtcttaacaacttaataagattttggtaattagataaatgttatatttttgtgtaatttattaaaaaataaaaagaaatttgtatgtgtctttttgtcctacattgtttataatttgtagtgtttatattaccctgattagtaggggtagattaagtagattatagaaaaaaaaa

SEQ ID NO: 185374 - DNA, 8597 bp, Cannabis indica
agggcaaatgttatagcataccattcgtgagccaatgcctcgtacttatttagaagttatatatatactttatataactactaaaaataacttatatttatgtaacttttttttttttaatattttgaaaggaaatcacaatattaattacaaaagaattcagttagggagaggcaaatctccaactacataagagaaagccattgggagaaccccatccaaaaaacaagaactcttatcaataagagtatacttacaattaggggtgttcatttaatctaattcgtactatcttgctcatagtatatgagaattttatattaatttgaatccaatataatccacaaaagtacatattggatcaattattttagtttggttactttttaatattaaattatttaatttttatcaaaaaaatattttttttttcacataaataacaacaaaataaaacaaattattattgttttatgtctccaataacgaattaaagtaaataaaataaaaataacaaattcaaaatgaagaaaaaataaattgtaatgtacaaaaaaatgtttaattttatttaaattgtatgtaaaaaaataaaaaaattaatatataaaaatgaaatatacatttgatctattaagttttaggatccgttttgaccaaagaacccatgtagtttccaagatcccggaccactctttctagcataaaaccagtggacagattgtgtatttgtactcaaaaatccaactaattcagggtgatcattcgcgtgttcaccttgtttcagtcgttcaaagattaatggaacacggtcaaaagtccaaagactaccttctatcacccgctcgatgttaacctcatggttgaattgaaataaacagagattgctttcaaattcttttacgtacatacctcttcccggctgccataatatcgctattttattttacattgcatgaaaatccaccgatcaattggtaaggaaacggcccaccaaacaccacctatcatcgatctcaatcagatcatcgttccccccttcatacaacaaacagtcttcttcatcatcctttattcaaaaatttgcatatgggtcttcaatggaaggctcatttcaatgtatgggctccatcaataacacaataacataagacacaacaaaacaaaacttggcagacaagacttcaattagacaatttaattacaaatataagcatggttgccgggtcagtcactcaatttgtttttttttttattctttttaattagttaatttggaaattattttttaattaattaaagtaaaatgaagcaagatgcaagttttggactttgtcctcctactcctcacaacatacaacatcaacatgtgtgtatgagaaagatcatcaaatgtgcaaaagcgagaaatagataattagatagagctgagttcacaaaaccacaaaataaaaagtattgattttttacaaaattattacagattcaataaatccccaaaccctcaagctctacctctctccttctccgccatcgacgacccatctccgacgcccatttcttgccgtcgacggcgcaggcggaccacagatcaagtttagtactcttatggaattcaatatctacttattactctatttcttctccgctattttgaaatttcaatttgataaagtattcagaatttttttttaaaagctttgctccctttttcttattgatattcatgttatttgttagatcattattattgctggtcctccacaaaagatcattatttcattttttttttcttgtgattttgggggttgggctccctctgtgtcgcttttcaatttcttgtaaaaccaaagattttgatgttgaaaaattactcaatcagccagatatatcaattataaattctgatttggttattatattgtgatatgctacctctgattttgtataagccatgcatgcatttctcttgatatatgcttgatttttaatctgggcatttgttttagtgcgcattcgatgcttgaagtaagctgcttttgcataagatttatttatcattgccagtattgttctcatacaatttccttgaaaatctcttgttctgtttccactagtataagtttataactgatattgttatatacttatactgaaacaggttgatggcaagaagaacaaagtttatgagctgaacctttgttatttagcaaaactgattcttgatcacaagatcattgttggatacttttccaaggtaagtcaactctacttagttgttgtccagaagcttagagcaataatctgtgcaacctattttgtatatgttatacttgtatgaatcttgccacttgaggctagcttaaattgttgtgtgattaaatgtgttagagtagtctgggttaagttttcgacagaatagtctggtcttgctgctctcttttgtttagatgttagtagcaatgagatggtgatttttcttacaccatctattgtacttttcaaaatcacttgagattaattattaaacttaatattttttatgcaaatctgactaaacacttccataaaatttgaaaaacatgatatgagatgtaggagttttttactggtttctgccataaaatttaatagttttaagcacacaaggcactggtattggctcaagcttgtacgactataattttagcatgttgttcctgaaaaaacttggtatctatgtgctcttcatatttcttgctagatccatccagcttgttagagttttatcaaggttgaatttgaacaggtgtcaaattaatatttccttggagatatcttttcatttatgataaatgctcagatattcctaattgtgtagatctttgtttagcctaggacatgtctattttttcttaaagctggggggatgatattaggagaataagtacgcaagaatcttcagttttccaaggccgccaattaatgagaataagtaatttcacaaggccgccaatttcagttttccaaagtggtttatgatattgcttcttgaatcttccagaatgcaagaattttataattatataaggttttttggatgcctagaaagaagtgcgagaattgtgtttgtgtctcatgttcatcagagtgatagataccactcgttttgtagtttgttgtagtacattgattttttttttttcacattcatgttaagtcaaatttatatgttgtatgttaaatatattaccttaattttctatccaaatatctctggattattgtgacatcatgtttactaaatgagaaccatgactttctgagtttagccatttattggtcgcaaggaaactttccaatgtctagcgttgacaatggtatgttagcaggaaattttttcttaatctgaaatgacttctgatttggttccgattatcgcgtcatctaagtcatgtttatggtatttttcgtaagagctttataatttaagggtgacccttttaccttctgtttgtaataatgttttaatgaaggaattagtttaatcttaaagtttgcttctgctcatatggttgttttcttttagattgttagatcactcatttaaaaaaaataataataaataaaaggtttttaaatcttaattttgttgctcttgcgttgggtctcatccagggtgagtgaaaacttagagttttgtttgttcattgaagaaatggcccttcttttgttaggtttgcgtcctgtggttctacttcgtattatttccattcccgataatttctgattctgtggaaaccaacaattttatagttttcaatgttgaattattaggcatgcactccaaaaataataaataaataaataaagagtcgagaaattggttgtactatgcgtttagaattgtaactttgttgttagaactcagaagtacttgaggatagctttgctcaacctaatcttcatttaaagtttacttggtgttttttttttcatctttaaatgtcttattgataagttttttggcaacttgttagatatgcatttaacaagtattggcagctagctgtaacatataagtataaaatcgataatattaacttttgaatagatctacaaaaaaagaactcttgaatagatgagcaaaagtcaacttggtctttacactcactaggttttttatatgcctcgatgaattgtttgtgttaatcaattctacaagcacgaaatacaggatttagagtctaggagtgaagaactcatgtcaaacattgtaattatgctaagaggacaaaggaaagaattgaaagaatacaagttgagaaaacatcttacctaattaaacttgatagatagtagtgatacaattatatttaaatatggagatagacgatgtatgatccgataagtaattcttgttgtgaccttaatgatgttaaatattgagacttaatgtaacaaacacaaggtaggtagtagagaagagtgaagatatgtacgggattcatctaataaattagtgggaacagtggcaccgagttgagatcgcttaagaaatactatgtgccagtataatacaagttagttggagtattttttatactaatgaacagttttgtttatcaacttttatattgatgtctagtaaagtaatgattactttttaatcaatttggagctagtactttgaagtttgtttaagcattaggaattttatagtacttgctctaaattgttgaaaagaaatcacaaatatttcaaaaaatgcattttaattataaatgtataaatataatagaataagttgaacatttatgaagaaaaagatattctttgaaaatacttttcaaacacctcttgttccttaaaactataaactctgcagtttgttctcactatttttggcaacatggtcaaacaggcctaggcaagttgaaaagatgagtatcactagtactggaaaattcaaaacgtcaagctccgaattggacttggatcgacccaatattgaagactatctcccatctggaacctccattcagccagaacctattggcaagctttgcctgtaaatctctttctctcatcttatggtctgtttgtttctcgagaaaaatcatagggaatgaatcgggaacttatgtgcttcaattaactctcttttgttttctagtcgtgatttgcttgatatttcaccaactctaactgaggctgctggtgctattgtggatgtaagtgttcattttgggtttgatatggataatcgagtttctctgatttaagaatcttgagtttttgcttttttgaattttgatgaccaggactcatttacacgatgcttcaagtcgaatcctccggagccttggaactggaatatatatttgtttccactatggtgttttggagtagttgttcgttatttcattctctttcctgtgaggttagaagttctgaagtagtttgttgaaaagaatgatgattttcatgcattgttgctatcatgcaagagctgtacatgttagctcagtgtattttctatccttaaattttgaatgtataccatcatggaaggctgtgacaataatgttaatgtttgtcattttggcttgtaacatcatgttgctgttgaatatacatataataatgtaaataattatttatgtatctgtatatacatcagtaaaatactgtagcattagtcttgtctaagtacgtatcagaagaactacattggttgtgtaactgcattttagtatcgactttggggatattgcttttatgagtttatttcttgttggtgcagggttatagtgttgacgatagggtggataatattcctgtcttcatacattccagtgcacattctattgaagggccatgataagttaaggaaaaagatagaggtgaacattctcattttctagtgtctttcgtctagtagatttagggtacctgattgtgtttatttctatccactacccagaggtttttggtggagttgatttgtaccttctttgttgcatcctggactggggtggtcaaatatcacggaccacgacctagcatgcggcccaatcaggttttctgaatgtcactttaatctttgagacacggactattatttctgtatttgcttattcagtgagttttggagtattcagtcttgatctatatcgtcatgcttttatgcaggtttttgtggccaatcatacttccatgattgatttcattatcttagaacagatgactgcatttgcagtcattatgcagaagcatgctggatgggttggtaagtttattgctgaatacaattattagtgaagttaagcacacatatttgatttggtgaaggaatcttgtactgaagattttatgtgctctacaaacttttattttggagtgacagaagtgtgttattagaagtgaggcttctattgtgttttttttggacaaatttacaccactattcttgcaaatgtattcagctgtagaggtgaaatctttcaaaagattcatcaaagtttagggcttggttttgagtctttttgttgtcatatatactagtttacttataagtactgctttttcttctagttgccagtttaaaagttttcgtgactaagcttcacattttgtttctgccgatgtcaaatgtcatccaataataaagatttctctctgaactccttgtaaaggactattgcaaagcactattttggagagtgtgggctgtatttggttcaatcgtacagagtcaaaggaccgtgaaattgtagcaaagaagtaagtataaagtgtgataaatatagttttatcgtaatactgttcatggtgctgtaatatgtctttataccttttcagattaagggatcatgtgcaggctgctgataaccctctccttatatttcccgaaggaacgtgtgtaaataaccactatactgtgatgttcaagaaggtaattgtggctctctccagtctcacgttttaagcttagtagtcagtgactcggtgtatactttgtgaaattttcatgttaatgtgggcagttgggcttttagtttgaataaattatttacttatttgataagctctctaatttaatttgtttgtaatgtttagggtgcgtttgaactcggatgttcagtttgcccagttgcaatcaagtacaataaaatcttcgttgatgctttttggaatagcagaaagtaaggagctaatttttgaatactgatcttgacatctactgatagttatgcattttctttgtgaacaattccttgttcagaaaattcctctcttttgtttttaaagaatctgatgaacccgagactctgcatgtagacaattgtcagtgcttatatgtttctgatccaaacaagaaaaatcaaagtaaaaaaacaagataaaagaatagaaaagaaaagaaagtgttcttgctcgcaagcttgcatttgaaaaaggttgctcgttccaacataatatagtgccaaacgtttgtcttgttgatttcgatattctgatattatgttgaagaaaacattggcaggcacatataagatgtcttatttgcactttgcaggcagtccttcacaaagcatctgctgcagcttatgacgtcgtgggctgtagtttgtgatgtgtggtacttggagccccaaaatcttagaccaggggaaactcccattgagtttgctgagaggtgaataatctcttctaataagcatgttcttggaacattagagaagatggtgtcttgcttagacgatcttcgaaagaaaggattttttgtttaaaccattcatgcttttttgcagggtgagagacataatatctgctcgggcaggtcttaagaaggttccttgggatggatatctgaagcactctcgccctagtccaaagcacagagagcgaaagtaaatcacgttccccttattttttccttaaaataatcaacaattgaaggaattttgcgaagttagtttctgattacatgtcttaatgctcattttctttccgtataggcaacaaagctttgcagagatggtgctacgacgcttggaagaaaggtgaagtgaaatatgtaggtttcatcgtctaatcgtgtgttttgtaccaagtaaatacttctttcaattctcatttgggggatttgggcatgaagctgaagaatctttaagaatactgttgtcagctttgtttgtttatgctctagatttttgtaggaacttgccataaagcaaatagactgttatcaatgaattaatttttaattttggctaactaataatggaatggtaatggtatggagtaggattggtcattgtattgcagttatgacactagagcattcgattatatgtccaattagatctcatttattttttctatttctaaaactttcaagtatattagaaatacttttgccgaaaaaaatttaaaaaaaaaactacaaattttggaaagatgaataataaacttttaggctatgtttggtgagagggacggagaggttagagaggatggggaggatgaggaatggagatgattgttgatctcttttgtcttgtttggtgttagatgtgaggtgggaatgataaaagaaaatttaggttagt

SEQ ID NO: 185375 - DNA, 6505 bp, Cannabis indica
ctctctctctctctctctctctctctctctctctctctctctctctctctctctctctctctctctcttcgagctcactcactcctactgtcgattttgataaagtttctgtaatgcaggtggaattggaacaatacccaactggacctcacattgcttctcgcatgctgttcacagtattactctcttctcatgtctttagattgcaaaagttgattcctttacttaataattaggattacttttatgggttatatctctgttttgttatccatttcttaaagtgggttgttggcgtacttgtggaaatttgaacttccgtacttaatgtgggttttatgatttagtttaagttcaacaataatagtaatgggaatcctgttgttggtaatcattggaagttattattagctaagtaagttttaagtttgaatttatagtgataatcaaaattttccatatttttgctttgattaatttgagggcaactttttgtttttaaatgcaatcaggcagagaattcatttgaagatataagcaacaaggtagtggctgattttggttgcggatgtggtacattaggtactgcagctgcactcttgggtgcagagtgagtaaccatttttcatacttctgtttatttctttgatttggttaggattagtgtatatatccagagcacaatccaagcactattttcttagaagttatagataatgattccttaaattgtaaatgcacagtcttttataaataaatttgatacatgcactatctcttatcttgaacttgatcttaactctgttatgcttatatcagacatgtcattggcattgatgttgacacccaggctcttgaaattgcttctctaaatgcagaggatcttgaggttatgttgctctctttattctggttggtagtgttatattcttaattaattgcttgttgtagtctgatatcattttcttaaggttgaattgaaattctaacaagaacttggtccaatatgcttgctctgtaactattttttattagccctaaacaaagttctatgttgtaaattccttgaatctgcagttggacatagattacgttcaatgtgacataaagaacttagtatggaaaggtaaaatgccccgcctttccatttctatgtactttggtctttgaaatggaaactattatgatttctgtttgtttggtttccaaaataccagcatattaggcccaattgatgtgtcatagttttataaaagttcaagtgatatttataattgcataatttatctttaattttaaatatatttgttttattaggtcgaaacgttgatactgttgtaatgaatccacctttcggaacccggaaaaaaggtgcggatatggattttctctgcattgctctgaaggtatgtatcaggactctatatctgaaattatgattgcttgtaattttcggtagaatcaaagttttcaatcagttgatctgtcatctctgttttagtctaatgtataacctattatctatattacctgttctgctaggttgcatctcaagcagtttattccttacataagacctcaacaagagatgtaagtcatttgctactttatgaaaagctgttataatacgactattacaactgcttcagcatgatcatgttctagtatactaaatcactattcatctgttaattctgcaacttgacaagcaacttatggatattattatgaaaccataaagtttttggtcttcttatattcatatcccggagtgtgactgtaagcatattttctttggtcaccctgattgatttcagaccatatgatctggagattagcagtttctcaaaacaaaagcttccatttttttcagcaatgtcatttcaggccttaaatggtattgatagttttttgttttttcgtgggtcatttcagcatgtgagaagagctgcattgcgagacttcaatgccagcagtgccgaggttttgtgcgaggtcagtgaaagtcatgtcaggactaccaaaaaatgttgttgctttattcctcttttgttggttctaactatgaaccttaatgaactttccatgcattgctccagcttagtaatgatccttcttttttttatataattaatggcttcctattttgccttttttttttttctgttgtcagcttcgatatgatgtgccacaactatacaagtttcataagaaaaaggaggtggatattgccgttgatctgtggagatttgtgccaaaataattactaaacactgcttgtttacattacattaagattgcttatgggtcatagactcgtggtacttaacaaatgtaaatatgaaatctgtctgcaacgtttcttcgtccaaatttatttgatttttccattgtcatgtttttgtaacaattaaaataagttccttgtctcttttcttcagtttgtatctctttagaagtttaagtgtggattatagatcaactatctgggatgtataagatgacgaactattgttgatacaatgaaggataaaccaaaaatcaaatataatgatacaataagccatattcgatttattgaatataatgattccaaaaattgcctttacagaaatgcatttctgtttttgataaaataacgaataagcaaaaagatgcttcctcaagatgtagatcccaaaatggttttcgtgatacaacacatacacacaacaacattctggctgaagataacgactaatcccctcaaattacaacaaaaagaatcagattactttcatctaaagttttaggttatccgctctgtaccctttacttgttattctctaccatgaatcaagaagcaccaccacatctcgccgtgcctgctccaagtttcactaacttgatgcttcagattctgcttttggtttctcatctgtctcctccccgagagtgaagcgaacaaaccttcttactttgatattttctccaagagcagcaacagtttgcttaaccaggtccttcaccagaacactgtcatctttaatgaatggttgctctagaagagcaagctccccaagcctcttggaaatccttccttcaacaattttctctctaatattctctggttttgactgaaggtcctctctttgcatctcaagttctttttccttcttgacaaagctctctggaatatcttcaacggatacaaattgcacctgtgggctggccacaacttgcattgcaagatcatcaaccaactccttgaacttttcacttctaccaacgaagtcggtctcacagtttacttcgattagaactccaatgcgggaatcatgaatatatgaaccgatcctgccttcagctgcaagccgactggatttcttatcagcagatgaaagacccttctttctcaggtactcttgtgcctgtgtgatatcccctcctgtctccgaaagagctttcttgcagtccatcattccggctccagtttcttctcgcaattgtttaaccaaagcagcagatacagttacacttggaggcctgcaaaataacgataagtatgtgaaacactttcaaacttgggagatggttggcaccatggaaattccactcaagataataaatacatattaaaaaaagaaaaatgcattgtatatgtttttgcaccatggaagttcactgatttagatttataaacacgctgagatgctgcactagttcgtttttcgcaattgcacttttctcccaaaacactaaacaatttatctgaatttcatgatcaatactgattgaaaggtaaagtacaactcagatgtagagaaagtggcacttacttctgaacactttccttagcctcctctgcagcagcaggttgctcttttggaattggttttgctgcagtttgggcagctacctcagcagcaaaatcttgacttttcttttccaagccttctcccaaattaaacctcacaaatcttttcactttcatgttctctccaatggttgcaattgtctgtttcacccagtcctttacaacaagcttatcattctttatgtagggctgctcaagtaaggccaactcatcaagccttttcttgatccgcccgtcaacaatctttgatcttatctgctctggctttgacaaaagatcttccttctgcatctctatatctcgttccttgttaacaatctcttctggaacatcttcagtgttaacatattgtacttgaggggatgcggccacctgcatggctagatcatcaaccaactccttgaagatatcacctcgggatacgaaatccgtctcacagcttacttcaaccaagacaccaatcctgctatcatgaatgtaggaacctattcttccctcagcagtagctctgctagctttcttttctgcactagccaatcctttctttcgcaggaactcttgagcttttacaatgtcccctcccgtctcagacaatgcatttttgcaatccatcattccagctcctgattcttcacgcagctgttttacaagagccggtgatatagtagctgcagttgatacataaaccaatatgagaaacaagatatatttattattcgtggcaattgtgaaaaaacctggaatgatttcatccttgaattatattatctatggcataaatccttgttatatgccaaagcaattctagatagcatctttgacccaaaaaaagtgcatctacccaagcattgtcgtctttgtttgaaaattttcaaataataatcatcaacattaggaatgcgatagtgaaataaattttaattgattaccaagataacaaaacatttacagacttcaggcacttaaaaacatattaagatacttctatatcctagccattgaaatgtttcttgagtcatattttcaagtcataactcttaaattatgacatggaattgtgtacgcagtttttgtgtgaactatgtttattgctactaagatagaaatatctacttgtttactgggataaaaaatttgtgaactttgttaatcaaataagaaaggaggaaaaacaacctttagtcacattttcaacaggaggagtactagttttcccattagagttagattcactaacgatcttgtcagaagtagctccaacattatcatcctcaacatttgatggagaaggaatttcggtctcagcaggtgtttgttctacattttcaatggctggactttctggagacaatgcttgctcttctgtgaatgaaatgtgcactttaatttcaatacataccaagaaagaacaatcaagagttccaaacataaaaggaatggagtaacataagaaagagtatcagatattgttatgagcctcagcaaattatttctgacagtctcttagtgcttcctttttcagttatactaggaacactcaaaccttgtagttaaaacttatactcaatgatgtgatttaaataaatttaagtgaccttacaaaaaataaaaaaatacatttgagtgagctaagatcatttaaaaatcatgataataattgatgccgcatctagattttgagtgcaaatttgaagttcttagctttgctcttgaaagaaagtgagacatttaaactttaacataatgttcaagaaagattatcaggttgcggacctgagctggtaatacttccatttttatcatctggttccaccttatctgcagttaggcggttctattggcagttcatctttaactatagtatcatcagctttttgttctgtactcacttcatcagtttgaactttctgtagataatatttgatcagctgatgcagcagttgagtctgactgtccttcattttcaacgggttcctctgtcgatatgctcacttcagtattcaaagtttcagaactcacctcagctttctcagtgatttgggcttcactgtcagtgctgttatcagtgctggaaatagccttttccagctcctctttgatgtctgaaatatctgttgaggcctcttctattgcactagattccacctctgtcttctctgaagaagcttcatctaatttaacttcttcttcaactgcagaaagatttgcctcaccgctgattgctgtttgttcctccccttctggactatctaacacagtctggctttcactaaccttgctttctaattcttctgaaacttttggtgtcactggtgtttcatcaactttttccattttctctctttcatccagaaacgcagaaatttccttgttctcacggaaggccagcacaaatgggtttgttgcggtatgggttaccccttgagtgtactttatatcttccttttgagcattttcttctttcttcattgtcaaggttacttttcctctgctgaaacgcaacactcgaacgctaacttcttggccaacctcaagtgaagtttcccccatatgagttccaaatccttcctcaagctcctctgttatgggaaggaaaccttcctcaccatcagggagagatatgaaagaaccagacctgttcatattctt

SEQ ID NO: 185376 - DNA, 5076 bp, Cannabis indica
ttttatgttgtaactcttattatttcattgttatttgcatattatttttattatttttttaatattattatcttgttaatttcatattatttttttatatttttattgaatactgtaaaaatgtaaaaaaaaaaaactatacataaaaatataacaattttacaaaaatttgtgttttatgtaaaaaaaaatacaaattttgtgtaattttccaaagaatatgtggtatttatctaaaggctaattagttttctcataaccaaaaataatcacttcacttgatgctttgcttcttctattcactcacattgagtttacactcttttccttctccgatcaaaaacaagtctcatcccatttctaatcaccattagctttgtggttttccgtccagtcacagccaaaagcttggtgctttacaccattattggtgagttatccatgtttggttgagttgggtttgtaatttatattattttttttcagtttgaccacttattatctttgtttatgttttcataagaatatgtttgcataataatcattagagtttttgtttaataggacagaacttgtgtgcccatcaagtgtttgatttaattcctcaatgaaatgtgtgaaaggtggatactttatggattttagtttttttgtcattgaatcaatgaaagttatcaatttgattttgaaagtgaatagattctagtttgaagattttggtttggttaccaatttctgctattgtttaagagtactctgttgtgtgttatatattgctttctatggaggcagagatagctcctatcattggaatccatactgtgcccaacttaatgtgtctgatgttgagtttggggaggctctagccatctgctcggcggctgtgttagcgtgtcggttaggttaggtctgtcaagggtgatctttcaatgtgacaatgtccatatgcaaacgcaatggcctcgattccacaatgcgggcaatgcagagtggatatttgataatggctgacatgtagtgttagctatgtattgctactgaattttcttagtcctttatttcattgttgtctgctgttattgtcttttggttagagtccttatgtctcgggcaggctctttgagactccactcttcgtttcgatgttgtttgttctaaccttctgttgaggacacctcctccttatcagaaaataaaaatcataagttatgtaaccttttctttgatttaaaatttcctgaaatcccatgtttgatattaaagtttgttctaattctcgtttcaatgactctcagtaaagaaaattgggtttattagctaagcccagatgatgaactgtattgtatagccactccattttcatgtagtgcaagtcttttcggtataaataggcaacatgtggatttccctgtcttcattgtgtttttccatgagtgttgttgtttgtagataggagaggtaacacttacacacagatcagtagtaaagtttaaagtatttctcttaccttgtcttgtggctatatgttcttatttaggtgctcgtggaggttacaaaggttcagatcagtttggttctactcaggcttttgttactgatgctatagttagtcatggtgatgaaggtgcttggttcttggataacggctcaactaatcaatatcacagctgagtaatataatctaaccattgcaaaagccaaaattcacaattggtaattgctctaactttccaattaactatggcttggagctttgttttctccaagacaagacctttaaacacctcaacaaccttcaccatcttcaatctcagaccctacctttccatcttcacttctgatttctccacctccttccttgtcacaaaaaccccacaaaaatttaagaagcgaaagaagaaggaaagtcctcgaactacactagtccaaacagagcccaaccgaattccagcgcttgaacgcattgttgagcgtgatgccttcttccgattcctcatcaaatccaaggagtttctctccaagcaaccccaacatgttctccgccttgatgatgctggaaagctctatcgtgagcttggatatccccgaggccgaaaggttgctcggttcatccaacgccatcctctaattttcgagacttatcgccacgatgatggaaaaatgtggattggattcactgatttcatggaggagcttctggaagaggagcgatcggttatggattccatggaaatcgatagggttgataaggtacaaaaattgcttatgatgtctgcccagaagaggattccattgagcaagatttatcattgcaggttgttgtttggaattcctgaagatttcagagaccgggttgcaaaatacccgaactactttcgtgttgtggttgaagatggcgggaaaagagttcttgaactggttaattgggatccaatgctggctgtaagtgcactcgaaaaagagttcatggtagatgaagataaggttaagagggcattcaagtttgctgtgaaacacagcaaggatttggacttagatgaagacgatacgaggaagctcaacttgttgaatacacttccactggtgtctccttactcggatggttcaaaattggatctttggacattggaagcagagaagtacagagttggagtccttcatgaatttcttagcttgacattagagaaaagggcttccatacaccatgttgtggagttcaaagaagagtttagtttgactaagcatacctatcaaatgcttttgaaacagcctagaacgttttatctcgccggaactgagatgaactgggttctgttcttgaaagattcttatgatgagaatggtgtattgataaataaagatccacaagtggtttttactgagaagttgtttaagtatgctcaaatgcaggaaagatagatatcctcgattcttcgaatcactatatgacaaacatcgaagcagagggactctagccaaaaacgacttatataagatcaagttacttcgaaaatttaaacaaaaaaatacaactttgagaatacctcaaacgagtcacagtcttatgttttgttggacatgaattatctaagtggaaattgtgttgggatcaaatctatgtagaaaatagcaacattatttttattccccttactggtaggggcatttctatttttagcgcttagagaaattataattaaatttttttatatgactgtgtacattgtagttactgtagattttctgcttgtttttcgaaaaatttagaataatttatggtattgaaaataacgtttaaagattcaagtgaactcgtgcaaccgaatttttaaactctgttttcgatattttaatcaaatgttaagtacgttgtaaaatgtatctcttgcgtcgctagaattattacttatgtttttcaaaatctcataactatgattttgttttctttatttcttcaaacttttcttccaaaaataaaattactaaagagtatcaatagtgattaatgctattttaccgttcatatttatcttgtttcacatattaatttaaagtaaaatagttaggaactattactcaaatgcactaagcaaaatattgtgttaaacactgctgatgtcttataaaatatacattttaaacttttgatatgtgggaataaaaatattgttttggtctttgtgttcaagtagaatatgagagcggtttcttagagcatcttcactaataatgcttggagagaatgctcggtgatgtagaatgatgtttgaaatgagctaaccattgaagatgtttggataccaaactaaaaactaatattgatgccaaaactcggcattgatgtcatacacatttttccttttttttttaaataaagttaaaataaataataattagtgggatatagtaacactagtaaatttgagtagtgttcatcattggagtacttttaaaagtaagagtactaaaaataatataaaagagagataaaataaagaatatatttttcgataatgtggagatttttagcacatttaaaaagtgacactattgaagatgctcttatattacctaatatactaagttgggattaaacttgactactcgaaatgtttatataaagtaaacgagatttgtcatatccataacaattttacttttaacttatttttttatgtgtatggtaatgttgacagtaataggagaaaagtgtgagatcgtgaatttgacgtgggagcatacacttgtcattctatatctacttactttttttgttttaatttttacttttattttcatattctttaagatatacctagacgatgttcccattatatcctttaaattaatataaataatatgttacttaagtgaaatgtgagaaaatattagacaacccacccataaaagtaggtacattttaataaaatataatgtgtttttgattaataaatacaaaaaaattgtatttctcaacttatcgcatattagattgctggtgaagaatgaagaattttgagtattattatttgaatttagattactagattatctcacctatctttcaattattacgtacatatttgaatttaaattttgaaaaaacaataaattacttaaattaatttagatttttttgtaaaattaaataattttaatgatgttaggatagttataattatctctttattaaaaaattatacacgtgtgtgttgatctgatatctaaactatctatatataattaggattttttgtaaaattaaataatcctaatgatatatattttcttgttaattatttcttccactattaattgccacgtcagcaaatttaatttttatttattatttaagactttaattgatgtgttattttcaaatcatattaataaaaatttagattatcaaacataaacttaaataattatattatgatcataattgctttttttttaaaaaaaaaaattaaaactaataaaaaaacctactaaagattagcagaaagggaacggtggagtcctttgaataaataaagatattatctttttctacataataataataataataataat

SEQ ID NO: 185377 - DNA, 7583 bp, Cannabis indica
gtgacagtaccttctccttccaagagctattgtatcttcggtttaagttaatcttttcaaacctctgctccttcttgacattatgaccactgtgatggtgagctgtttccaagattctacaaaagaaaaaagcaaaatcacataacaacaaacaacttgaagtacatataaaatttggaaaagggaactgcacacaaaaacaatgatacagcagaataaaattagttcttactggtgtccattacacataacatcctgtgtgataatttccataatatcctgaagcacattgattaactgaggtagaagagtctcatcgtcctcatcagatagctgtcaatatacaagcttaaagtattaaatcactgatcaaatatgtagcattaaaaacctttaaatgtaatggaagaaatgtgttaccaatttgcccaagaatttttccaatctctcactgagagaaggcatcccactcatccggaaattactcaagaaaacttttctgtctagacattcgtctacttccttacatatactctctacaatcctgtcccaaaagaacaaaaaatcaaactctgatgatacttctaataacagggggtcaaaagaatatcatatccaaaaaaaaataaaagcttgatactgaaaattttatttgtcatacatcttatcagctttgtcttccagtaggccatatattacatccctaagtgactcatagcattcaattactgcagagtacatataatcgtcactcttaatcttcttaaataattcattatcatcctttcccttgaagtcttttgccatatctaatgctataggaatctgtcacattaaaaaaaaggctaaataaaaaggaataatgacataggatcttggtcagaataaagataaataaatcatgcaaatagtaccttactagcgagcaagaaagggggccactggacaacagagacttcatttgaacaataaggaaccaaaagcaaatctcgatccctggacagtttccattaatagaaagtaatcagaagcataaaccaacaccacatttatatcacagcttgatgagaaagaagcaatcagaacctattgctaataaggtcttcttctcgcatagaatatatgaactcgttccacacttgagagaaattggcaatattcttccgcacttgtgatggatcctgtcattgaaattgttcgttttagtcaaacacatgaaatataataacatttaggagagagagagacacgttcaaataatgttctatagacaatcagaaataaagaaaaagacacaataaaaactccatacaattgtacattttagagatttttgttttggtatctggtgcagagtgtatttttaatttggaaaaaaaaacataaaataaaattacatacatacatcatagagaactatgtactttactgtctaaaattgcattaccaaatttttctgtttggagtggtctgtatctgttgatggcatgagacgacggctgaaagctagaggcacagattcaaatctggaccgcagcatacccagcgttcttatctaagaaaattgatgtagaacaaaattattaaatccaatcatttaagaacttaactacttaaggaacttccaacttcccacaaaccaaaaatgaagtgctgatagttagttttcagcaaaacagtgttatttacattaataaattgcagccaattttccctatagtacaccactaacctcacccagatggctgaaagctccatgtatcccgccaaataaagtggaaaatatagcataccatatttgagcatccatgaagtaaacctatactccaatcacataagacaaagtcaatgatgacaagagaaagtgtaaagaagagagaaataaaacatctgcgcaaaaatctacatctcatcttaactcaccagaataatcggtgtccatatggcaatgatgatgaaaatattatgcggtactacagcggaagaaaaaaaaatcaattagataaatcagtcagtaaaaaatgttggaatattacaagaaaaagagaagttgaagtaaatgtataaccatgtggaaagaactcatgccattgataattatcaataggcatctccatgatcaattttgttggttcaactagaggtgctatctgtcaacagaagacattaatcaagatttgaatagttcaataaatattcaaaaatgttaaaactgaaaagtggtagtacaaagctaatggcacaaaccacaggaaggggattttttttttcaaacataaaacctcaatcaaaccttgaatgagttaaagatgaagttgcttttctggtattattaacaaaataaatctaatatcttgaattacagccagatattctatatccaaactaggtacagttggtaccacattacaaggtttttcactataaactttaacggtctgcttcatcattcattacaaatgtttatttagtgctagggttgctctgcatgtacacttcaaaagttataatgagtaaggatgaaattaaatgcctatttagattaatgagtgctgctaagcttacttagagctttgtataagtactctgactggtatttatttcagttatcatctgctatcctagttacagtcaacaagactcaatgctgtaaagagtctaagttttcttctctctcattaaaaaattttttgaaacagcacttcatgcatgcatatatctgtgcttttagacaaaaataaataagcataaatccatagttcacatacagaattcctttaaagttataaacttctaacaaaatattcacctcaacatagtagctgaaggctagcttgctgatcagtagcatgatccaaaacaatgtatacctgagcacatcgaaaccacgtgaattaatagcagtataaacagagagcacatctatagccacttgaggctagctcaagtttttggatgtgtgtgtgtgtttatgggatgggagagggactctaatctccactgtataaaaacaaaaacaaaatacaaaagcttcttccttacttcagcaatgagaacatgtcctcatgcatgcctcttccgacatacaactttggctgcaatgagataaaatatacaaaattttcaagttgatctcaaaataataataataaataaaataataataataatgatgagtaactaaaaaaaaagagtgaagaagaataatgtgtacaactatgtttttcgtaagagacacatattgctaataagaaagaaaggtcaaacatgaggacaggaatccctcccaggaagggacttcaaagttgacacaggccagtagtaattcctaagtttagcacaattatcttattgtgtgtagtaaattttcattatttttttttgtttgctgttgcaattatttcctgattagtgttcctgtagtaactagtttaattcctagacattagactgtataatttcatggtagctacactttaagtttcttgtgttttcaaaaaaaaaatgcatacccgctgcagcaaaaacaatgaaacaaaaatgaaaagagatcaaactaattaatgttgggcatgctcacctgagcccaccacataagaagagtagtgatatgcatgttagaacgctccatggttcttcgtaagggtggaaggacaaagagtacagcagccaatatattgggtaacaaatagattgcaattgcataatcatacaatgagtggttactccaatccccagcccaactcctgaaaaatttcacaagtcctgttgggctctgcacagaactagagtaacaaattggcagaaccacaacccagaaagctgctaccacaaatttcaagaggtatcgcaccacctgtgttatttttaagcttctccatgcattgaagctaagaactatatccagagtagctgcaggaaataaatgaagattataagaaatcttctatatagtaaacctgtaggaaacaactagagagaatagtgctagaactcaagtagttgatacaaatgcttatggttgttttggtacaaactatgtattttgttttctcctattttggccattagcaacataatgaagtctctcctattagaatcatccacaaaaattagcaccattaatttataccgtaactaaatagactacatgcaccaatggagtatattatatttaccttgaagaaaattgagaaaagcagaagtgatgaaaatgcttaagacacttctgaatacatctgcatcgaagaaagctactatagatccagaagggctccatgcaacgatgagcatagcctgaaaatagtacagtacaaggtcaatccttgaggacaaaagactaaagctgcaacatgatatcacaccgacttaagttgagcctcactagattcataagtgccaagttaagattctagcatgaacgtgattcactataggaacatatgaaaacctttcatgatgaccaagatgacattatttctcagcatctatataatcctaccaactttcgagaactccaaatgcctcttttacagcaattaagggttactcttctacttattttggatgctgacaaaagttttcagaaatatataaatgcttactgccatctcaaggctatacatactgcatttaatccaatggcttctaagggaaagtgggaatatcttttttcttcagatggatgtgcttctaattaagtgtttattaatacaaggggaaaccctttgctttactatggacatatgtatgcatataatatttttcttccaattggaaagatcaagtgcagattatagctagggtttcttgtaacatgttttaatccccatgaaaattgtaatgtcacggtgcttccaccatcacaattgaccactggtgtcctcatcaagacttcttgagcatactgtaaattctttaggcacagcagcatcaatcatatttttttaaaataacagcagcatcaatcataagatagaatattaataacagtgtactcaatctttattgtttgtatttcaggaacctttgaattacgacaatgaacaggaacatataccacattctactttcatgagggagatgtattagctataggaagttaaagtcttaaactaaaacaaaaactcaaagcattaaggttacctgaaaagccagtataaagaaaacccacatccgatcgaaatttctgtaaagatgcaagaatgttcggacttcaacaaaattcgttttaggtttttttgccccagaaacagcttgatttactctctgtcaaaacaaataaaaggatcatccctttttctcaagaataagatagcgtaagacaggaataagataaggtaagaattagatatgattgtttatatcaataccagcataagtatagttgtatgtattcatctgtataaagcgtgaacataaaagtaggcatgcatatacataaaattcattggcaataaaataaaacagttctgtatctattattttgaaaaaccgtagcagataatccttttatattaaaaagagattgtaaattattagggagatgataaggtatcaataaaattacgaactaagatgccaattgtaatctactgtgtcaagtaaccagataaaacatcttgtagtaaccggacaaggatccgttccttctctttcaaatagagatagagaaagaaagagaggtacagagagatagagtaccttattagaaggttggccatctgaatgcctgaaaaaatctgattcaagattcattggccatcctaagctaaaacatttcttggacctaaaacagaagtataattagccatttaccatcttcaggagcatatacacagtattaagtattcaaagatactcaccaaaagtactcattcagatcatcatagtttctccaatttgaatgacttgccttgccattgttatttctctttgcttccttcacaaagaacaaaatttattttcagataaaaattaaaatgtaacatcaagtaatagtgattcataacgtctaacatcctttttaccttttgcaacacatcaaagataggggttataacatgtgttaagaagtgctcttcatgacatgcctcattttgataagtgtctccgataacatcacttgcattgctatagaggatcccatacacctcattggccatcttccagaaataggagtttatatcatagtcaaagcagtttcgtcaaataccaaacaaaaatgccacgcataaatgctacaatgtagaataatgacccaatatattacataacatattgattaaattccatcagtcagataattaactaaggataagggaggactataatcagtttaaaaaacagaaagcaaaaaagacactggagcctagctgaagtagttgggtgtgtgtaggaggcctgaggttccagccccatctggtataattatatcagcaaagaaattgtgttgctttcaaccaaactaaagatatgtaaagtaaaatgtttgatattatgaagccattaacttcattagtggagctcaacttccctaattcatcttcaaactttctttatagttaaaacgaaaacaaattaacaaaaataaataggtaactatcttaaatggtttaaaatatttgcaaagaaagaaagatttgatcctaatatctcttacgttaacaatgttaaatggttgaaaatatatgtaaagcaagaacgatatgatgccaatatctcctgaacacaaagaacaatgattataagaaactgctaaatacattaaatggctaaaaaaaaaagacatacattatggaaaatatagcataagcattcgggcatgaatcgaatatttgaagcttcaccccatatcagaagataaagtgcaatgtaaataagctccagttgttgtttgtcagtaacttgtggaaacctgtgagccaagaagtaagggaagacactacatggttaaaaaatcaatcattggtctgaaacctagtttcttacacactaagaacaataaatttgtagttgaaaagcagcgaagttcttacctaagatttgatttacaatgcaaatatttacaccacgaacggtaatttttaaagaatttgtccagcaaattctgtacagtggcagctgccaactgtaataaagttctaacaagtcagtttgattgaatgaggtattatgttgaaaatctatcaaacaattcaagagcttataactcaacaaaataaatgaaagttcaaaagatcaatgagttacttcggtgtgacgttcagaactcctcctcctcacatcaatatttgcaagaagcaatatgaggtgttctctttgatttgcaacatttcctttctttatatcccaagatttcagcatgaaaaaacagagtcagagatataattgctccttcttacaaaaatttgcagtaaactaaaattctaaagatagattcataagaaaatttagttcaaacgaactaaattcaactacgaaatataacattggagaattttggacatcacaacattgtaaaatgagaggattgttggaaaatctcaagcccagaaaagcaaattctgttctcagagcataaa

SEQ ID NO: 185378 - DNA, 3541 bp, Cannabis indica
agtttgtcaatgagaaaccagaaacgagtgtgtgtgagactcttagttaagcaatcagcaatttgatctgaagagggtatgtagcgtatgtccagttccttcttgatcactttgtctcgaataaaatggatgtctatctcgatgtgcttagttcttgagtgataaactgggttagaagcaagtgcacttgcactttgattatcacaccaagtaactggaacactaggcaacttgaacttcaactctgacagcagtgactgaacccaagtgatctcggctgagacatgagccaaagctctatattcggattctgtactcgatcttgagacaaccgattgcttctttgaagaccaagcaatcaatgtatctccaaggtacacacaataaccagcaaccgatcttctatcatcgcgacaacaagcccaatccgcatcagaaaaaccttcaagtgttaatctttcaatgtatccaatgtgtagcccatgatgcacagtacccttcaaatatcttagcacacacttagctccactccaatgacttgtggtaggagcttgaagaaattgactcaatttattcacagcaaaggcatgtcaggccttgtgtgacataaatattgcaaagcacctatcaaacttctgtaggcagtggggtttgtcaataattcaccatcatttttcgacaatggtttgcctgcaaccataggagtaggacatggtttcaggttcaccatgtcatatttcttcaataaatcactgatatacttgccttgagttaagtacatccctgttccatcacgataaacctctataccgagaaagaaatgaagctgtcccaggtctttcaaagcaaacattttgttcaatttttgaacaaagttgttcacttcagtgatgttgttgcccgttactatgatgtcgtcaacatagattagaacaagaatgattacttgttctgtcgagtagatgaacagggagttgtcagccttggattttctgaacttccaactgttaagagtgtgcttcaatctgtcaaaccaggcccgaggggcctgtttcagcccatacaacgatttattcagtttgcacacatagtcaggcttgtctttgtcttcgaaccctggaggttgcaccatgtagacgtcttccttcaatgttccattaaggaatgcgttgttgacatcaagttgtttaacttcccagtttttggacacagcaagtgttaagacaactcgaattgttgctgactttattacgggactgaaagtttcactgaaatcaattccgggtctttggtgaaacccctttgcaacaagcctagccttgagtctttcaagtgttccatctgcattccatttctctctatatacccacttgtttccaaccaaattataccctggcagttttggcaccagcacccacgtgttgttccttttaagtgcaccaatttctctgttcatagcatcattccaatcttttgattcgagtgcctcctcaatgcaactaggcacaccagtatttggattccatttagcttcaccgagatagacttgggtttaaaaatcccagccttggcacgggttatcatagggtgagaaggacctggttgctgcactgctggtgcaacatcttgttgttcttgtgcttcctgttcagtatctggtgcaggtaaattatccgagtaatcagtgtgcatactaccaatattaatatgttcattaccttctggtgtactcctggctgatgctgcttccacggatctttgcgagtgtggaactgcaccagcaggggtaaattcagcaggaggtgatgtattttcaatgttaaagggatgtaaattaggaagttgtgaccattgtgggtagtgaatgattgtttgttgttcagtggcataggtatttagaaaaccacctttgaaaggaaattctttctcattgaagacaacatccctagagatgtaaactcttcctgttgaactcaagcacttgtagcccttgtgagactcactataaccgagattcacacattgtagtgagtgaaattggaacttatgagtttggtagggtcttatacaagggaaacaagctgccccaaacacctttaagaaggaataatctggttttttgttgagaaggatctcaagtggtgatttgtgattcaaaacaggtgtaggtaacctattaattaggtacacagctgtttggaaggcatcaacccaatacttgagaggcatgtgagcttgagctaagagagttaaccccatttcgactatatgtctgtgcttcctctcagctctaccatttgagctgaggtgtgaggacatggatgagtgaaatttatgccattttcaagggttatgtcagtaaaagattggtactctccaccccaatcagttctgatagttttaattgttgttccaaattgattttcagcaagtgctttaaagtgtgtgaaggcagtgagtgcatccgatttggatttgagtggataaatccacacatatctactaaaatcatcaacaaagtgaatataaaatttgtaatttgtgtttgacatgatgggggcaggtccccaaagatctgtgtgaatcagatcaaggactcttgaagcacgatttgctgaatttttaaaggaagagcatgggatttcccatactgacatgcatcacagaaatgaagattttcattgactgaaggaacaacattaccattaacagatttcaagacttggttcaacaccttactagagggatgaccaagtcttctatgccacatatcactaacagaaactaaatgctcattaacaacagattgagctacattttctttatgtaaaacagagacaccagtaaacatgttacactggttttgactaactttgacagggggaatagtgtgacagtaatcatgttttgaaagtggtggttgaagctggtacagtccattcttaagtgtcccttgaagcagcaccctccttgtttccttgtccttcacaaaacaagaattagagtgaaattctatgaacacattattatcggcagtaagtttcgacacactaattaagttcttggcaattttaggaacaagaagcaactgttttaagaccaagtcattggcagaattagtttgtaacttactgctaccaatatgagatatagtcacttgactaccatctccaacagtgagatgattcttaccaccatattcagtcttttgattgacattgttggatgaggaagtaacatggttgcttgctccactatcggcataccaatgatcactatccactatttctggtgaagctataaaggcactatgaccacttccacctttctggttttgctgaatcttaggatcatgacccatataggactcatcgtacctgttatagcaaatcgcagctgaatgaccatacctgccacagacttggcaggttggtttcgagttgcttgatcttcctcttcctcggccttgataaccccctcgattggtagatgcaccaccacgatttccaggatagttgccatgatttcctcttcctcgatt

SEQ ID NO: 185379 - DNA, 749 bp, Cannabis indica
acgccgaacaatgcctgatcctgtattatcagatgtcccaccaagaacacaactcacatttactccattcttctgcatacgcacatacattgtatataactatatatttatgtagcagaagaagaaaaagaaaattatgggttttgagggttgaggaatagcatacaggagaggtagtactagtaggcgctgctgcatacaaattgccaaattttgcagagttgcaaccaatccatacatatatctaaaaagtaacagcaaaattaaactccatatatataaaaaagaaaacaacaacaacaacaacaaaaaaaaaaaattaaaccaaaagaaatacccaattcattgtttttatatttaagtatcaaaatggcctatggttctcttctctctaccagagtaagggaaaaaaaaagagagagagagagaatcgtgtagtgttggacctgcctgggaagacggatgatttggaagtggacggtgacatcgttgacggcctcagtgaagcaggtgataggaacgacgtcgtcgccttcggatatatgtgcagagctcagggctgagttcaaagcttccatctccaaaccctttcagacccacgcaaaatctcaactctttcaactttcctctttacaattttaggttttttttttttttttttttttttttttttaaggtaaaaagaacttaactatttaaatttacttactattaattacttagtatttcttattaacttacataaataa

SEQ ID NO: 185380 - DNA, 3941 bp, Cannabis indica
cgtatatttatgaaaaaatcccacattattaatggtattcaatttgatgcacattgatttagtgtataatttaagatgccattagaataaatgatgtgaagattttacactaaatttgtaaaatagttggaatttggagatgctcttagtggtccctccactggtgttattaaattaaatcaaatcatattatacatttttggtggtgctactctgctggacactattgtgctttgagcatttctatttcataaatagtgtttttttggttcagaacgaatggtccttttcctcaatagacttagatgaagtagggccaccataatcacaactcgcaaaccaactattcatatggaaagtgccagatcttgattcgagttactgagtttagttagttttaggttgaagataatgacacttatttgatattgcatagtagattttgtatttgagaaggtttgcctacaccgattgatcctacaatcgggctgaggatcgcaccgatatttatcatctggtaaattacatcaaacccacttcatattgttagttttttcttttattttaaatcttccatttttcacggttatatttttagattgttttgactaatacaacccaaattgaaatatgcaacactttgttgtttttggaaagaaatgggactgagaagtaagaatcccaagaaggaatgaggagattaatgagagtaattattaatatggtagaagaaaaatgaatgacaatgctctatttctgtactagatgaaggaaatatatggaatgaaaaatggggttttaatataaagtacttattttagaaaaaagccatggtagtaactacgtggtctaagaatgctgagcgaatatcctcacttgatgtgtttagttttagcttgaggagatttggctttttggtccactcaatgttccaaattgatatcaatggaaaaatctcatatccctctgctcaatgatgtcaatctcaccatttggattgcacgatagctagaaaaccccttatatataaataaactagaactttctaggatacaatcattaacctgaactttaggagaggtatatgagacctacatttatggacatcttgtggaaaccttttatggggtgagcttgttgactagccaaattagtgttgttgtgggctcttaattagtaatatagcttgaaggaattgatttattttttatttatgaaaaaaaggtcatattttgttttgggatagaacctgataagatgttggatctccttattgtttcttcattaaagttttatgattacgttctatctatgttgataaagattagttggttaacttataattcaatttcttgttcccacttacactattgttcattagaggacaacttcttgttttctttctcaagttttattttttttctgttttacaattaaatttttattttattgaaagaaaactattgatactaagctatatgtgatgcaccggattcgacagaattatttagttgaagtttgacttagattccaatagctgagtcaactatatgtttcagagtctaggaatttcatttaaaatctgttattagcaaatcaaatgcgtattgagtaaaatcaatattgccaaacacggggttgtatattcccactctcattcttcatttagccctcgaaaacatgattaaatcttatggaataatactttgctctagttttcagcacaagctaatcattgtatagtgacctggttatcataacatgtatgtgttttaatgttctatgtttatgccttgacatttttcttctctttattagttttgtattcatcatctctcactcctttttttttctttggtcttactgtgtccaacagagaatgtcacaagattttcaatctattgtccatagtggtgtgggcaatcatatattgattgaccattctgttcagggagtatgtgcatcgtgccaaaaaatcctttcagaagataatgaggcaagtgatgatcttgaaacgatttgcatttgtggtgattgtaaatttttgtattctgaagatctggatatcccatcacgtggatctcgtcgaaggagaccactaagccgaagaagaaccaggtatagcagtagtgagtcctcagaaaatactttttcgcaacaattctcacatgtgattaatctggtgaggcaaaatcagccaaccatctttgcatttgaggattttctaggagaaggtgatcctactggcaagttattgcatcagacaagttctcgtaatagtccaagggggtctagaagatggaggcgggtgctcattccctctgatgctaaaagtgaagattcagataatgtggattctttatttgctgataatgaatctaatgtcagttttggatgtcacaagacattacaaggtgacaatgatgtcatttcttgtagtacttacggaggagactatgatgcttcagaagatctccatggctttctggactcagagatgtatactcaatcaatagaaggtagtgatttcgacagtgacactgatattgatccaatgcatgttgggcttaatctttggaactcagatgatctaggaagtggaggagaagcagaagacgaagaagatggtggtgagtgggaaaagggccatgctgaggacgacatgattccatccccagatgccagacctcgtagtaggaacttttcatattctagtcaaagtgaacgaatggctcattctgaatctgatgatactataatttgggaaagtagggaaagcaatcaaacatatgcccataacatctttgcgaacttagaaccagcttggatggctgatgttggacaatctacaaattatcttgatgcgagaggcttggaagagcttcttcagcatctggttgaggatgacaactcaagacatgaaatgccacctacagagttatcttttatgaatagtctacctcgtgttatcattaatgaggagcatgagaagcagcttgatggcgtagcttgtgcaatttgcaaggatatgctaccgattggtgctgaggtgaatcaacttccctgcaaacatctctatcacccttcatgtatattgccatggttgcagtctcgaaattcatgccccctttgtagatacgagctaccaattgacgacaaagattatgaagaggagaagagtgacactaggagtagagtggagatcagcactcgcccccagaatgtaccagaggaccgtatgtctagacgaggtagcttgtcctcttacagagcagaggaagaaatagaatttaatgagggtagattagagcagagagagctacaggatgtggaaccagaatcaaattgctctagagatccgagttgtatgagaagatgggtttttcttacagctgctccagttgtcggtcttgtgggcattttttttgtcttgtggttaggaaatcttggaacagaaagaagaggttcttcaattgcccttcgaccccttccacaacatagccaccaaaatctcgaaattactggcccctcatccaatggtagggagaataagagctggagatggtggtcactgttctaaacaattatttttaagtaaatatattaatttatattttatgctgatgctttttcttcacatcttgttggctggagacttttatgctactcttgtggcttagatttggctcacacttgacgtattactgtgttttctgcttaaatgttgcttcttgcagtcgtaatacaacgtgggttgaataatgaagaatttaaagactaattaatttgagtttctagcaattgatttttttttcttttttgtaaattggttatcatttttattttgttttaagcaaattagtctccaaatgtttaattttatagcagcattattttaataatcatgtctttttttttttttttatttttatttcaaatat

SEQ ID NO: 185381 - DNA, 1222 bp, Cannabis indica
ccaaaaacacaataaagtataatgatacaccaaatttaaggatttaagactatatatatatataaagatatatagcataattaataccacacgtatacagtaacgttgtgcatgcttttgatataatatataatctttatggaggaattaattaattaattagttaatttgtgcataattagatagcatgttcaccctattaaactttatttcatttccaattagttattgcaactggcagaaagatacgattgccacatatgacatacataatatgcatgtaacaatatagttatgtcaaattattgttatttttactgaatttgtaggaaatgaccgatggaaaggtaaaggtcctcaagattatatatcaataaatatttataagatttagggtttagaaaaaagataaaaaaaataatagggctcatatatacccgtacaagtccattaatatgaaccacacaaatttaactctttcgagcggtgtagcaattgtattttttctttttccaaattgtatggcatatatagttcagtgtactaattgaattgttataattttgcggtttaaatcgcactatttgaaatatattactttttgagcttctaaattttctaataaattgctaaaaattaaatggctttgttgaaactttggttgttttgttttgcttttgctttgcaaagaacttcaatgttttatcatgtaggaacttaatttaatttatttgcttttatactttctttaatttgtattcaaattttagttgtattgctgaattcgaaactgaaaactttaattttgtcttcttgaaatttaaaacttttgctgtaattatttaatatttttaaggtttaatgtttttagtttctgtgatgaatgtttcaacttgaatgttattaaattatttgtataaaccgctcacacaaataccctaataaacaaagctggagatggcaatatatatcaattaaattgagtaatttatcagatctgtatatatgtatgacgtatttacatgatgaaaatacaagaatatatatacagcaaaatcaatttgaaccccaaaagaccaaagaggtagtaggattaattgtgaggtgttgctttatttcaacgcagataatcagaaactgtaataataaagtcaagtgcgaataaagaaactaaaggcatatatatatgggcctctctcttattcgatttcgatatatatat

SEQ ID NO: 185382 - DNA, 12270 bp, Cannabis indica
gttttgctggtttagcttctacaggatatgactaagagtaagcagttaataatttttattttatttattaaataaaattatgtaaaatttcatattgaaccaataacaatatattatcttttacggtattagacactgataatttagattaattctaatatacttggggatatttagcatttacatgtaaattattttagagtttagacaaagttgtagtaatctacgtacgggtttgatggtcaactactaaacaaataaaatatgtagattttcatggtatttatttagtatttacttgtaatagttttagagtttagacaaaattgtagtaacgtagggtttgatgtgatgttagagtcaagactttgtctttaaaaagagttaatattcgtaaatagtttgtgttcaacggttgttttattgtggaaaatgacctcagagggctttttcgtaatttcatacacgaacatctccaactactaaaactatgctttaaagagaaaaataagaactttgtccttttcgcttaagtaccgatttttctcatgctttatttcccattatacccctctcacgtttcctttattcaacggctcaatatctacatctctctctctctattcacagccaactttttcagtctctgcttaaacactgggtatcctaggtgggtgggaagctcttctttctttttgggtttcttccacaatcttgatccccctttctctctccctctcttaaagttcagttttttattctttttaatagctaaagattgaaactttcctttctgggttttctctgaaactcgtgtatctttagactcaatcccattttcttttgatttcctgacttacccttttctccccccatgtctccatgatcccacttttcactgccattttcgtttaaagctcctaaagcggaagcattttttgggtgagaaaaagattcctcttttgaaaatgaagcattcagctctgcttgactcggttgtctttcaactcacacccactcggactaggtaagaatctgatctacttcttttggggtttcagagactactgagttgtttctttttatgtttgatttcccaaatgattattgattagattttttaccatgcaatcttggaacgaagaatttgttgatagtaatgactgagatggaaactgtttattgtttcttaaaagatctgaatttattttcgttacgtttttggctatggatctttgagggttttattgaaagctaagatttataaagaaatgatttttgttttattcgttttagtaaagtaaagttatattacttttctgggtctcatagcattgctttctagttcatttagtcttcaattgttaatctttagtaagaattttagttgacaagcaacactgattttattttcttggcttttaaggatgaaattataaaaatgtaattcagagttggtaggtgaagtcatttttaatgttttacttttatgtgatttgtaaacattgacattctaccatgagattgacaaccttaatatttttgtgtttctttttttaacttgttgtaggtatgatttggttatatctgcaaatggaaagacagagaagatagattcaggtttactgaatccatttcttgctcacttgaaaactgcccaagaacaaatggccaaggggggttattcaattatccttgagccagatccatcaagtgatgcttggtggttcaccaagggtacagttgaaaggtctgtattgcttttacttatatattaaaatttgtcttaactcatgagaactactatatatatcaacatgaatgtaatataaaaagataacctttttcataagcaattatatcttactgaggagctagttatggagtttgtgttgcaaaaactgtttattcttttgatttcattctctatattcatttgctttcgaagctaatgtgtaatgtatatctctaggtttgttcgctttgtccgaactccagaggttttggaacgggtgtacaccttggaatctgagatattacagattgaggaggcaattgcaattcagggaaacaatgacacaacaactcttaatgttgtaagtacctatgttatttctgaggaaaattagcttccttgtcttgtattattacagaatgagaaagttcagtttcgggttattttttgtgtggcaggtagaagaacatctgtcaaaacctgcggaaagcatagaaggtattttgtaagaaaagtaggaatttggaatttgggtttgctcctagcatattgttaactctttcctgtgtattgtttattttctattggcttaaatagcttccaatgatattggacaggtagcagaaccttgccagatatcaatgacgagaaagcaatcattctttacaaggtgagtattaactaaaagcagtcattctttacaaggtgagtactgtttctaatctagtttttttgtgtgtgatttttcagcctggagtacagccacaatcgaatggatcgactgcaaaagaggggaattcgaagtacatacatactatttcattcatgcaaacttctgatgtatctgattataaatttgctataatgataaaagttacagcataggctaaatcattagagtaataaggattgtcttttaatgggtgagcaaatcgatgatcacatatagcgtcatattcatcaaagaagcctcacatcttttaactgtttgctaatttatagtcattgtagacaaggaatgctgtacacttgagctctgtactattacgtacgtcaacttgtgttcaatatgatagagtgttagattgctgtgtgtaagtatggcatagatcctctttgttttggttcacatgcaatagctaagacatacttatttggtttactagatattaggatataaaaatgaacaattccaagtaaactcaatggtgattttgattgtccttgtgtgttcaggctgtcaaaatttatttgaattgtaatacagttaatggtaattccttgtctttattgtattcattatagagttcagcttttgaaagtcctggaaactcgcaaaactgtgctgcagaaagagcaaggcatggcttttgcacgtgctgtagcagctggttttaacattgatgatattcccccaatggtgtcattctctgaaagctttggagcctcacgtttaaagtgagcacaatctcccataagatatttttttaccaataagagactttcgttgtattattattaattttgtcaatgtaccagggatgcttgtaaaagatttaaggagttatggaagaaaaagcatgaatctggccagtggcttgaaattgaagcagctgaagcaatggctagaggtgcagacttcactgccatgaatgcatcgggtgtcatgcttcctaatgtggccgctgaatttgctgctgaaagcaatgggaaaccaggtaatagtattacaaatctcctcaacatgaaagaaaataccgaaaaataagcttccaaaactatttattgcttaacatacttgtttgttttctctacctttcttccagatgaaaagactccaatggaaaaccagcttcctcctccacaaggtcagtttccacatcaaatgttcccaccatggcctattcattctcctcctggtgttatgcctggatatcaaccatatcccatgcaaggcatgccttactatcagaattaccctggtagcccatattttcagtcaccttatccagcagctgaggatcctcgattgcattctggtaagagaatgggacagaaaaggcactccatggacagtagttatagctatgctgaatcagaaacatgtgatatggatgcttccagaacaagatcgtcggatgatgttgagttagaaaattcacaaagtcgagaatcgcgtaagagaggtagccggtcaggtaaaaaacaatcaggcacggttgttattcgaaaccttaattacatttcaaagggacacagttattcagattccgaatcacaatcagcctcaggctctgaaacagacgaggatagaaacaactctcgaaggtcctcaagaaagaaagacaacaatataaaatctgcagataaaaacaattcagctgataaggaagaaataagttatgggaaggtggcagatggaggacattggcaagcatttcagaatttcttacttagagacgctgatgatgaaaaatgtgatgttgatcaaggtatgtactctatggagaacggcaaagttcattcaaaacaacgtcaaaatactggtggtgaagatcctatattttttggagggcaagataatggtgtagttcgaaatgggggtgcaatggacatgcaaaatataagtggaaacatgactcgcttgccgaaaaattctatggatgaagctatgatttctaaaagagatggcataaatggggatatcgatggtgaaggcgatgtactctattctgaagtaaatggaagaagggtgagctataggaggtcatccaatgaagattttatgattaataggcaaaaacaatcagggtttacaagttctgctaatggatttgaaggtgtggaaagaaatatggacaggaggtcctctcaaaatatggatgatgattcctatatagttgccttaagatcagcttcactagatcaagttggaaatggcaaccctattcatatggattctgaattccggtcagccactggcaaagaagagaacggtggggtccaagtccattatgaacctgaagaattaagtatgaggcctcaacgcggggatgaaattggggcgtttggctatgaccctgctttggattatgaaacacagggtgcttcacaaaataagagaagtaaggaggtggcaactaatgctaatcagacatctaagaagccagataagggcccgaaatctaaattgcttcaagatgataagaagaagaatgttgggccaataaggagaggtaagccttcaaaattgagtcctttggaagaagcacgggcacgtgctgagaagttgagaagctttaaagctgatctccaaaaagtaaagaaagagaaggtacattactacttgctgttatttcataacatatctgtaattctatgaacattggtcatcgttttcacttgtatctacaggaagaggcagagatgaagcggatagaagctttgaaaattgaaaggcaaaagagaattgctgccagaggggctagtactgtccctgctcagcaaacaaggaaacaagttccaacgaagacttcaccgagctcatacaaaggaacaaagtttagtgattcagagccaggaccgtcatcacctttacaacggttccctactagaacttcttctatgggatccattgattcacaaaaggcatccaaaagcagcagcaggttaattggaggaagtcactcagctggaaacaggataagccggtcagcgacttcattgcccgaggcaaagaaagagaatggaacaaaagcatctatgtcacgcattagaaggttatcagagcctaaaatgattagtagccatccaatttcttcgctgagagcacgaggtaccgagccagtgtcaaagtcaaagtcgaaatcaaaaatatctgatgggtctgatagcaaaaaattatctgccatagtaaactatgataaaagcaaggctgctactcttccagaactgaaaattagaacacccaagttacccaatactaccccgagcaaatttacaacaaaagaagtgacacagaagggtaatttggccaagtcatctacaacttctgaaggtactgaagtaaagaaagacaatggaaagctctcacatcataatgaagcagacgaaaatccagtggttgaaaagactgttttggtgcttgaatgtgagaaaccttctgtacctgatgtatattcaaaggaggacaacatcacggtggtgtcagattatgcaactatccgagcaccaaacacagttcatgaagagcccctgaatggccaaatacaggataaaattacttcaaatgaggtatgaatggttgcaatgcaagtagctatgcattggaaattttcaataatttcacttttagtagtattcgaaaagttgagttgtttagtgtagtttgttactttctttcgatgacacaacacagcaagagaactttggttatgactacacgcttttcttgttgtgctcgatatgaaaatattatgtaattatgtattgtagaccaattttcatcaaagtggttcgctggaatctttttgacatcactacattaatgtttaggttgctactgtcgatgtgaacaaagtgctgccacagctctcaagccttaatattgctgaaaaacagtaccaagccccctatgctcgggtttcttcttttgaagatcgtactgagaaatctgttgttattagtaaagctgctgtcaatgtaaaccccgaacctgtagcaacaagctctgtgaaagcacacgtattggatactagaaacctgaaattggaaaagattccagaaaccctggagaagcctcaggtaaaggaatcgtcaaagggatttagacgactgttaaagtttgggagaaagaataacagctcttctgcgggtgaacgtacttctgaatcagataatattagcgtaaatggttccgaggtagatgatactgcaacaaataccgctgtttcaaatgaaggtaatattcgtcactgccttgttattgcacactcaatttactaattaatttcaaacccaccaaagactgatgaatccaaaccctgcacaagtcacacacactttattaaatatcatatgagaaggtgcaaaccatttgactatgaatctgaaaatagtttttccacttttcatgatatgaccaaatgaatatgagaataaacaatactgttccaaacacttgacttttgttcatttttaatttctttttcgttagaaagcaaaactaatgcttccttatggtctgatgtgttagttgttgcctaaccaagaatttcatgcttcccgaacattagcggttatgtaataagctccaattgtgaactcaagactaagcctgctttttggtttgaagaatttctggggtttaagatgaaaataaaaagaagtaacttttggaacagggaataaaatacttatttgacatgttactcataatgcatggaattcctttctttattatgtatgatatcataatacagaagttaactgttgttttcatttctgtaaacagttcatacattgaagaatctaatatctcaagacgaaactcccactgccaacactactccacaaaagcgtaagtgcaaaatgtaacttcaatgtttcttcggtgaaatttcatgaaaattatttgcaaatttatctgacaccaaaggtgtggtttaatttcttcgggtgcagcttcccgccacttctccttgctatcaccgttccgaagtaaaagtagcgataagaagatggcaacatgatggcatgccgtgcatgacatgacatggaggtttggagctgtgttcttcattttccagcattgtaggtgtagtcatagagttgttatatacttatgaagattgttcagttcagttcagttcttttgtattgtattgtttcattgacaaaacaaacatcatatatttatatctaatcttatttttgtacagtccaccacccacatttgtgttcactttcatttcttttaatttatttggtagcttttgcttacatacatactatactaaaatatttcttacatctattctctttaattaatatttaaaaagaaaaatgattgaagttttccacaattaaaagcttccataacaaagatcctacttttacacttgtcttgaaaatcaaagagtgagaaagtggtaggataataacttcaatcaaatctaatgatcaagcaagaaatgttggtcttgctcattctagttatagcttcttttgccaagcattctgcagcttcttgtggatcctctaagtgccttgtcagattcactgcctcttgtggcttcattgcctattcaagttcaaccattttcatgctcttatctatttatttttacaattattatatcggttttaatatacaaacaatataataaaatattattattacctcccaaatgccagtgctggctaatatgacaaattcagtatcagaatcaactctctcaaccccaacaagaacctctgagcttttagactgcattgtattattgccagaatgacacgataacatcctcactacaatacaaacaaaccaaattagttacagtatgatcaaaatggtcaatcaatgaaaattaaaaattgttttttacctgaaagaaatctaccagaccaatgtggtttaggggatgaaaaatgcttgtgttgaggattcatataacgagccacaccatttttacaaaccacagctttgtactctccaatattacctattacaagcttatcaccattgattaccatcactgaaactgaccctgcttttgctctctcttctgttttctgaatagtctctctcatctttcctctaacacccatatatgctttcttcattgtctctttgcttcttctccttatctacacaaccacataaaaaagatgacatatttataacaaaagacaaagaaaaagatgagatttttacaaatctaatatagtgacaataatttgattcttttgaacaagttacaaatttacatacttcttttggctttttgtccataaaatgtgattgaatgtagttgttgactccatcaccaatcttagcatcggagattccgaagaaccaaacctcaagttgatcaaactgttctctttgtaccaccactgagtcagcctctgactcgtccgagccaactctgatagattgagtagactcaaccacatggtagccatgtgagattggtgtcatccatgatggcttacatattcttacctctcttttcttcttcttcttcttattcacttctcccaatggcaatcttttcagcctaaaaccctgctcatatatattatgactctgtaaatccaataaggaagatgaaaatgaaataaagatcaaaactttattataccttgagcttgaaaggaagatccttgagagccatgattaataaaaatatgatctttttttttagttaaagtacatacaaaactttctttgatattaatctttggtttttgtttattaagtagaagaaaaatattaagagtgaactatctatctggctataatactatttctggtttaatagcattaattaaggaaatttagtaggcttaaatatctcttagaaaatataaatctgtaacagtcttttttttttttttctaaaataatatatatatttttttgttgaaataataataagataatgtaataaaactaatttttccttttcaattaattttaccatttatttagtttatttatagtgtgatcaaaccaaaattacatgttaataatggggttattttgtttttgagaaattatatataactcaaatcgataataaaataatttaactttttttagtcatagagtttgaattaaaataatataactttttcattggtggaattttacttaacaagaaagtgcatcattaaaaataaaaaaataataataaaggcatgataaatggcagaaaagatggtggtaagttggtcatgaccgttgatttaaaagacacaatacttttccaaattcctaagttttattatatgataatataataagctttgactatttaaattaaaagctttggaaatgattgtttaatcaaataggtcaattgtgtgattataattttaagtaaatggccagcaacatgttagttatcactatattatgagcattgctattagcgcgtacctactaactataggtgacatcttaccattaattattaatatttattttttaaaaaaatatattttttaagttatatgagactcaatacttaaatatatctaaaacggtatgacattacggaagatgataggcaccaagatgttaacatttctcatacattatatatacaaatgcaaatttatcaattactcaactttataacaaattagcttgtatcaatttatttggtaagtaacaatatgtgcctctcacaaaaaaaaaaaaaaatgcgtaaatattagagacaataataacatcaagatagcaaatcatataattgacataatttgggtacgtataattcagagtctgagcagtgaaaatgaatattgtttgtgatgagtgggtcccaattgatgttctttggaggaggtgatcgtaatattcgagtttctgagttagttttagaatagacattatgagatgttgtatcactgatttaccactttcctgtacatctggttcagaccagcaaagcaacccaataattccagggtactgaaacagtttctagttcaaactcacagaatcgatggtgggattgtctttgctctctcaaagtcccttccattgatatactatgacacttataagaatgcccattctttgtgctccttcaatacagacaatagcaatacaagactgaaactcaaaaagaaattatcacaaatctatattgtattttacttctttttccttttgcaccataaactttgatgattacccaaaccattacttaatttgtaacatattacaagagaagaagaataatatatggtttgtttatgatagaaataaattattaaatatgtaaaataaaaattaaaatattagaattaaattgtaaaagatgtaaattaaagtggttggagagagagagaatgaagaagagccacaaagttttgatgagaaaaccgtttttggcgcgcattcactaaaaagcagttggtttggaatttaccacctttacctattattcacttttttctttctttcatttcatttctatacctttttttttcttcttctaaccatattctttctcactttcatttcatccttttgatttttgtttttttgattgaccggccaccggtaccatcctcaaaaaacactaagccggaccggccgtcaaaaccaaacaaaacaaaacaaaaccattttcacatctttattatgttatgttataaggacataaatgcagccatcatcatcatcatctcaatttcttcttcttcttctacttcttattcttattcttgttaaagtttcacactctcacaattgcctcttattttcaaaagggcattttttgtttgtttatttttgtgtcaattgaagctaataaataaacaaaacaaaagaaagaaaaatgactaccaaggtgaaaggcttattgaaaggcctaagatacatttctcagatatttggtaagtacaattcattcattcattgtctgtttaaaccaaaatttgttgggctttttcattaatgatgaaaaaacatgacagatgagaaagaagaggaaatacaaattggatttcctactgatgtaaaacatgttgctcacattggttgggatggaccttcttcaaataatggccccagttgggtatgtcttcttaatctaattttttcattcctttggaaatgatattgaagtatgaggtaaccaatgcaatgcaatggtgttttaattataaataaaaacaatgtgaattcattacagatgagtgagtttaggacccctacagaagtgtcatcaggaccattagaacctattattacccaacaacaaggtataatttgattaattattgatttggaattatgtcaatgagttgtaacaaattgtttgataaaatgtattgatttgatttgatgaagaccctttaacacaaaatgaaaatacaaaatcaaggcgccaccattcgagcaatttaggtggctctttggaagcagctactaattctccaaccaagagaggttcttcttccgaggggaagcattcaaggcgcaggcgttccacaacagacgcgtctgctacctcccatgctcgcggtggaagtggtgattcctctggcagttcgcgccattcttctaggcgctctcataagtctaatctttcatcagtggactcagctgctcaacaccaacctgctatacccaaaagctctcgtaggaagaagggttcatcatctacagaaggaagctccacaagatcaaaaggacatcattcctcatccatgacagatactcaatactctgatcttggaacagactctgaaacaggcctaattgaattgaacaacaacaatgaacaacaacaaca

SEQ ID NO: 185383 - DNA, 4516 bp, Cannabis indica
gtagagagagagagagagagagagagagagagagagagagagagagagagagagagagaaaatagggtctttctttctttctgatccgttttcttggtctttgctcggttttcgaggctgctttcgtatatttttagagagagagtgagaaaaggcgaaatgggttttcgtggaaatagacagatacatagatagagagtctgtgggttggttgtggaatgtggaagaagttttagagtgagagatgttggcgatggagaaggattttgatgctaagttgaggattcaggggaattcttctaatggaggtggtgctggtagtgttggtggcagtgttcagagatccaaaagttttgcattcagggctccccaggagaatttcagcattcaggactttgaattgggaaagatctatggcgttggttcctactccaaggtatgagattttgagttttttcagcttttatcaaattaatcatgtaatgctagctttaattttatttattttctttcctttaagggaatgtaaatagtcaagctcactatttacgtttatgccttgatcatttaatcgatcatataaggcctgatgagaaaattgcttctttttgtcctatctttggctctctggtgccaaatttttttattggtttcctaagactttctgatataagatataatcagtaaaactagagaatcctagaagttaggctgagtttgttgttgtctaaacgtatggattttgtacattgaatggacaaactcagggttatggccgagcttccagtttctagtgttatgggcatcagtctattgatcgtaaaattctatgagagctcaaaactgaccagctgctatatcctagggtagcctcgtttttatatgtagaaattaaatgaatatagcaaattggttggtgatttttttagtttttgaaataaacatgtgttctgtttctgtacctgattcatcgaaacctcttcatgtatttagcttgttagaagaaactaattttctatatgaatttctctggaataaatttttatcaaaagttcaaaaccgatgattctatgactacttttatgggggagcatctcttatttgagctatgtatgtagtagcttcttttcaacatttaactcacactcactagttgatacatgaaaattttgcattgctaatttttttgcagtttttgaaactgttgcttacattatatggagttcatatatgcatcttgtttttggttaatgtattaccaggttgtgcgggccaagaagaaggacacgggaattgtttatgcattgaagataatggataaaaaattcatcacaaaagaaaataaaaccgcttatgtaaagttggaacgtattgttcttgatcaattggatcatcctggcatcgtacggctattttttacttttcaagataccttttcactatgtaggtagtttttggcaatttgttgaatgtttatgtctttcagttcccacttctttgtataagtacattgcttgttttatattttaataatctagatctagttatgtgttagtcatgtttcacattttgtatggtttacctttcttattctcatttagcatttgcctctgatttttctgcagacatggcacttgaatcttgtgaaggtggagagctttttgatcaaataaccagggtaagttgagaatagaaaccaatatattttgtgctattttttgtcattattgatttacggcttcctcgcatttcattttccattttctaatcaagtggtattgtttatcatttaactaaatatcatttcatttcatttaaaaatgaagaaagaagaagagtcaaagaagcatttcaattcctttatatatcatttaactaaatattttacacatactttcatgaattttctaatgatttttggtatcttattacttattttcagtagcattgtgccattttagctttttgctgttccccacccagttttcaatttctttttttaatcatgtgcagaaagttcgtttgtctgaagatgaagcccgattttatgcagcagaagttgtagatgcacttgaatacatacatggaatggggctgattcatcgagatataaaggtatattttcctgaatgctcacctgatttcagtacgtaaagcatgagattattctggttaccatttctgaaaattccttgaatgcagcctgagaatttgctacttacaatggatggtcatatcaaaattgctgattttgggagtgtaaagcctatgcaagatagcctaattacagtccttcctaacgcgtcatcaggtactgtatatatatcatatatgatgctataacacagaaagtgtatgttttaccaattatgtggaaaatttgctcattgggcgccattttcagatgataaggcctgcacatttgtggggacagctgcatacgtccctcccgaagtcttgaattcttctcctgcaacttttgggtacgaaaatatttgtgtaatacttgtagtgtttgagcaagcagttggctattgctctccaaatttatgtcaattatgtgtcagcagtatgatatattttttttccactacagtaatgacctctgggcacttggatgcaccttgtaccaaatgctttcaggaacttctcctttcaaagatgccagtgaatggcttatttttcaaagaattatagcccgggatataaggtttccagatattttctctgaggaagctaaagacctcattgaccgattgctggtaagctgcttcctacccttaatattgtcttcattcgaaatagctacggttttaatgagggtatttttttccttcttaacaaaattatttttcctgttttggaggtttccaaatttctgtatttttgacttcaaatgcatttaccaaatgcaggatttagatcctagcaggagaccaggtgctggacctggtggttatgcaacactcaagaggcatccattctttaaaggaatcgactggaaaaatataagacagcaaatccctccaaaaattgctttagaggtagcattatgcttttattgttgtttgatcttgggaaaaagggacagaatcctactaagaataaacttacgaacgagttacatttttttttttgttttaggctcaatctggtgagagtgatgattgccatgattcttcatggaacccttcacacattggtgattgcggagcaagacaaattgagggaaatgctggtgccacgtcgtcctctgagggatccagtcacattactagacttgcttccatcgattcatttgattcgaaatggtacagctccacctattttgcatcacaagaaaatatttctttcttgctgctctctatagtcggtatcaattacatacaagtgattgtcaacttctatctctcttttttctagcatatccctgtgtctacatgtatgatataagatttgggagttgctattgtggcttagacccgcggtgaatatctaataaaacttttctcatgttcacaggcagcaattccttgaacctggggaatctgttattatgatatcaatggtaaagaaaatgcagaaactatcaagcaagaaggtgcagcttatccttaccaacaagccaaagttgatttatgttgatccctcaaaactcatagtgaagggaaatattatatggtctgataaccccaatgacctcaacatccaagtattaagcccttccaatttcaagatttgtacggtatgactaccttgcatcattatcttccaaggaaaaacacaccaattattgctgcatttcctacattatctccttagtatgttaattctgttatatcgtgttgtgtgatgttttcagcccaagaaggtgttatcatttgaggatgctaaacaaagagcgtggcaatggaagaaagcaatcgagggactacaaaaccggtgaaatctgatcctgcttttgacaatctcattctttgcataaattattatattgtagaggaacttggggaattcttttcaagacagttgattaccccaaaccattatttattaaatgaaatattggaaattgcaagagaaagcttctctcaaggtgcataggtactgcagagtgcacagcaatttctttaactatctattccctttcaggggcttcttctatatgacaattttgtagaatttcatagggtcttctgtgagaaaagggggtagatgggctttgttttatttttattttctttacttgttttaaattattggcccctatgaaagttttgttcaacattgaacattccaaaaaatatacatacacatatggcagtcttggcagatttacattgggactcttcttatatggatgattgattgtacagtttgcaaattatggaaagttgctaaaaatcatttatatatttcaacctatgtcaagggtacgttacactggtccttaaatacaaagctggtcaattatgttttgagggaccatagctgatgtttatctattgaaacttta

SEQ ID NO: 185384 - DNA, 1907 bp, Cannabis indica
ttctttattttggaaagagaaatatataaaatctgttaggagatgtatatttaattgaagtgaagcattttaattgaattgggataagagcattttaatagaattgggataagaagatagggaaaattgtgacaaaagatttgactcctcttagtaatgcatcgttataatatctttcttattaaaaatcgtgttcatattaatcttacttttggtaattacttttgtcttttcaagtagtttcgttcgtgtacttagaaacaaaaatcaagtaatgagttaactactcattgtaaatacaatgataagtgattcattcaactatacattctttacattgcaaagaattaattgttgatttttctcatgataaaattgtaataccgtgttctttatcatcaatttaatactgtgtaggccaaatataaattgtaacatccaaaaaaattaaataagagaaaaattaatataatatcaaaaaagaaataataatccttcatcccaaaaatatttatccgcaatctgtgttagtatccctgctgcagttgctcccgtgacccttgcccccaatctcaccacaaaaccttcttcaacacccattactgtccctaacagctcctatcccactgagacctgttccataccttctaatcccattattgtccccacagtcgttacttcctcatccaaaggtaaagctcccatgtaccctgaagtccctaggaatctatctatcaaaccccaaccaactcagttaagagctcccacaagcactgccaccaccaagaagagatcctacacctgtcgtaactgtcaggtgggctcttctgttaggagcatgctgaagtgagcccgtgcctcaaattctaattttgttgtggtgccttccatgtctgatactgatgaataggcaagtgttgctccgcaaccccgcccaaaaaaatgagcatcataagctggaatgctcatggtttagggagttcccgagcattccataatttctcaatcctaaccaagcatcatcaacctcagatcttttttgcatggaaactaagttagctgctaactccaatttttgaactaaggctaggtaattttttgataatgtcttttaggtgctaagaaatggtttagggggtggtttgtttcttttttcggaatgatgccgtgaatatccatattttgtcttactctttgtatcatatcgattgtaatgtttccattaatagcaatataaactatcacttgtcttattactatggttctccttatattcatgataaaactacttcttggacccttttggatcatttgttcgatgttgaccctttaaacccttggatgattttggggtatttcaatgactatatgggctataatgatcgtaatagtaattgtttaccccctgcccatgctatcaataattttcagcactttgtttccaagtataatctttcaccgctgccttttactggtagctgattcacatggaaacatggcactcttcttgagtttatggtttccgatcatagggccatcaaacttattacacgatggtaatcctcctttcaagaaaagcacctcacgattccatttttgagaatcattggctcactgagcctaatttttgtaacttggtctggaattcttgggtggatgataggaaccatatcaattccacctctccccttgacattttttttgaattagaaaaaattactgcattaacaacatgatctcttgggggaaagagaaaaacaaatttcaagaacagtataaagactatacaattgagcattgataaaatttactcccaatcccccatatcttcaaatgatgtcattgctgccaacgaactccaagcttctctagataaactctcatttaaggaagaaattttttggaag

SEQ ID NO: 185385 - DNA, 3039 bp, Cannabis indica
atctatctgaaaggtgctgatttttgggattatgagttgagaggggatgtaagttggtattggaggaaactttgtcatttgagaaatcatttcagcaagcctatggtgactgcagctgttaggaaaggtaaatatgttgctgctagattgtatatgggaactataactctgaatattgatagctattacaaatctatatggtgtaattttgctctgcccaagcatagattcatcttatggcaggtggttcatggacacttgctaactagagacaattttcataagtttcacatcaatttagtctctactctctgtccagtttgtgggagcaggagagccaccatcatctttttttctcttgttgtgtctctagggaggtggtgaagaggatttttgattggtgtggtgttgctgcctggtcggactacaataggtggcgttgttggttatctagcaagatttctggtgtggttaacttgctcttcgctgccactgtttatatgatttggaaaaataggaatttttgtgtgcataatagtagttgtttaactatattgaagattgtaaatgaggttaaagaattagttaaatacaggttgtatagtttaaagaataggaagttttttcaagctgaaagagccatgtttttacgccttctgttgtaggggctgcttgttgtagctgggttgtggttggggctggtaagttgtggcctagttgtagcttgtttgttctttgattaatgaatttttccagttagtcaaaaaaaataaatgcattagatattggatccaacaataatttaaaattcaaattacaaatctccaacggtcctctagctagcaagttttttttttcctgaacgaccggtggagatctagcgtccaagttcaacttcaaccacaccagtatgaatctggtgatcgagtgcatatcttgattagcacattaggaaatcatttatgtggaattttaccagtgtttagactagaatcttaaatgtagtcttgcttgagaacataaagagataataagctttaatgtattactcaaaacaaacgagttcttaaattacaaagaaaaatgtatcataacaaaattttggttctctaattcaggttcaaggcacgcttagtatttcaccagaacattctcaaacccctagacgagcaataccgcatttacacatccgtcgttctctggattgtttgtcacctgagcgtatttccctacatccaaacacaagcgagcaagaaaagaaaacagaaaatgattaaggtttacatggaaacgaaaagagtgataatctcaattatataggaatcttaccccatacaacttttcctgctggagttactaaaccaagctcactgacattcacctgaaattcacagaacaagcaaaacaagattaaaaacaacactagtggcacaaacattctgctagagataaacgtttggctactgaagatggtacctccacaatggtaccccttgttaagacaccaagagaggtgtacatttgcccattgggatttttctttactgcaattatttcgagattgaatgtgcattttagttcagggtgagttacatgagcctttgtgaatcgaagtccactaggacgaataaaccgctcatactttggaggcttccttgtaaaactaggtcccacaaatgtggcttttgtaatcatcctcttccattgtttagctattaaaaaaatacacaattggggaatgttaatgaagtgacaatagtcataacaaaaaaaaaatggaaatagactactacaatgaaaaaccaaaagtttatgaaaaatgttttgtggcatacacaaagatgatatcagacaaaagtttactattatacttactcttgcgttttccagttctgagcactttgaacatctcatcttcagccacaggccttacctaaagaatggaggaattgcagccaaaaccaaatgattaatatatcaagttaaacaagagcctaatggatgttaggcccagaaagaaaagaaaaaacaacattagttattctcgcacacggaaaacctaatggtaatgcaacatttgaccttaccttaggtagagggacctcccacttcccagctttctcttttctcttctgcttaatggtgttgctaagaacctattttaagacataaagttagatccgtacaaaaaacaaatatatataatttttttcttattccaaaaataggagaagaaacataccttggctcgggttgtgttttcacgatccagcaaatatgaaggaacagctccctcatgaacatcatcatccaccttccgcctgcttgttgactcctcgtgcatagccaatctgatcacacccacacaagcttaagtataatcagattcaattacaattaaaatgttaaaaaataccaataaagataatacactacataatacaacttcccaatgattcattcaccaattccattctcaacaaataatacaaatcctttgtccaaaaaatacaagcttggtaacagttttcattaaaataatttgtttcaaaaggggtcatgaaattcttccatgcatcatttcatttataaaacatgaattttctcaaacacctttaaaaacaaagatctaagcaattccatcacttttctttcagaatttacaattgaacggattatcaaacaatagcaaagtgcatctaataaaatgtaaccaattaacaaatgagatagaaagctcacgttcttttcatctgagccttttcagcataacgcttcttagcgaacatcttacccttaatacccaatgcctgttccataaaattccagaattaacaacgaaaatcaataaattcatgaggaagaaagtttgttgaaatgaactgaaaaaaaggaaaaaccttctgggcaatggaagagcgtttgtggacttcacgcgcctccttcttgcgcttgcgctcgaagtgatcgggacggtagccataacgcttcctgtgaagctcaatgtaatctccctgaggctgaaattttcacaaacaa

SEQ ID NO: 185386 - DNA, 3093 bp, Cannabis indica
aaaaaaaaattataagaatatggttgtacaaattttaacatttttatgattttatttacagaaaatatggtcttttaatatttttatgttgtacttttgttattttgttattaattttttgttatttctatattatttttatgttattatgatgttatttaaatgttattctttatttagtttttttattatttttgtgtgatttgtatagaacattgtaaaaatgtgaaaagtatatatatataatatttgaacataaaagtaaaaaaatttaccaatattttgtgtaaatttctcatatctcaatatctcattttatttaatttctaaaaaaacaaaagaaatatattgtcattttattataaattgatatatacattgtacatcaaaataatatatcaccttaatttaccaaatattaaatattatcttttcaaaataaggatatatataatgataatttaagagtatttaataactctgtttaaattaatatttgctaaatttaatccttaaaataaataagtaattaagataattacctggcacgtaaggcattagacaaacgatcccaaaattgaagaatgtgatggccaggcaaatctgaaccagtttctaacccattgacacaaaccaaatgcccaaacccattggaatgaaacacaccatgcatcacatgcccttttgattccacaaaaatgttggacttattataattccctgagtccatcaccacttgatttttattatgatgatgactactaccaccgctaccgccactgtcaccgcctttgctgttcaaacaagccgccaccatcgattctttcgaaggcaacacaaaatggtacttcttattgcaaatcatgtggtttccccaacctgatcataatgaaagttactacaaaatgtaagctaataattaatcacaacaatactatttacactctatacaaacataataatatttttcgctactacaaaatagacttttttgtatcgaagaagaaaatgtaccacaagacagttttgttgtacattagttagaaaatgaatacactttgtcaatattttcaagaaaaagtttatttgatggattaaaagagattggttgtaaaattttacgacacaaataaacgcctttaaaaaaaattgtataagaagatcgaaaaaaaaataaatttattttgtgcactagggacactttgttaatatttttttgaaatgcgtcggaaaaaaaaattatctagggcattaagagagagtgtttgtttgtgaactttaccaacgtattgacattggttgcaactacggtcaacaatactatttgaagcatcattaataggctcttctacgacgaagagaagaacatgaagaggagggtggcgatgaatttctagctgaaaagaccaacacggcatgcctgtcgtgcacaaattactctccaaatgcccaaattcaagcaacgctttcacattttctctaaaacaccctacgaattcgaccgggtaaccattctccccaaagttcttgaacctaaaaaccctctctcctctttttctcttcttgcaaccactcaagtccaaatgagatgatgacatagtacctaattgagatatgatgatgatcaagaaagaaagatggtttggttgagtagtgcttatatatatacatagaagaaatataaaatggaaagtaaagaaaaaacaaaataatgatcctccaagcttgttagggaataagaacaaaaaataaataaaaataaaaaagaccaacacatatgtagtactacttgttttgtttttagtttctttttttgatcacacacatattgtggtaagaaaaaaataaaaaaaattgggatgagacccaaaatagggttttattataatcaagggtaaggtgagtttttgcatgatttgattcaaaaatgagatgaaatgcaaatctttcgcggtggcataagcaatgagttgtgttttttggagtaaattattgaaccatgcaatgcaaccattggattggggtttgggctccgccaatttctatggtcacacctccaatttgcttctgtttttatcttataaaccaataataaacttattagaacgcaacaaaccttgcccaactaactcttctctcttaataattctataattattaacacattattttctcttttaaaattcaactaaaccttcttataagtcatgtcatcacttaatataacactacatgttttttgttcttttctttagtttgctatttgggaggtttacttggaaggtaacacaattacacacacacataaagattgaacaatgttctccacgtatgctatgactaattttgtagaatagtaatgcaattcgaacattagttttggccttttgcttttactagctgatttgtattgcatgcatgtgtaatgtgcatatttttttttttattaatcatatgtgaaactggagaaatttgagaaattatgcatgatctaaattataaaaagtaaaagtaaataatcttgtactatattaaattatagctgacatggtatgcgagtaatggaaactcgcccttaataaggcgggggtatggaagatatgaccagtggtgaactcaagatttaaagtgaggggagaggggacataatttttttttttgtaataaggctaatgctctttatgagaattgaaccattgatctctatcctatatgtaatctagtttaactattacactaattaaaactaatatcatatttataaatattatctttttattacaaatatatatgtcgtaattaactaaattgcatatatatatatattttcaaagagcgactgccacgtctcgcctacatgtgggtctacccctggatatccattgttttagggtcatgaacctcaagacataaccgacccctgtcccactctcgatcatttacatcctttctcacacattcgagttctagtaatcaaaagaacttttattttaatcaaactttttaaatgtatagggtatggagtcatggaaacccgcccttaataaggtggagatggaggacatgactcttgatttaggatcccaaccccaa

SEQ ID NO: 185387 - DNA, 4617 bp, Cannabis indica
tatagtatgagtgttgatgcattttgagcctagtttcacgataataaatctcacttgaactctgttacacattcagccccttcccctcactaatgaacattgctaaagcaacatacttgaggcaaatgttcttaaagtacctagaaaggattcaagctctttaatccttatggtaattcgggaacaagctagcaatccctctatgatacttatagattaactagttaagatttgtaagcaccatgaaggaaccttggaaatattgacatgtggaagaagaatttgcaattcatatacttaacctaaggttaagaagtctaaaggtttaaagctgccgttggaacaaaagctttaaatatcctaaggaaacctattaaatggcctaacaaacaaaataaggcaaaaattaagcaagtcaagcatggcataaatagacataagcatgataaattatctcaaaatattacaaccctcgcggttaaggcataaatgtgtctgcaaaataaaagttaattaatgaataaaaaaagaagtaaaggataaagttatggctgagaaagatctttggattggcctggagggagatcttgaagttggtcttgtggaggatcttggagatcttgtgcaccattccctgaagagattataacttcttccgagtgctcatctctggattctttagctacgtcttctacgacatcaatgttgaaggtctatctgactcaatcgcctccacccttcgagtatattcctccccatctactctgagatgcctaagaactataagatcatttttccacagcatatggaaaagtatggagtgggccaacttcaaagatcgaaggcaaactttatctgcgtgagcttccacctcagtcttcaccctagcttccacttccgtaatgtgcttagcggtgtccattatgactttgccaatagtcatgttaatcttttgcatagcttccattggctagcgagaattcagattctttttgcaactgccttttagcactagtatgaagaacacactcctcctaggcgcatcgcaaggtgtcaacttgggaattgatctcgtcatgctttgtcttgagctcctcctttagcttctcgacatcagactggaaacctttaagcaccaattctttgaggttgatttggaactccaagctgctgatctctttaagtttctcaatgttggtgttgttcttgataaactctcgagcttcagccttgtctctttcatcttttatatggcggagctctttggtgagggatgttatctaagagtttaagcagtcatgctcatccgtatgctcttgatcatccttagccttatgatcgaggtacatctgatgatattttttgtaggcctccaggaatgccttttggcgataatccgcgacctcacccttaatgtgattaatatcagcttcagcgtttgtttggaccctcgccatcatagcctatacctttgccttgatcctttccaccttagtagtggcctcagtcttagtcctttcaagtttagaggatagagcttgtttctcttcagataaagaccagttcctatattgaacccggtcaagctccacaaccacgactcctacctctttggaagtcatctcaatgatcaaagccatctagcacaaggaaagatgtaagacaataatgcaatataataacaaaagaagtggcaccacaagaaccaaaattatgctcaccctgccacctattgcttagctgcttaagccagcataaaagggtcagtgctgttagagactacccaattctcaaaagttagttcacacacaatgtttctcacttggtccagaagctttgcagcaaagggagccaagtctatccgaaccttaggtaccatttatttcccaaatgccacgaaatcaatcactggtccaagaatggcagtacgtacccctctgttatcttagcctttttagggaagaaaggaaatcaaccctcttttgaagcgttatccactccttcccatggcacctccaaagagaccactctacatcttttacttttttttagaatttcagtgcttagagcagtgggcttcaacgacagcctaaattttaaggttagaatcttagacaaagcagttaagggcctaaagccctggctactagcttgatgaagttggatttcccttccacggttagggctagtatggctgaatggattttgacagggttggctggagaaccttaggttggttatgcagtgtcgacttgggtagttattgttgtagtttttcttggtttagtggttgaagttgttgttgttgttgggtttgtcgttgttgaggtggttgttgttgtgtctgttattgttgtctttattgttgttgttgttgggattgttgttgttattgtgatgatgatggtggtggtgttatttttcttggatcttgttgacgaggggtgataaatcctcggaagtttccttctcctcttggagaccgctacctctccaaagtcagtatagctttcttggctttcctcacaaattggtgaggaaggttggaacatttagcagctgcagcaataaccttctttgtaaagaccaaaccgtccaaactgccattaaacacggtaacagtctccacaaccctttgggttatctcctcaaaagaaatcatggataaagcctttctcgaagctggctgttgggattggcccacttgcaccattttcctaccaggggctactaggtcttaggaagcctcccctattgtaaccttggttttctctaccccagtaggaggctggagacctggagcctttgccggaggaggtgctttgtgggtccctaaaaaagaagtggaactaggaagcctgggcttgcgggacttgttggccttgactttggcattccctttccctttgtctccctccgtcttagccactgtcttgggaatcctatccatcactgaactcattatatttattctggagtttttgcaacacgacaatcaacaacacaattagaaaatagccttctaatatcaaattaaacaaatattagcatgtgacagcataagctgaaggtgttatggtgggtacaaccattcagtgagcaatcatatggttctccctgagcaaagaaggttatgtcctcccgtccaataaaacttttgtactctttgaagtctaggaaggacatggtcgagagtaggtccactctaattgcatctggagacattcctaggttatttgaattcctaacgatctcatctaccctattgatgtatgatttcatgggatactttagagtgtctagacctaaaaagtaactatcaaaccccccttggtctttctgagacatgcgatagagactagaggtgcaaaacacatggaagggcctgttacctcttctagacgtgttggctccagggacaccttcatctgggcatgctgtagcaaacctctccatgatttcctcctcttctgacagagggttggggtggcggagtgcccagtcagcttccaagagcttatcttccttgacaacttcacttattatcttggaaatctcgagggctatttgttctttagcttctttggaagcttggctttggcccctacctctcactttgtcaatactttgaaagccaactatcaatccatgttcgtggaacaatttggtggtgaccaagccttcaacttttagctcctcgatatagaagggcttgtactgagctactttcttcttcagttgctcaattttagggctttgaggaactggctctactagagataagataataaaagtctggttaataatcaactcagaaagtttacaaataaagaacaaaaaaataacaaataataataagagtgcttatctagggttttgaaggccaaaggaagggtgggcaccctcttcactaggaagccagtgtaaaagaaccaatactcccgaagatttggagaacgtagagtatggctagtggggcaatacgcgcctgaatacttctcaagcttgtaaaaccctcttcattttcatgatttcatcaaaggcatccaaatgatattttgggtcgatgattccttcgtatggaagtatattaggctctttgaaattgggggtagttatttggattggatttctcttggaaaggtgactcatcgtcaaaatcatcctcgtcccagctaccttcctctgacgcaactgaggctattcttcagtggaggtcttccatttccttgtcaagctctttcctcctcttgtttagcttttctcgagagtcctgcggtgcatgatttggaccttccttgcagtgatgcattgtcacctatggcactcgctgctcgacagtagttttttggttgagtttttctctcaaatcacctgggaccacctttgagtcaattttcttctcttacaatgagggctatgggttttttcaagactgcaccttcaatggcaaggattctggaatgttactagttgtgtttttagacattccttccttctctaactcacctataccttttttctttacctctggctcccttttcatgaataggggcactttaaagcatccttttaagagtttatctagctctttttgcatatttacaacagtctcct

SEQ ID NO: 185388 - DNA, 4849 bp, Cannabis indica
tcaaatcaggtaatatatatataacttttccatttcttgaatttgtttttgttgtttatttagggtctgttgtttcgatttttcatagggatttgaattttttgatctatatatatttaatctgtgagttgttgttgttttgtttggcatctgagaaaattttgttttgtggatatggataacataactgtttgggggaactgagttagataatgatcttgaattggttatggatgaggtttattttgaatctttttttttttgattgattttgtttttgtttttttgtgatttttttttagattttctttgttgtaaagaatatgagttctaatgttcgaagtgagcggagggataagcctaggtcaacagctcaggcttctgctaggcgagaatgggttcctagaggtgctcctatggtgactgtggtgaatcagccttcttccaattcaacggagaatgttaatgattcaatccttagttcccatggtcggttcaaggcaaatagtagttctaatttgaactcgggagaaaatggaaatggtggtgttcctactcatggtggttcttcagcttcgcatggtcatagtcgatacagagggaataatagctcacattcgaactcagccgaaaatggaaatgacagtgtttcagcttcacatagtcatgggcgatacagagggtataatagctcacattcaaactcagctgaaagtggaaatgatagtgtttcagcttcgtatagtcataatcgatacagagggaataatagttcacattcgaactcgggagaacatggtcacggtgctgatccggggggccatagttatcagtacagggggaatgctaatttgcatttgaactcaacagaaaatggaaatggtggtgattcgagccatagctctgcagtgtcttatggtcagtacaaggggaatagtaatttccattcgaacccggctgccaatgggattggtgttgattctactaatagctttgcagcgtctcatggtcggtacaagggtaattatagttcgaagggtcaagtgagtcgaccagtcaatcataggagggagcagcaggaaagaggtagcgagtctaatgaattagagtcgagagaaaagagtacaggcaagaatggaaggttctcaaaggactctactttaccacagcttgtgcaagagattcaagagaagcttatgaagggagcagttgaatgtatgatttgctatgacatggttagaagatctgcccctgtttggtcttgtggcagctgttattcgatttttcatttgaattgtatcaagaaatgggcaagagcgcctacctccgttgatttatctgtggacaatcatggatttaattggcggtgtcccggatgtcagtctgtgcagctcacatcctcaaaagagattcgatatgtttgtttttgtggtaagaggacagacccaccttcagacttatatttgacaccccattcatgtggggaaccttgcgggaagccactcgagagagatgttggtcgtggaggaagtaaggaagatcattgccctcatgtttgtgtgttgcagtgccaccctggtccatgtcctccttgtaaagcatttgccccgcctcgtatatgctcgtgtggcaagaaaatcattaccacaagatgctctgatcgcaagtccggtcttacttgtggtcagcgctgtgaaaagcttcttagttgtggtcgacacaggtgtgagcagatgtgtcatgtcggtccttgtgatcaatgtgaagtagaggttaatgctgcctgtttctgtaagaaaaaagtggaggctgttctttgtgcagacatgactgtgaagggagcggtgaaagcagaagatggagtcttttcgtgtaattctctttgcgaaaagaagctaaactgtggtaaccatttctgtggcgaaatttgtcatccaggcacttgtggagagtgtgagttattaccaagcaagaccaagacatgccattgtgggaaaacagttttgaaggaggaacgaaatagttgcttagacccgattccaacctgttcgaaaatatgccagaagctccttccatgtaagaagcattcctgtgaagaggtgtgccatgctggtgattgtccgccttgtttggttaaagtctcacaaaaatgccgttgcacctcaacttctcgaattgtggaatgttataaaacaacttcagacgaaaatttcagttgtgacagaacctgtgggcgtaaaaaaagctgtggaagacaccgttgcaatgagcgatgctgtcctctttctaattcgagcagcagtcacacaggagaatgggatccacacttttgttcaatgtcatgtggtaagaagctaagatgtggacaacatgcttgtgaatctctctgtcatagtggtcactgtcctccatgtctcgaaaccatatttaccgatttaatttgcgcttgtggaagaacttcaatacctcctccattaccttgcggaacacctcccccgtcttgtcaactcccatgttcagtacctcagccttgtggccattcagcttctcacagctgccacttcggagactgccctccttgctcggtgcctgtagcgaaggagtgtatcggtgggcatgtggttttgaggaacattccttgtggttcaaaggacattagatgtaacaagctctgtggtaagaccaggcaatgcggtatgcacgcctgcggcagaatctgtcacttacctccttgtgattctcagatggggtctgaacccggtttaagatcttcttgtgggcaaacatgtggtgcaccgaggagagattgtagacatacatgtaccgcgccttgtcacccgtcctctctttgtcccgatacacggtgtgattttcccgtgacgattacttgcttatgtggccgtatatcagcaagtgttccttgtgatgccggcggtaacagtggtaactataacgccgatactgtttacgaagcttcggttttgcagaaattgccggctcaacttcaacctgtagaagctactaacaataacaagataccacttggacagaggaagcttatgtgtgatgatgaatgtgctaagttggagcgcaaacgggttcttgcagatgctttcgatatagcgtctcccaacttggatgcccttcatttcggcgagaattcctctgtttccgagttattgggagacctctataggcgagatcccaaatgggtgatttctgtagaggaaagatgcaaatatttagttcttggcaagaacagaggaagttcgagcggtcttaaggttcatgtattctctccaatgctgaaggagaagagagacgctgttcgggtaatcgctgaaagatggaagcttgctgtaaacgcagccggttgggaaccgaaacgcttcatcgtagttcatgtaacgcctaaatcgaaagttccacctcgtattctcggcgttaagggcaccacaaccgtcagtgcacctcagccacctgcattcgatcccttagtagacatggatcccagacttgttgtttcgttccaagatttgcctagagatgcagatatcagtgcattggttttgagattcggcggagaatgtgagcttgtgtggttaaatgacaagaatgcattggctgttttccatgatcctgctcgtgcagcaactgctatgaggagattagatcacggatcggtatacaacggagccgttacgtttcacgcgacgacttcaggtgcttcttccggttcaaattcgggaacaaatgcttggggcggaggagcagggatggtgtcgaaaagtaatccatggaagaaagcaattgttcaggaagatacatggggcggcgacgagtggtcaacgagcggctcggccgatgttcaaccgtctgcgtggaagaaagaaactccactcgcagcgtcgataaaccgatggagcgttctagatagtgaaaatgcaaccacttcatcgtcgtcattgtcgtcgtcattatcgaaatcttttgccggaacaaaaaaagcgttagttggtggtttgcattcgagtttagaaaacgtgccaactccggcagcagcgccgcttgtcgggaacgttaccgaaaccgagacatcggaagtggctgaggattgggagaaggcttatgatagtagcatagaagaagaaaaatagagtggaaaaaagtttggtatgttttgaatttgaataatatttttgtttttgttgttttgatatgttttggccttttatttgtgccatatatttttacctaatattatattttttaaggttggttgattaatgttgtattaatattaaatattaatctgcctttcattttgcttttatggcaagttcttaattattactatttattttaatgttgttgctatatttgaagaacattctattgtataaattgtcttatttaacaggttgggaattttggaggaccagctaagttttttaatttattaattataattatttaggtgaacgttttgtaatatttctatttttttttaattataaaaatataagtaaaattttgtatttttattttttttaattataaaaatatatgtaaaattttgtttttaaaaataaatacgtgttctgtaactatttttattttttaattttaaaaataaaaaatataagtatattttataaatttatttttattttcatttgttatttatgcaagtgaggtttgggtttgaggctgagatcgagaattgagtgtccggggtcggagtctatattgattaagaaaaaaaaattgttaaaaaaaaattttgaaagtgatttctttattctcaattaaaaagtaaaaataggtttatagaatatgattttggaaa

SEQ ID NO: 185389 - DNA, 6275 bp, Cannabis indica
tgatgaaggaaagtagagaaataaaaaaataaacaagaccactggaggttagggtaaggggaagtagtgatgtggtaggagttatcttatgtgaacaaaataactttgtaaagaaaggtaaccgaaacgaactaggtcgtgtgagtgcttccttacgagagagagagagagagagagagtttgggctcttctctgtggatcctgatcgttccattacaggggactttttgtagtcccttctctttggtactaaacgacggagtcaatccctctcatcatctgaaccgttgatcgtcaatcattttgatcaaacggtagttaatcaacgacatttatatttattatatatgtcagaattaaatagtatttgctgtcactattttaaataatttaaaataaatatcaaaatcaaatagaaatgattgcgatactttaattagtcctaaattacatgatttacatctaaattaaagggatggatcttaccaaaaataacatatatattcacggtgcgttgtataaaaagttgttttttttttaatattttcactagaaaagtgaaaaatatttttattttttacttttgaaaattaagaatcaaaattttttatatatttttttgaaaaaaataaactaaccaacacattttgtatttttttagtttcaaaacaaaaactcaaaaatctaaaaaagaaaaatagcttaaaaaaacaaaaactcaaaaataaaaataattttaaatttttatgtttaaaataatcaaaaatcaatttttttttataagatgcatttatttttatttttttgtctttttttgaaaatagaattttattccagattaaacaaaaacaaaacccaatcggttaggaaaaacgaggatgcacaaatttcaccatgagatgaccaaataaacaataaatcacgtcgattgtaaaaagctcaaaatccacaataaaaaaaagaaggacaaacctcacaaagtatacacaaagctaacatcataaaagacacagggtgcaaaacataccattattacaaacaacctaaaagataaaacaaacaaagctaaaagatacacaacattgagttgtcccaaaccctcaaatatcaaacggaaggagccttagcaccagtcaaagcaagtcgaacaaagacaaatgaacgcaactacaaaactctgacaataaaacacacaatcggcctcccatatgggttcaaaatggcgaaggagataggataagagttgcacgtccctttagaaaatcccacgtgccccccccccccttaacatctccacaactacgtgagttcaagagagccttaatgcaccaaagctaagaaaccaaaaatgaaacacaatgaacaagccgagaaagaaaagaggaaaaaagtagcaccccgaactccatatgccagtgtgaaaggaccaccaccaaagctccacacccaaaccatcgagagaggaaaggacctctcagatccaccaccataagttctaagaaaatcacagctcacagtcatcgaagaccaccaccacttccaacaaccaccccatctgagatccaaaacccccacaaccagaactcgtgctctaataactcaaacacatgtccttattttttgtgttaaaggaattaaagctcaccatcgcacctaaccttcttgaccgccaacgcctacaactctgattcaaacgaccaccatctgcccaaaagaaccacgacccactgttggacaaacaagcactagtgcctctcagccaaggtaaaggggttcaaagagagagagattctttattctttatagtgaagctccacaaaacacatccttagtgtgtgatttttgtttacaagtattatgtgtgattaagtttagtgatttgagtattgagtgtatacattgtgtattatcattgttcaaaaaaaatacaaaatattagatgcaataagagtcatgtgatccataaggagaaagactgggtaagctatgtaatccagttcacttgagaaaagtcaagtgtgatgattctaagactatgtaggtatgtgttatgcccatatttcgagtagcaaatatgttcatgacacaataaaatacccggttgtgattatatcatgcaaacttatcaaaattcacccgcagtaagacaatatgagcacactatataataatatagtctattagcacaataaatatcaaaattatgattttacccttcgatgatcaaaattatgaaaatgcccctaattcataaatggggtcttaaatacaataattctcaaataattttatataactaattatataataatacaattactcaattataactaatccattttaaataaggttgttaatctattttctaatcccggaatattacaatgactctgataaggagcctgaaccttttcatctagacatacttaactcttacttctcaaggggattcaaaaatccccatgtgactccttatgatggaacgactaacccagtagcacatctgaacaatttcaacactataatgcgagcaaataatataaggaataatttatggtgtatcttgttcccgacttccttgacgggagcagcgagcgattagtttgataaatttaccaagcattcaataatctcatgggaacaactatcacgagatttcaaaaaaaaaattctcaacaataaaaagtaagaggtccgaagcttcgtcattgactaacataaaataacaacccgacgagtcgttgaaggcatttttaagtcacttcaacacagcggcatcaaaagtcaagaatctggatgatagttaccagtttactgctttacaggctgggatgactgtaggaggagaactatgggatgacatacaaggtttccccttaagaacaataaatgaggtcaatgatagggcattgatgtatgttcgaaaagaataggcttgttcagagctcaaactactgaagggtggctcggaaaacaaacccaactcgagtaatgaagaagctagcgctgcaacaataaatgtaaattcgagcaaggggaatgagccccaaggaaaaataaaagatgaatccaaaggtacagcagaagataagaagaaatagaaaaatcataaaaaaaaaaatatgtaccaatatactctgtttatgcaaaattgaatgaaattcaagaaaatatatttctcgcaaatgaaaatagggtcgccttccaaaagcccgaacccatgaggtacacgaggggtaaacgtgatcaaaacaaatactatcattttcacaaagacattgggcatacaaccaaagaataatgtcgtcaacttaagaacgagattgagagcctcattttttgaggttactttcgacaacatgtaagaaacagggggaatgaacaaaatccacccaacaaccacaactaaaatcagaatatccaaccaccacctactgatggggaggatattttggtaatttctagaggccccatcttccaggaaccagtagtaatgcaaactaagaagcaatatgtaaaacaagtaagaaatcaaaactcagcttttgcacctaaaatactcaagcgcacaaaaccctaggaacttcccattgttttcactgaggaggacgcattacatgttcagctcccacatactaatcctcttgtgataatagttcagctcgcaaataaaaggataaaatgggtattggtcgataatggcagctcaatcaatatactatataaagagacattaaaaaatgggattggaaaatattaaattaaaaccttgcatggtgaacttgtgtgaattcacaagggatagtgtcgcaagtttaagaataatagagcttccattaataatggaagaatcaccattgtcaataactcaaatgtaagagttcttggtgttagacatgccctaggtgtataacatgataatgggtcaccctgttgtgactggaatgcgagctataagctccataaaacatgtctttgacgtttccaactcagtccggaataggcactgttaaaggagatcaattaaatacaagacaatattattattggaacttattttactaggattttaatttactagcatgtatgtttgattatcacatagtaatctaacatcctaaaatatgaaaaatataagatcaagtaacacataatagtttaagattacttacaataagggtagtggaataatataagcccttccgttcagtagtctagccattgctcctttttgttgtagagtatcaccaagtattgaactcgaatcttcttttcctttaattagcaacatgtaacattctacacgatcttccacaaaggtctgagtgccatcttgaatagtgtgggctgacactcaacttacttagaaatctaatttgctaaaatcaatgagaaaagagagaagaagaatttgaaatccaagatgcatgaggattctgaatctagatttaaggaattcattatgattagaatattgataattatgtttatgtttgtaatcaactctctatgtgttttttatcttgtaatttttcgtttatttctagaatgtgtaattttgctgcccacaatgtggctaaagggccttcacccagaacattacaagtttcgtagagctatcctcgatacctagaactatcatttgtaatgaccgcgaggtctaatcttatttatatataacgctttggtttcaaaaaaaaaaatggaagagaagagaagagaaaaatgaaccaatgttattattctatttgtctctctgcctttatataggcacacactatgttgagattaaaatgtttatttaactaaaataataagataggttgttttaggtggctaaaattgaatctcactcaaaacctaattcaaattaccttaaatttaattactttcgtatcatatgtaattaaataaaaatcattatgttattattaattaataatataatataattatatatatcaaaaacaattcgtacataataacgaatttatatttattatattataattatatataatcttgattaattaatttaaataaataaaaaattaaacatattatatattacatttaaatctatatttaatttttaataaattataaacaaatataaattaaaattttaaatatagcaacttattaatttgacatcaatttctcacaattaacaataaagcatatatctctcatatattttcaatttagctcaaattagtaaaaaaaatttaaaatttgacacagtcaatttttaaattctaattgatttattaaatcaattaattaagtctacaagatgatattatcccagacaatatgagattatgaggaccatgggcctatataaccaagctcccaataagtagatctgaaatttacttattaattcctcctgacttcactatagatttgaaattgcactcttgattacatagaacgctatgtataccaaatataaatacgttatgattatctattattacaatctcaatagtcattgatcctatatggacggttcatatctagtaaggacaaattttactatttcaccctctaatatattttatccttaaaataattagctctttgtaaatgatatttgggaaaactaatataattatcgaaacgagtgttctatcatttatctcgtttagccaagctctaagaaaattatcgcttcacttctaaatagttatagaagttatagattctatatctatgattaacgttgtcactcaattgcattaccgaatttccaagatgtaagtatgggctattcctacgagtaaactggtaacgaacaagtcaaagaaccagtatagtacaattaagttagaacttaaccatctcaggattgcgatcattgacccaagatcaactaagtgatattaacttagaattagatataacagtaagtttataatatcttttccatttctacggtacaatatcaatccaatctgatgtatagttgatacatccgatccaagtttgctttgctaatgccctagaaaagacattctacttacccaagtataagcaaactatattgttgattatctcattagtgtaaatctagtttactgaataatcgtgggactaaatagtttgaagtatattatcatgattattttccaccgtgaagacaatactataatcatgaataataatatgttttggatttaactcaatttatatactaaacatgtaatcatgaatttgacttgtgaaccaatcaatataaaataattcctgatcttttattaatagtaaat

SEQ ID NO: 185390 - DNA, 1996 bp, Cannabis indica
tgatatgaatatggcttttgtcaattctatgaaccttgatggacataacatgagcaggtggtgctcacacgaagctagttctagcaatacacagactgaaattggtactaatgagcgtaaaattgaacttgggtggccaccctcaagtccttgtgctgtatctagtgccaggttagaagagcggcgccatgaaccctctagttacgcttcagctgacactaatttgaaccctatatttgcacaaagttctcattccgaggtgggaattccttcaaatgttaacttaaatgcagcaagttttgtgggtcgtggtggcactaggagccaagtcttggaatttcctaatgcatacaaagttagtggatctgatatggagcagaatcgatctattagtgtttctgatccttttcttcttccttctaggagagctggattttcagtggaggaaaatgatggcaggcaaagttcattggaaggtcgccggatatcttgtaaaagaaaggctatcgagggacatgctggacaatcttctacaagtgcaagttgtagctactttcagcctgcagaaagtattggaaggcttggaggtcctgctcaaaataatgtagctcccagcagtctcagcctatatgcttctgaacaggggaaccccagacttggattaggtggaagaacaataacttctgacaactttcttgattcaaatgttccggaaagctctcgcagaagcttccgtgctaggacaacttcgttgaatcaacctaatgctgctgccccggtattctcaacagggacagggaggactgttaggcgttctagtatgtctgcatcccaatcgagtcttactccagttgatcatagtctggacttaaggccaacctcagtagtagatactattcataaccaaagccagcctgctatgatggatgttcctcctttgccacaaaatgtacaatctttaagatggaatggaggttctagttcaagacatggcagttcatcacgctcggctgcatttggagatagagacatacaacaacttgatgatttaaaccatagaagtttgccaagaaacatgttggatcatcctatatttgtacctgcaactgaattgagaaattcggttcgacatccagcaaatagaagtttagctgggccaagtttatcaattccgggaaatgttgtttctacaccaagggctggttcaagcgcgaatgttcatccgtcatctgctcctgtgtgggcttcccatcacaattctactccacagcatcctcgtagattttctgagtatctccgccgatccttgttctcttctgttggtactgagcctggtgggcaaagaagtaattatctgccactacgtcctggtcaacttgcttcttcaccggaggttgtttttccgcctggagctagttacgatggtcatcatttgcacccaaggtcagcatcatggatggagagacacaatgataatgggttgggacttcactactctcttcgaagtttgggtgctggtgctgatggaaataacagcaggcttgtatccgaggtgtgctccattaaaacttttttttttacgttaatgcaattagtttgttcttctaatagtcgtgcaaaagtgatactgtagtgtgcaataatttctcacgatataatgttaatcccacattggttgcctatatcttacaaaatatttggtgattgctggattgatcagtgtttggtataggattgattgctaagtatttttttccccgatgctctcagactaatccatgtatgcacacatttttatatggaagtgccaagtatcttggtgtggtacttggacacatttgtgacatgtcttcaattgtatatgtttatgtaagaagtaaatgaagaattcttttccattatgttacttctgttttagtaaggagctcactgtattctctcttttgtttatccttattttagcagattcgcaatgtccttggtctcatgcagaggg

SEQ ID NO: 185391 - DNA, 5164 bp, Cannabis indica
aaaacaaaacaaacaaatagaacaattaaattaaatacttagagactaacgagaatcttaatcttggagctattgatacaaaattttaagattagagatttatttgcattaaaataattttttaaaaaatttatactgcagtttaatattaatacatgacatttttagagaaactaataaatttattaaaataaaaaccaacgaacttactaggattattatattctactttctacattacaagggagccaacttgtacgaggaaactcctttttatcgttgatatttttattttggccttgtttatttgttttgactggaattttaaactgttaacctactttgaggcagttaccaatcattttctttcccttatcaattcaatcacaaaaagttgttattttaaattaacacacattttcaaacttaacttgatatgtgcagcactattttacaagtaacataccacttggaagatgtccttggattttacaataaataaaaaataaaaatgatttttacattgtatagtatgaagtggaattgggcatcctattcaaatgccttagaattttctcagccatgtcccttgtattgccattcccatgatgaaaagcactgactaatgtcgaaggcaacaacctgtcctgggatatatctgtaacagacttgtctcctccattcattagaaacttttcaatcatccaaaacgatttttgccacaaagcctcttgcctatgctctttcacaacattcaaaacatgttgtaaggcattggctccgttgagtatgttcatactcatctccacgtctactttgtcatccaacaaagtacatatagctgacaatgcagcctcaaccacctctgcattttcatggtccaaacaagccaataatctctcaattgctttggcatcaactagacagaaagtgttttctgaagaacaggtccccctgtgaaccgggcaaactgtgattttctttctcctagaagagctgggagttagaaacttgggggcagaaaacagcctcgtgagctttgctttcttaatttctggtggtttggacagatttatggattccaaagagagattctgtaacccatagctgatagcctctgaacttcatcacttgaagttttcactaggagttcagtgaagactgctgtgaaattgtgggctctggctagaaagagtatctgtggatcatacagtgttgttgtgaatcttactagagttcccactaggccttctaagtaacagatggaatgcctgcttgatcttgttccgcctttttgaatttggctgatggtttgcagaattatgggcactgtattcttgaaaagtagagctagattgagtgtcaagttttgatggggcagtttcgctaggaatttcgctgaaattgcctgcttttcggagattcgagctatctcatttgaactcaagataagattttctggcaggcctcgggttttgcagagtctttcagatagtgtatgacctatatgaggtgaaagagttatgagtaacttcattgctgcaatcccaagattgtcatatggattatttatgagctcaacaagaatgtagcttgcttcagtctctttgaccactgagataatggcagtcattgatttgggactctttgttaggcataagagtatcctaataaggttaatgtttagctcatctggggtactgttcctgagcatgtagatgatgttgtacacaaaatagtctgaagtcatggtgtgcccatgagaattagctcgtagagtctcaagctcaagcccagactcgaatatattcgccaatatagcagctgcttcagtttttgagttcactagctcatcatggattctccgagtgaacatctcttcaaccatgatttgtacaattccagcttcagcaagtgctttggcattaggttggtacaaagatatttgtgctaaagctgtgaaggcagccctccgagacagaacatttccagttctaaccattttgatgagagtgggagaagccctctcagccgcataggttctgctgtcatgtccaagaacaatttctcctagatagcttgccatttctgtcttcatctcttcactgcctgtgaataaaatttttaatagccagcttaatattagataacatgttaggttctcagacatttttgttgaacatttctatcaaatgtatcaaagaagatattttcatgtgacttagatttgtgagtattaccttctgcaagattatacaaaaggggttctaatagcccattttctgccatacgcttaatgttatttggcgacctctctaagttcttcaaggtctcacctgccttttctgaagcaaaggcatcaactgaagatttgtatgtaattgtgatcaacatcagaattgatccagtaactaaacctattttgttacacaatgattcagatctcgaaagctcaagcaacaacagcaacgatgcatgttttataggctggaaactacttgacagcattcttatcagagctgaaaaatccaattcctctgctaccatttcctgcccaaaacacagaataaataactaaggatattaaataaaactttggttctaagcatgtaaatgaaaactgataaagctagtaccttgctgtcgatttcatcgtctaccaatagccttaggagttccaaaactgcacatctaacatcttggtttttgtactccagagtcttaacaagcaaaggcaacattccagcactgcaaacctgtaccttattgtatggattcttttcacagataccatggatatcttttattgcttcaaataccatattatctgaactagccaaagacaaagcagccctggccaccttaatccttgcagcttcattcctttccttccactcctctattgtggacctaagagcaatatttgggttgtaagctctactaaccaacctcttgccagtggtggggcattgaatttcagctgaagcttcaaacttttcaaaccactcagtaattgcttttctttcgtaggttactccactctgaatggtgactggatcatccatgactctctttgttagaggacagtagaaagtatcatatagaggctccatgtattgagccacatgaggcaacattgctaaggatttgctaaccctttcttgttttgacctgctgccactacttttaactttaagaagatttggggattctaagaaataaggattttccattgaaacttcaacattgatggagtagaggtctgtttctattggtattggttcttgttttggtttttgtttgggagatgataactgcgtatctagctcggttttctcagaggattgaattgtaaagtgagagttcctcatctcatttgaaagagattgaattgcaatttctgcatattcttgatctataaatgctgaagatggtattgaactcaagtcttctcccatggttttgatcaaatcctctatctgtgaaatgatgcttctgagttccgaaccagaaatagaaagaggttggttgcctttttggagtctctgaacaagatccttagccaaactaatgctttcagatagtgatttaagaatctctactgcatttggtggggaattctcagttgtttttagttccattatggctatagaagctcgataaaagtagcatccaatttgaataaaattctcctgttctacctctatggatgccactgatattgtgatttctgaaatggacaccaataaagagtctgcaagactcgtaatcaagatttcatcttccttgagctgtagaaatgattgagaaacacaaagaaaactttcaatgttaatgcatggtattcactattcacatcaaaaagaaaacttggactaacaaacaaaaaaaaaaaaaatttaatgcctttcattctcaaaatttcaggcacttttcctacttccttctagtttattatcttttacaccaagattctcttattcactccttgccaggaaaagaaaaaacatatgataactctattggctatagcctatagaattcgcaagccttaagattatcacaaactcaataggtaaaaagaagagaggattattattattaaactaacattaatctagttttaatattgaattgaaactcagaagaaacaagtgtcaaaagattagataaaactggaaacttataaaagctcctaccgacatccaattgatgatgctgcaaacggcaagccttctggtatgtgcagccacccaatctggcaagaacaggaaataattgtgttttttttttctttttctttttaagacatgaaatctgggattgacttagttcaaaactagtcactagtgattttaaccccaaagaaaaagaagaaaaataattgggtttactttatttttagtttctcatacttggatgttgagtcagactaaagaaaatcaacaatagacttggtcagctaaaatagttttaattaatttggttaaaagtttctttccctatacataatctcaatgaataagtcccaggtattggttattaatgcttggaattgctattagtaaactcaatttcattaattcttggtggcagttgcattattattacctacttattatgatttttattattttattctaaccttttattgtcaaggatttccactgcaatcaaatatatgagtttcttggtcattggatgatcttaaaaaaacattctgaagtctaaactgttaccttctagaatatcttttgctaattaatgtgtgatcaaaagaatcatcaatgattcaccaaaaaaaaagagagagagagataatcatcaatgaaatctctacattccaaaattaagcacacaacataatgtgaacggtactgtttgtactatatatactaactaattggaagttagaaccagaataagccaagattgttaggtgaagttgtactagattttaagaagaagaccaagtcaaaataaagtattgttttgttgacttttaacttcaatttgtattaaaaaaactagcaaaaatattttatgattgtgataacttcgattaatacgccaaaacatattagattatgctgcaggtaataacaatgaacagcacgtgttgataaatttaattgtatgatcagacttttaaaagaaaataaaa

SEQ ID NO: 185392 - DNA, 784 bp, Cannabis indica
aatctttaaataaagaaagaaagaagagagtgagttagagagttaagtttgttttgggggttttggattttggtttttttatgaagaagattgaaaaaagtttgaatcttcaatctgggaaagcagggagatttgttcttggatggtattttcgattgcatccatgaaattacattggctttgtcaattttctctgacagaagaaatatgacagactctgcttatagagtcgaaacgacgtcgcgtttagctcaatggagaatcgataatttgtcttcttgtacttacagaaagtctgatcctttcaagattggaaaatggaattggtaagtaaaaaaaaaaaaaaaaattaaaaaatgtaatttttattttctgtttggttactgagaaaattttgttttctttgaaggcatttatctgtggagaaaaacagagttttattgattaaattatatcctgaaatatctaatttcacaagagagactccaccgattgcttcttttattattaaagtggtttgttctgttggtgatcgtaaggctctgattcatcctggtaatgatcaattttgaatatccaccgttgattttgttttgattattatgatgtgatgatgatgatgatttattcaattttgtatttgtatgcagagattaaggataaacagcttaagaataatgaagatttcatttgggctgttgatgttcctttaactggaaaattcattattgatgttgaatttcttgatttgaagattgcttcaccaactgtaagtatttttttt

SEQ ID NO: 185393 - DNA, 6152 bp, Cannabis indica
acctccaacacacatccactcttctatagccatttgagttagtctcagtctaattgttttctttttataaaccggaatcaataacaatcttaaatttacttcataggataatctgaattttttttattgctttaaagggatcgaatccgaaattagaaatttctttctacacacaaaaagtcacctcacacgtcacaatttacattaaaataaacaaataaaaaaacagagagaaaaaagaaagtgaaagagtgacgtggcaatttcctactgggcctggagtctgtgtagcccaaataaatatatgccaatcaatgagctccatacattatagagttcagagacttctaaatatctccctctattctaggaaactctcaacctcaatcatggcccgatttagctcaccactattcctactcgtcgtctcggtcctcgccgtcgccgttgccggagccggatccaccttcgatgattctaaccccatcagattggcctccgaccgtctccgcgacctcgagtctcatgtcctcaacgtcgtcggtaacacccgccatgctctctccttcgctcgctttactaacaggtaagtataattgccatctcccatcgtcgcatgatcttttctttttttggtttatgtagatttaaagtgaactaagtgtagaaaatgttgatgttgttttaaaggtatggaaagaagtatgatacggttgaggagatgaagcttcgatttgggatctttaaggagaatctgaagctgattaaatccacaaacaagaaggggttgaattacactcttgctgtgaatcgtacgtaattctaatgttaagattattggttttctttaatttaaatttagatcaattgtacttaattcttttatgaaatcgcagatttcgccgattggacctgggaagagtttaacagacacaggttgggagctgctcaaaactgctctgccactttaaagggcaaccacaagctcacggatgtagttcttcctgaaacggtatctatacctatcaattttaattccttttttaggtatacgtttaatccaactaagcgttagctggtttaacacgataccttatgtttagttggtgttatctcttttatttccctataagatatgcttgtgtacggctcttttatctagttaaattcaaaactttagtgatcttgtacaccaataccaagtaatttgctacagaaccattttaagttaccggggactttgcatcttagtgattcagttaaatttagtctaaattttaatgactttgtgatttcgataatctggagatgccacttttatttagtttaagtgtaacatagatgaatttcgtcatatttacagaaagactggagacaagatggtatagtcagccctgttaaagatcaaggccactgcggatcttgctggacattcaggtgagtttgaacttggatttgaaaattcttagtatctagcaaaactgacgatgaacatttttattgtttagtttttaacaaatgatttctacagcacaacgggtgcccttgaggcagcctataaacaggctttcgggaaggacatctctctgtctgagcaacagctcgtggattgtgccggtgcttttaacaattttggatgccatggtgggttgccatcccaagccttcgaatatattaagtacaatggtggacttgagaccgaagaagcttatccttacaccggacaaaatggtatttgcaaattctcatcagagaatgttggtatccaagtggtggactccgttaatattactctggtaaggaccgtctgaattttaatttactacatatttgtttttaaatgatctagtagcttttgttttctctttcttttcttgttgtaacataaggacaatttcagggtgctgaagatgaattaaagcaagctgttggacttgttaggccagtgagcgtggcatttgaggtagtgtctcctttccgtttttacaaggaaggagtattcaccagtgacacttgtggcaacactcccatggtgagttgagttttgattaaagggggaccaaatgaactagtccaacaacttgcaatatttttaatcgagtgcagtatctttgcaatccccaaagaaccaaaccttaacttattgtatgaatacaatactaaaattctctgaaatttattgcaggatgtgaaccatgctgtgctcgcagttgggtatggagtggaagacggtgtcccgtactggctcatcaagaattcttggggagcaagctggggtgaccatggctactttaagatggagctgggaaagaatatgtgcggtaagttttccttggccatgttttgctgccaagctagttcaccctgctattagcccttcttgtgccccataaccgttttgtccatttttttttggttttgattcaaagcattataaataataaaataaacgaccatttaaaggcagataagattccatacggaactatatatatggatgttatcttttttttttgttttgtttaatgttgataaaattctttctcagccataatatattgattattttgatgcaggagtttcgacttgtgcgtcatacccagttgtcgcatagtgagtttgggcaactttggaagtaatagtaggccatggttgggtggtgaatgatgtggactgagcttgtcgggttgtatctcataagcgttagagagggtcccccactcaccaattatgttttaatagaaataataattaggttgattatgtacaaaataagatccaagatcatcgtattaaatacaaaaaaacaatgagaaaaaagaaagatccaagactgtgttcttgttgtgtggtctttctgtaatgtatgtaatttgaaaaacaacctaaatcttgtgtaaattctttaatggtatggtgatagtgaaacaatatttactaactaatgtctcaaaactcaatcttcaagttcgattttattatcatcatcaccattattattattattattattattattattattattattattatgaggatcatgcttcaagagatgttatagttactcagccaaaaaaataaataaataaataagtttgaacatattttctatcgaaactttatttattgcgaaaactatattggtatatcaataatgatttaataattttttattctcaaaaaaaaaaaatagatttaataatttttggtatattcttgacaagaacaaatactattaaggatttaatttgcatatattaaaaaagatagaggcaagaaaaaataattgatcactaaactacccttcttttattcatttctgccatcttgtacatcatttaagaaaagattatgaagatgaaaagaatttctaccaaaaatttaagttctatagttggagcttatttttttttttctttttaaacctgtacaccatttgagaaaatgtatgaagatgaggaaaatttacagttaacatacaacgactctaaaagcaaactccgatccggaaggcccaaaaactagaatacaaatttattacaaaaatgttgcccatctaattaccttttttccccaatctttcacattacaaccctttcttttaagcagtttgaaaaggtggacttcgactttagtcaattgtaatggtaataaaattaccagaaggaaaagaaacgacaatttggaggaaggatgctaaatgcacagtattatgtgattactgacattttatgtgattccctagaggcattgttcaggtgggtctgttcaaataatccttaatgttggagatctcatttgaataagagagccttacagatctccatattagttgtgccaaaaaatctattgtccaaaaccaggtatgtcacacttctatagcaacatcaagccagacacactgtcacctgcaatccaggaagcaaacagatgaattaacaatccaattattgaaaagaatggtgctgttaaggaagctcaatgtcagcgtaacctgcaaatttgaacacaaacacacaattatttcttgaaatttatatttgatcacgaaggtaccagcttggtttcttgctcgtagaaaacccaattatgaagtatttcatgaggttcagagattaacaaaaaaattggttaagcactccaatattttgagagcccaaaaccacaatatttgactttgaattgagtttcaagtgagtgaaattcaatgaactgttctataatttttagtgacattatttctaaagtgtgcaagaaagcataatctatcagcattagccatacaaacaaaaaagaataaaaggactccccacacccccacataaacagaaaagttacaaacaagatatacaaacgaggaagttgcatgataatcacgtacctactgagttgctggttttgtctgtatgcactacaaaacggacgcattgcacttggtaataatttggacgttttctacctgaagagcaagaacgagcaagcatttctgtggaaaccattaaattatacagccagtcgtatctcagcatttgttaacggatgactacttcttaaacatgacaaagccaaattgggatcctcgacagcagttcttttaatatgaatagcttcattaggcatcccggccttgaagagacatgatgccaaactatccacagttattttatcaggggcacatccaattgtcaccatcttattaaaaacgccaattgcctctaccaacctacctttcatacaattcccaagaatgagaatggtgaaagtcactttatcagggttgcatctcttctcctccatctcagccacaatcctgtttgcctcatcaacattaccagccttgcacaatccatcaacaacagggttgtacataaaagatttcgaaacaatatcactctgatttaattgtctcagatattcacgagcctcattaattctattatctttgcaaagagcatgaatcaaaacagagaaagtatatccattaggcaacacatttcttgcattcatctcgcgccaaagcttcaaaccctggtttggttgtccagctcgacaatagccgtcaattagagaagtaaaggttatgacatctggatgagaaccataaaagggcatcttctcatacaaggaaatagctgatgccatgtcattagccttaccaaatccatctattagagcattaaaagtgtacgtatttggtttaatgttagaagtaatcatctcgtgaaaaagggcagaggcctcctccatctgacccaatttgcaataaccagatatgactgacgtaaaagttataacattaggtgaaaggtcgcttcttgattgaattttctttaacaatttgcaacctatatcaacctcattagtcctacacagtccacttatcatagtgttatatgtaacaatatcaggtgaacaaccaaacttctccatatcatccaaaaacccgaaagccgtatgaacttctcctatcccacacaaacctcgaataataatattaaaagtccaaatatccggttgaaaatgtgatcccttatgctttttaaataagcaaacagcctcactaacttgatttcttctaaccaaaacgttcaacaaactattgtaaacaaatgtactcactctaaactcatcacactgaagctcgtcaagcaatttctcgccgaagtctaatttaccaacttgtgcataggaagaaaccaaaaactctataaccgaattatcaggcgagaggccatcagtcctcatgcaatcaaagacaaatttagccgaatcatgaaaccccatttgacatagggacctcatgagaaagttgtaagtcctaaaactatgattaatactccaattgtctctactgagctcaaagaacttcaaacccaatttcggattgttaagccgtttaatgacttcaaacgcaattgaagatgttaaattcttactaagataaccaacgcaagaatccaaggatggagaacgaacaaagagagtataaacaaccttcacaaaccaagcctcagaattagatattacctccttatcgaatggtcgtgagcgagatcccccgtgagctgctaagctatgaaaatgtgaaatggcgatcttggaggctcgaacccagaagggacgggctgtgaaaaacaaaagggtcatct

SEQ ID NO: 185394 - DNA, 3431 bp, Cannabis indica
gaaaaaatttctaaagtgattttaacatgccgaatataaaaattttaaacaagtctattatatttttatgagtgatttttatgaataatacaccattatatatttcactggtttcaaattttcattcatagacacgttaagaatgcaaagacgttctgtgtctactttttaagcactatttccattcttcttttaatattactcaagtcatttgaagcttttgtctatactaatttataagaattatcatcaaaggaaagactacatacaaagactaatctttcatcaagcccgcaactaatcatagtgactatttaaaccaaaaagctctacagctgataaattcctgtcatttcaatctagagtactttacatatgatcaaaattacagttatgatacatttaaccaattgaggatatatatgattttaagtgtttactgaaagtatattttgagttgtttacactgtcacaggcgatggtactgcaggaggaacccgattttcaacagggatttcaacaaattcagagaggatggcacggaattcatccccggtcattgtttccttctcaataaggacttccacaatcttgtccatggcctcacggttgtttctgatgtgggtcaaagcaatctcataagcttcatctgataatctcttgacagcagaatcaatgtcctcagcaagcttctcagacatagagttccttgccatcattctcataattacatcattgctttgagctgatgagtccattagtgaccatggcccaatctcagacattccaaatgttactaccatctgcaaaacatgtcaataaaattcttcagctagcacattctttgatatataaatctgagagacactaataagtaagactactaggacataacatataacaaatttaagatacctgtttggccaaaccggtaatctgttgcagatcaccagcagcacctgttgtcacctcaggttcaccaaagataatttcctctgcagctctgccaccaagtcctccaacaattctagcaaatagttgctgcctggagatcagagtagggtcatctgcaggaataaaccaggtaagacctcgtgcttgacctcttggaattagggtcactttttgaacagcatcatgtcctggagtcaatgtcctgcattaaggaacttggttagaattcaatcataagaagaaccaagtattattctatcaatcacaacccattttcttctactagggtggagtgaattcatcaagccatcgcctctagtgattttaatttctcaatgtataaaccaggcacatttcatcagaacccagtctctactggactaaaattataaataatgatccatcaagccaccaacttaggtggcttaaattgccattcaatgtttgataaaagtgtgtgcccatgcattgttaacaataacagttttaagtgaattaatatcatactcacccacatatggcgtgcccaacttcatggtatgccaccagacttttgctcttcccatctgtcattactgtgccttccattccagcaacaatcctatcaatcgaatcatcaatctctttggatgaaattgctgtcttcccacgccgaccggccaatatagcagcctcattgagaaggtttgcaaggtcagctccactgaaaccaggtgttctcattgctacaacttcaagagatacatcaccatcaaacttcttgttactggcatgaacctttaagatctctgttcttcctcgtacatccggaacatcaacacttacctgcattagagatcaagtctgagcaatttggatgttgactttagagtaatacgcacgtaaatatacataacatatgcttacttgtctgtcaaacctcccaggccttaataaagcagaatcaagaatgtctgctctgttagtggcagcgataacaatgataccagtgttaccttcaaaaccatccatttctgttaagagctggttaagggtctgttctctttcatcatttcctcctccaattccagtacctctctgtcgtcccacagcatcaatttcatcaacaaatacaatgcaaggagcattctccttggcctttttgaaaagatcacgtactcgagaagcaccaactccaacaaacatttcaacaaactcagaaccagagatggagaaaaagggaacgccagcttcaccggcaattgctttagctagcagagtctttccagttccagggggaccgacaagaagaactcctttaggaattcgagccccaactgcagtgaacctctcaggtttcttcaaaaactccaccacctccataaaatcttgcttggcttcatccaccccagcaacatcatcaaatgtcaccccagtgttaggctccatttggaatttagccttagattgaccaaaagtcaagggaaacccaggtccaccaggtccacccatgcctccagatgaacgccttgagagtaggaacaaacccccaattaaaattagagggaaagccaaatttccaatcaagttgaataacaagaacctgagtcttcttgagcattgtgtgctgcaaagtcaatgtttttctctctaaacttctgcaaaagctcttggctcaacccaggaagttgcacacgaactcgctgtactcggttgcccaactcaggtgaaacagcttccacaatagctatggttccattctcaaataaatctacttttttcaccctatccttgtcaaggtactctagaaatctagaataagacatccttgaggaagaaaccccttgatcatcggcactggcactcccagctcctaacaaagcaggaacaccaactcctgcattgccaagcaaaaacttaagaaagcctcttctaccttcatgttgcttttgctccatagaagcctttatagaaacttttttcgtcacttgactcagggacggaaggctggaagaaggcagaaactgcctcccatataagtccttgcttaaagctggtttagtaccatgagtagataaactacttcccacaaggcaagctgatgatgctgctgccatctgtaagtaccaagaaagccattcaaataattaccccaaacatagaacatatcaaactcagcaatatatacagtataaattaacaattatgatcaaacaaaaaatccaaacactataatagattgcttgatttatttcaatgtcagaaacaatatgagaagattaaaaaaaaatcattcaactagcaacatttcagttcagctagctcagtattccataaaactaatcacaatctttaaatcatcatgtaatgtaattaatataaaaaactgtcattacccgggcaaaatcagaactcaaacatgaaataactagtccataaaataagtccaagcacaaagtttaaaaatgaaaataaaataatacaatatgcccaagcta

SEQ ID NO: 185395 - DNA, 1409 bp, Cannabis indica
tatatatattattaaaaaaaaaaaaaaaatgtaatgaatggtaaatatttaagatcttacaaacaaaatggcatcctttctcatccactttaatttcagcacgcccatctttaacaagaaatgacagtgcaaataaattctctactgtttgtgcaaaagaattcctgttcaaaattaggttttcaagccccacttttctatgcttcctaagaatgttgaacatgactgccatattcttatcggtgtctgttttctcttttgaaagagaattatcaagctgcacatataatttgaagtttattaatctttctagattcattgggaaagaaaagaaaatacaagtataagtacgtagcactaaataaaatgaagatgcaaatggtttttcagactttcagcaactctaccaagaatcaaaatcaataaatccatgacccatatgatagcctatactaatggatgcacaataacaacatacattttagaaaattgaaatatattaaacatatatcaatttcatcctcatgctgattctacctcaaggtaaataatcagtacacaaatctaaactccaacaataaagtagtaaaggcattctactaaaaccagttaccttaaaatgattcaataaataaccagaacgtttaatcagtatctgtagttcgtgtaaaaaatgacaatgttatttaaatcatgcagttttacctcttctggtcgagaactctctgtaggtctcacatgtttacgacgaacagcgggcttacgaagttttatttctgtgctcataggaccaatcctgaacacagagaaattataccaatataagcatctgacaaagcatcttaaacaaagagaaaaactaatactatgaactatggctattacatggtgcagcatccaggagctttcctgaaaacatctgacacagcaactccaacatcattccaaaatgtcaagctcacctgctcctccatggttccactccgtccaaattccattagaagactgctgacaaagtttgaaggagttataccatgaataccatgtgctttgactgaggacattaacgtacttgtaatgtccaaaagtgcttccgcatcagcaacttgctctctaggtttttgaactgatatatcaaattttgacccccaaaaaaaaacaattacaggtaagctaactttcttggtaataatgtcaccaaacaaatatatcttaaaagggcacaggtctaccaagttgatgcaagctctccacctcattaatgattgaactgaagttatctgaatttgcatctgttaaatcatctctcttatctgcacataatcacataaggtatatatattatcccaagagtattcaatcaagaatacagaataaaaatgtaagcgccaaatggtctaaaaaattag

SEQ ID NO: 185396 - DNA, 1504 bp, Cannabis indica
atgatctaaagtactgttatagggacaatttttttttgtcgtgctatagagacaattagatgaggagaaaactttttctttttggttcaaatcttctaactcttggtcagtactagtatgctatgaacatacaaatacatgcatcaaatattacatataattttcaaaaaataagtctcattttaattaaatcaaattaaatgggagatattggtaatatttttgtgcatattttatatacggtatcattactcaatatatatgacaatataaaaaagattaaaaatcggctacaatcgagagttgcaaagagaatctttagatgtgagaatgtatacttttattttttatttatttttgtaatctttattaataatttattcacaaccaataacagttgctttctctctctatctctctccaattatatagatattatacatagaattccgtccatatcaaagaatgtgctccggcgaataatccaaactttgtgggcattgatgcaatcatacagaagagttaactttaaggttgctttcctctttctctctctctctctgtatatatatatatatacatatattatgtaacttttcacagatattcttttgtagctcttagcatcaattctgctaatcttttgtagacattactggaagcagcattccccactatagggtacctattattgctttgtccacctattttgttttactccctacaaaaaaggaaaaatgaatataaacacataactcccatcaatccacacacacacacatcgatcctcgtagaggtcctgaaaatggaaaatggagcaccatgcatatatgtatgcatggaacagagaacattatatattatatatattggccaaaaaggaaagcagataattataaagctattaataatgtcctgatacatcaacagaagcccatgatatatatatttggcatatatttgccccttgtgatgaaaatttctgtagatgccaacatgagctgcattgcatgttaccattgtttgtggtcctgtttgtcccaaattttcttttagctataattggtaaagcaagttgggtatattataaataaatatcgagagagagagaagttcgatttatctctaagcatatctatcttgcttatttattttagtattttaaaaaggtggtgaatccattcctgatcacttgtttaattttctaacttaaaaaaatcatataagctggaccttttagaagatattatttcaggtggaaaatattgtattaataattaaattaaagtggtaaagttaacaagaatgtgcggaattcatttgttcatttgcctcgttacctcccaaaatggtatggtatttgtacatataagaataatactaggattagattatcaataagtataagtttacaacaaaagtaagattcatttaatacaattcatggcacttcacctcatccacaattcatgaaaaaattaggctctaacctctcttttgttag

SEQ ID NO: 185397 - DNA, 2110 bp, Cannabis indica
ttggaatgtgaattgagtgagagtgagtagggagtatataaagggagaagaaagagaaggataggaagttgcgtgtcgagtggtgagaaagtaatgagggagtgaagccaagcctgggacccaaactacttttcaataaaatgaatgaaaaattgcaccttttttccaatttgcaaaaacaaagagtggagcacgtttatttggttagtactttcttggtgtgcaagtagagagagagagagggactaagtcggtcaaagagtgagactgtgaatattaaggagtaggaggagaagtggcaagtgtgtgagtatttgtgggcccatgaggctaaaggatgtgagaatacttaattaattaattcggagtttgggtccaactttgaaaaggaatcaaagtcttccaacccaggagaagaggactgaggccagaaagacggctataaaagtcaaatattaaggagttgatgaaggtaaaaggataaggggtttggttattcgtaaagaccaacccctgtctaactccaaccaagacccgatcaacagtgtatcagggaggagcagcagcagccgtggtaggattattttaggtagtggcggcgacttttccttcttataattttataaatatgattttattttatttaagtgtataagacacaactaccgtgtttggattgacaagttgagagtgggtttattaaggttccatgtattaggacacaccggcatatttaattcttagtgataatgatccgcaacacgtggaggtaatatccatctgtttctttcttttttatcttttaccccatctaatctttgattatatataatttatgtaattgctatttggagcttgaactcaccacctaatttccatcttattttgtctactttttaccaacaaaagaacaaaagggcctccctagtttttcttttttcactttcccaactaatgctcggttaaacaaaaatgcggtactgacttcaacatctcagtgtcttttattacagtaaagtgttgttacggagatgaacttgtgctggatattgtccaccgtctattttatattcactgttgctatagtaggctcgtattcttattgtggaggctattataatataatttattctccactaaacaataggatttttattattattattattattattattattattattattattatttaacttggtcaagatttatgttttttgacgttggctttttacatttgaatcaagactgaatattgtcactattctatcaactattcatctttccaccacgatggacctatgggtcatcatggtcgagtcgttcgttcatataggagaatttattagccaaatttctggaaggagctttattcttttccttttgtttgagtcaaattcatcaaatacattggagtacatgattgggcaattggctagatgagaaacagatattgattgcataaatgcactaaccaaatttccatcctaatacaatattgcttcactctagaatttaggtcactgctcacctattatgggtactacaaaatagtgaaaatacaaataagggaatgtaatggtccagtccagctagagtccttaaaaagaagaaaagaagtaggccactacccattgctcgcccacaaagaaagcaaataatatttttcttataagaaaatgtaagtatttgagaaaatatttaggttttttaagtttttaacacttaaatactggagcatttttttccgcaaaaatgattaggtggcttaatttcaaataacattccaactcattatatatttgatgtaccatgtcggtcatttaaaatatgcaccactacaaaaatgatagcgtcaaaatccatatatacatttattgggaatatagacggctaaacagctttacgatttgtaacacttaaccacaaaaatcaaatttttagcggctaaactacctaaacactagttccgttttgctctgcacaccttcgtctaaaaattacagttaaatatcagggtagacgtgtccacgtgtacacacttatatacgtggcgaatttttaatagtccacgtagtattagtagttaaaaataattataaatatt

SEQ ID NO: 185398 - DNA, 1545 bp, Cannabis indica
aaaagactctctttgtgttgatgaagaaagtttaactctttccggtggttcttccggcgccggtgactctgagtccgctcttaccagcgaactcgccgttccggtaagagaaaacaaaaacatgtttttttttaatttaattttgggaaattgaaaaaaattaaacttttttgtttggtttgtgtaaacaggacgatgatttagctgaacttgaatgggtttctcatttcgtggacgattctttctcagatttttctcttttacacccaattgaaaaacagagcactgaatttcattcggaaaatcagttggaacaaccggagccaacccgacccggaactaacccgacgtgttttccttcagttccggtgaaaaccaggaccaaaagagctcgacccacaactcagccatggtcgaggactaactcgctgagtcaactcaccgagtcaaactcaacaacctcatcatcttcttcttcgtctccgccgccgtgttcggcctcgttttcatcgaacccttgtctcattttcaacaacaacgtggttcagaccatggagtttttacgaaacttgggcgaaccacccattaagaaaccgaagaagaaaccggcggcggttcaggccggagctggtgctgtggtcggaccacagttccagcgacggtgcagccattgtcaggtccagaagacaccacagtggcgaaccggtccgctcggtcccaaaaccctttgtaacgcttgtggggttcggttcaagtcgggtcgtcttttccccgagtaccgacccgcttgtagtccgactttttccagcgaggtccattcgaatagtcatcggaaagttttggaaatgaggaagaagaaggaagttgtcggatccggacccggacccggacccggatcaggatccgggttggcccgcgtaatttcaagtttttgaggaaaaaaaaataataataagggtagtttttgaggaaaaaagaatattttttttttgtaagggtagttttggaatttcaggactttgaacaattttttttaaggctttggtaaaagttagcggcaggcagggacttaggaaggaagataagtagttttttttttttttttcttttttttctttttatatttttagttaatttattagttttttttttttttttattattatttttaggttgtattctatagtttttttaaatagttttattgcaacaatattaatttttgcaagggaaattttttaaaaaaaggttatttttagttcgttacatattggttaaaaatatatatgtttatattattaatagtaaaatactagaattatatatatatatatatgtcttgacttgaactacattgtatggtctattctgaatttaactatgttataatccaattagttaaaatttaaataattgaataattttccttttggctttaataatttgaaatggaaaatgggtaaagtttagacacccaaaatccaaaataatattatctcatttttaaaattaaatacacgtgatttcttgcttatttttaatatg

SEQ ID NO: 185399 - DNA, 772 bp, Cannabis indica
actacattcattcacattagtaattcacagtgaatagtcactaaaaatttagagagtctcttaaaatgaattactaaagctatttttgtagtactttcatctcattttaatattgattgcagcttagtgaatttgctgctcctattgctataattgaaaaggatatttgttattaattacaattacttttaattattttaataaaaggagtcaaaatctaatactactactcctcaatttattgtaaatttgtctcaattcatttaacttggaaaagtttgtagacattatattatattaatattggttattataagtacgattacgacaataattaatattaattaattctgtagagtcaagttgatcaacctttagttaattatattataaagaccataagagaacgatttggatttgcaatgtcattcattaatttaattaagtcattttcagaagaataataaaaaaaaaaattaaagagatcaaaatgttcaatcacatcttaatttaattataagcataataataaaataagtattaattaaatgaagaaaaagagtgaccaaatagtttcctcttattgactttaattattttttttctcttttgcttttgattattttatttttataatggcatgcactcatgcatatttgaatgatatatttctaagaaaataatcacaaaatataaagagactttttttttaaaaaaaattcatttattaattattgaaaaatatttgacattattatttattaaagtagta

SEQ ID NO: 185400 - DNA, 5710 bp, Cannabis indica
ggccaaaagagcttggttgaatttagttaagctccggaacccaaggcctccttcctccttaggcttgcacaacttgtcccaagtactccaatggagtttcttattctctttggtatcccccgagcaaaaattagctgccaaggaatggagattttgatgagcttcttggggagacggaaacaactcatggcatagctcggaatagcttgtacaactgctttaatcagaatttcccgaccggcttgagagaacatcaaagttttccaccctttaagttttctccaaactttatccttaataacttcaaagacctcttttttccttcgccccacaaagcttggaagcctcaaatatttagcatggtgagaaacaaggcgcacccccaaactatttgctaactcctgaccctgaatggaagaaattctcttgcccatactcacctctgatttatcaagattgatttgttgacctgaacgccttgagtatttttgcaatatgatcttcatggtgtcacattcttccttcttcgcatcaaggaatacaaagctgtcatcagcaatgaataaatgagagactttgatcctatcattcctgaattgcaccccattgatgcttccagccctctcggcttcatggataaggcaagagaggccttccgaacaaagtaagaaaagatatggagatagtgaatcaccttggcgaagaccccgggtaggttgaaagtttccaagtttctccccattaataaggaccgagaatggtacactttccacgcatctcatgattttctcaacccactgttcctcatacccaagtcccctcatcattgttcttaagaagttccattccactctatcataagccttggacatgtccaacttcagagccattttcctcccatttccaaacctttttgttttcatacagtgaagactttcaaaaccaattatggcattgtcttgaatgagcctacctccgacaaaagcactttgttcctccgagattgcttgttgcatactttgtttcatccggccggcaagacatttcaccacaattttatacaccacattgcagagacttattggtctaaaatctgacattcgagttggctttgggacctttggaataaggaaaatgagtgtatcattgatgtccttcacctgcatcccttcattgagaattccaagacaaactttagacacctcagggcctatagtggaccaatatttcctataaaatagaccaggcaaaccatcgctaccaggtgctttttgaggatgaatggctcgcattgctttgaaaacctcctccgttgtgaatggctccaaaaggtagtcattagtggttcgagatatgcagtttgggacaatccgttgaaagtcttctaattcctcttgagtagcctgattagaagtgaataacttcataaagtaattgtaagccaccttaccaatgtttctattcccagtaacccaatgtagccgatcatcaaccaaccctttaatggtattctttgccttcctattacttgcctttctgtggaaaaattttgtattcttgtccccttctttcagccataaagctctacttctttgcttccaaaatttctcttctttatcaagccaaacattttgtttccgttccaactcctgcatttgttgccagtcagtctctttagtgctacgggaagtagagaaattttatccgcacactcctttagatgccttgtcatttctttcctcttggatttattccattgttgaagagccaccccacaacttcccagcctattttttagctccagtgtatgcacaatcagcttatcctgttgccaaaccgaatgcacaattttcgtacaatcttcatcatctgcccaagcgctctcaaagtggaatctagttcgccatctaatcgcattgttcatccttgaaaccggttcattttctgttaacagtagagggcagtgatcggagttagtacgatcaagatgactaacttttgctgcaggaaacatgtcgaaccattcagagttaccacatacccgatccaatctctcaaaaatgagattatttttccttccattacaccaagtataatcactaccctcaaatcccatgtcccgcaattgacaaaagtccaatgccttcctgaaattattaatgagataacccgatttggggaggcctcccattttctctttttggttcagaatttcattgaaatccccacccacagcccacgatcctacatacattctgcttattcttttcaagagtttccaagagtgaattcgttggcttggatccggatccctatagaagccagtaaaacgccaccattgcccttcctccatcctaatgaaagaatcaatatggaatggagaaaaagaaaggacatgggtttccacatccatagaccacatcaaaagaagacccccacttttcccacgagcttccaccgcaaagcacccaacaaaccccagcttgacccgcaaaccttccgcacgaacattattaactttggattctgaaatgaaaatcattctaggagtgtactgattcaccagggaagttaaagaacgcaccgtccaagggttccccaacccttgggcgttccaaatcaagagattcatggttgtaggcgaccctgaatttcaaggtttgcctcttccatgttcttagtaacttccgaatcccccatgtgagaaatgccagctactttgccttccatctttcctttcttggccttggattctttctttaccgctaccttcctcctattttcttttgctaggtctttcgagccacttcccaccgcaaaggctatagatccctccaatacttgggcttcttgtgaataggaaattgggatattgaagagatcatgctcctgaaattctttagacaaaatagtggccgattttttcagcttcccgtatcctgaatcaccatagtcctccactatccgacgttttcccctacttccatcatcactcctaatttgattctccccaatctctatgtcccctgactgcataccactcattcttggcaaagaaattgatcccccttctatgctttgcttcaagtgatcttgtttggctttactttcatctcgcatattcgtaacccctattcttgtatctcccaaagaactaagagcagtagcagctgtaggagtcttctctaaaccaatagccggctgctttatagtgtcctcgagactactttgttgttccattcctgtttttttaccttttaccccttctcagaccctattatccaccttcaaccatatcccatacgcatcagtaacttcatttccatcctcagagatagtgataggatcttggtgacaatctttatggctatgcccaattcttccacacttaaaacacatgaatggaaactcatcatatttgaaatccacttcttctttcccgaacatgggagagggaaacctagacacaccggcttgttaatcgacatccagacccggaatcgaaagaacccatctgctgccatctttgcaacatctgaattgtgcactgtaataacctcccctccttagctaccattcgaactatattttttatggtcaagagatcgattggcactccatacgcccgaccccagattgggaagctagtcaaatcatgtttccaagattcattagagttttccattttccccaaaattaacaccccatttgataaataccatggcattttagataaaactctgctttgaattgactcagatgcaaatgtaaaagttcagaaaagacctgaatcgaacttctctttaatcttgagattccattctacatccttcaatcgccatattcctcccagcactttcttgagaaatccccggctgtgatccgagttcgtgcatagacggcccctcaagttggttttggcaaccgtaatagacaaactcttgtcaacttcccattcttcatcttcatcggtgacctgaagattatgggtcttctgcagtagttcatccatggtggaggtgagcaccccaatccctacaaccgggaacccttcgaagacgaaggaagaaacagagaccaaccctagcagagcaacccgcaataatattctttttagtattcctttgaaagattattttttataaagatatttttcaaaaataaattatagtgttaacatataaatgatagtgttattgtgattttagcaaatgcataatggatataatatttagatttaacatggaattatattcccttttgttaacaaattttatttactttttcctctgtgtttgttataggtagttaattcgagatagttgtgaaagattaatacatgagagattttaaaagaatgtgcggatatttagtaagtgaattcaatacatgctccctagtagttttgttaaaagaaaaaattgtgaggatgaaacacgcacattgtttattgtatatggtaattaaaatatatatattttatagaaatacttgacgcactattaatttataaagttattaattttaatttctttctatcagattactaagagaaatgtcgtgcgcttaaccttatttcacaagaaagttcttcctcaacctttatgtaatttttgcggcaataacagtgaatcgtatcccatgctcttattgattgtaccagagctcgccatatatggaagcacacaaaattcaaaaatttctacaatgaccatcgaattatgatattaaggattattaacttcaagcactgcaactactttccatggaagatctttctcattttgttagcatactctggcatatttggaataccaggaattctactttatttagaaattctcccgaacctaacaatgtggaagattttgtttgtaactactttatagggcggatcaaagcctgccttctcatgaagtctcccactcagcctctcatcggcatcttcgaccgtctagccacgaaatcatccaggaagacactcctgccttgtatgttgatgctgctcttgatccagaccgaggcgttacaggacttggccttgtttttaagattggctctcaacgcattattgatatagccaaaattcataaaccaggaccttcctctcccatctttgccaaggcccaagccctgttccatggtctctcttggtggctttcatcccagctaatgccaaattgtatcttttcggattgcctaaacttagtctcaaaggtcaatagcaattggaaagataattcagccctttcaagccttgttgctcagatcaggatctcattctccagcttccctggtgtttcctttcttcacttaccgtgccaactcaacacaaccgctcactccctagcaaaggaggccatcaagatgagagaggatgataatgaggattcgttttagtctcctctgtttgctgcatgtttagacttgttttgttctttttgtagcttgttcttttaaaaaaaacctacattaaagcaaagaatagttatagtttaactatttgggttgattttcttttttccgattctaatatttagtagctagaagtaatattattgaagcaaatacacatatctatccagtccagtccactctaatttatagtaagtacattatgtctatataaaagaaacaaatgttcaaaagtattttacagggaaagttcaaaatgaaggcaaatagaaaaaacatatagacttgatgaata

SEQ ID NO: 185401 - DNA, 1615 bp, Cannabis indica
tttgaaaattaaaaagtaaaaacagttttatataacatattttttaaaaatattttcacttttttacttttaaaaacagaaaactaattaaaaaagtgttaccaaacgccacgtaatttttttcaccataacacaaaatatacctattcccttagagatgttctattgtatttggtacggagatggtcttgttttgctttcatcacattaaagcaaaggagctagtttacacattatttacttcacttagcttccaagttataatttataagaactttttaaggcagaaaaaaattctatatatttcttgaattgttttttttttttttttttggggttgtacgttaaatttaacttaagctgggtatgggttacgacgaaagtagttttcaggcttttaagcattagaaatcaaagtccagaatcataaagcctacactacgtacgtacgaactgttcattttccttttattgggtctaaaactgggcccagggcccacattaaaagtaccaaaagtaggcccaaaagtacatactatactatacaggattatacagcccagtaagtaaagaagcccaatacgttccgtttgactattgattgaccatttttctttgtataaaataaagcctccagagctatctgggaacgccacgttccagagtggtcgagtcagtccgacacagcaagcactgtgtagtaaaagccacgtttaattcttcttcttcttcttcttctttccatttccatttaatattctctctatctttctcaactttttaccttctttgtgtacaaattttggagccatcttttggggcttttggagaatattcagagatatgggtgatgcagtgtttgaattccccgagaacggtgacggtgataatcgggaaaatagcagaagagggattcagagtcagagtcggagtcagagtcagagtctcgtaatagatatataccctttgagtagctactattttgggtccaaagaggcaattctctccaaggatgagaccatggctgatcgtgttcttagattgaaatccaagtattattatgttctcctttacttatcaattggatttctttttcttttattaaataaattttaaaagtttgatgtttgattattatattgtttgtagctattctgctcatggattgaggacttgtgtagaagcagttattctggttggttccatacttttatttatttattgtttaaattaaaattgtaaagttgttttaggggtaatatgttgcttgctggattaaatcacctttatatttttgtactgatttgataggatttgaatacttattaaagtttcacaatcttgtataattgtaattttttgttaaattgttttttttgttttaatgaacagtttaagttgcaagaattgtgctgcagagaagaagttagatatttcattagtatgtttaagcagaataactcttccctcttcactttgaagttttaattatggatttaaattaataacctgacactgttaacggaagttgtacatagtaagactatatatgtttggtcaaatttaggaaatgttttcaggacagtttaggaaaacaaatgagggtaaagactca

SEQ ID NO: 185402 - DNA, 651 bp, Cannabis indica
aaataattaatatttttacttctataccgtttattaaaaatactacctgaaatataacacttatagtaatgtgtaacaaaacttaataaaatagacaaatttatccaactatattatactaaggaatatttttaacaaactccatattatagagtgtatcatttgatagtgtcataatttaaagtaaaaaaatactaattattcaaatttctacaactgatatatattttcaacaaggcgcatatcacaataaacacacgaaggattgcacgtgcacgatagatggatagagaatagagattagaaattgcatggtggcaatgtcgtcaatataatagtttccgaaaacccaaaaacagtattactttcagccagcacatactgtggtcccagtctattgtatctaaattctaaccgttagattgagacacatcgaacaatcaaaaatcaaccacgatctttacctcgtagcctttgattcagcccactttttatggctcgtattcttccacgttccccacttgccgaaccatcgatctacaaaacaaatcaacggcacactctctccgatcttaactatccccaacactgatatcccgcccttttttaacattttcgtttccaaaatccgccgtgactctctctctctct

SEQ ID NO: 185403 - DNA, 3282 bp, Cannabis indica
aaatcctactagctcgaatactaagagaaaagatgagtcgaaagactcatcaaaagagaaaaagaaataaaagaaacacgagaaatatcttccaatatatttagtatatactgaattgaatgaaactcgtgaaaatatctatctcgccaatgaaaaccaggtcacatttcacagacccgatccaataagacatgcaagaaacaaacgagatcctaaaaaataattccatttccgtggagatattgggcataccactgaagaatgccatcagttgaaagatgaaattgaaaatcttatctcgcgtgattatttgagacaatatgtgaggccacaaggaaataagcaaaatcttcccaataacccaaataatccaaggttacaactccccctattgagggtgatgatatcctagttatttctagagcaccacacctcgcaggaaacaaaaataatgcacaaaagaggtatataaatgaagtgaaaaatgagaaatcagctttcactccggaaccactaaaaatagccaaatctaatgaacctcctattatctttactgatgaaattgcaacacatgtacagttccctcacatagatcctcttgtaataatagtgtagctcgttaataagatgataaagagggttctcgtgaataacaggagttccatcaatattctttacaaagagaccttaaaaaagttgggctttaggggaagcaaaactaaaaccatgtacggttaacttatgtggattcacatgcgacagtgttgcaagcttaggcacaatttaacttccattaactatgggagaaccaccattatccccaactcaaatacaagaattttttattatcaacatcccttctatttacaacatcttgatgggttgcccaaccttagtaggaatgggggcaataatctcaattaaaaattttttgctaaaattccgaactcattctggagtaggtactattgaaggcagctacatattagctcaccagtgttataacgtggaattgaaaaataaaagggccaatcaatagttgatggtgattttgacaaaggaaaatgagaaaatgatggcagatctggatcctaggttccatgatgaaaataaccaactcaagccaatcgaagaattggaaaaggtaaatttagatccaaacaatcccactaaatatgtaaatattaggaaagttgaagaaaaatagcaactaatcacctttttgaagacaaaaaaagataagtttgcttggagccattcagacatggtcggaattaacccgaatatgatatgccatcacctcaacattaattcagcttatccttcaaaacgtaaaaaatgatgacctttagaccccaaaagacagaatgcactgaagaggttgacaaacttttgaccaataacttcatacgagaagcatttcatcccttgtggatatataacccagtactggtaccgaagccaaatgggaaatggagaacatgcatagatttctccaacgtaaataaagcttccctaaaggattgctttccaataatgaggattgaccaattggtagatgcaacagcaggacatgaactaatgactttcatggatgcatattctggttataaccagattaaaatatatgtcccagatcaagagcatacaagcttcgttacaaatatgggattgtattgttataaagtcatgtcatttgaattgaagaatgctggagcaacataccaatgcctcgtgaatggtatgttcaaaaaccagatagggtgaaacatggagatctatgtcgttgatatgttggtaaagattgtcataagcaagaaccatacaaaggatctcgtagaatgctttgccataccaaaaaaatatgatatgaaattgaatcccaagaagtgttcttttagggtatcctcaaggaaattccttagtttcattttgaatgcaagaggaattaaagctaacctcgataaaattaatgcattactcgagatgccttccccaataaaaccaaaggaagtacaatctttgactggaagaatggggacactcaactgattcatctcgaagtcaattgatcaatgcctcccctttttcaacatcttacgaggcaataaaaaattcaagtggaatgaagagtgcaaaaaggtgttccaagagataaagaaacatttttctacaccactagttttggccaaaccaatcacgggagaggtattgttcatttatttggctatctcagatggttccataactgcaaaactaatgcgagaggaaggcagcaaccagtaacatgtttactctataagtaaaagattactgggggcagaattaagatacccaccgctcgagaaacttgcactttgcttgatacatgcatccatagacaccaagattattacctcgagaggcctcatcttcagcttccccaggggtcacatttttaagacaatggttatgagccaaataatctcggtcttcttcctcctcaggcacagggactttctactagtttggaaacttaggggttttaaagttgtttatacattaatccctgccatgaagggcacatgccttcaagttattcttaagcaacagaaagtcagtcgctcgcaaaccaaagggaagattgagaagaatattgtgtcttttctcgattctagggtagggatgggtctcctagtgatcgctggaaacataacaaaagagcaaaattagttaagtacaaaaaaaagaaactcaaaaccaagaatttgagaggagttattacttatgtatgattcaaaacttagttgtgttgatttgatatagactagtggtccaaaagaagttttccttaaactcctttttattgggcaacctcacgttgatcttacaatcattagtgtgggtcccgagatagtaaaagcctcatgctccatgcttcctcacagaataagctttgaaaaagtagaaatataagatttcctagggcgttggacactcccacttcaaaatgtggtagagggatttcaaacagacgagaatcctataagaatttggtgcgagctgaaatgatacaataccaaggtaattgcagaattctttgaaatagtccctgagggtaaggactgctctagctctgatgtgctcaatgctcgaagcataaattttagaaggctcgttggtgttgtagccttcatattgagccaaatgttcaggtgggtagcagttgaactctccttgggcaactgactgaatgcgacatcctttctcgttgctagttccacatgatctcagagcatcccc

SEQ ID NO: 185404 - DNA, 1685 bp, Cannabis indica
ctaaagcgagtgcataatcacagcttattcataatgcagtgctgttacataacattttttttatttgtcacaataccaatattatgcttgtggcatagattaatggtaatgattttttttttgaatttaaaccattttagaataatttcactggaaaagaaaaattaatatgctaattgtagtagttcataagatagttgggtatgcttactacaaatgcaaaattaaccacaatatctaattgagaataaatacttcaaaaatctaaacttagtaatttaactttagaaaaagataacaaaatacaacaaatcataagataaggctaaatgatttcggtcataagataaggagcaataggacaagaataaatagctaggggaaaaagagaaaccctctatgtaaaattccagagataatgaaaaaggaggtgaaggggatacttgatccctactgcgctgtataactgggattttgcacttgtatccacgttggttttgcaaatattggcaacactatttcaataattttataagcatctttggcatttatgcagcggaacatgagagaatggctgaggcatactctatgatcaatcagaagctgcaaatgtcaacttctgaacaggcaaacttggagaaaatgatccaggagttgaaggttttagtcatgtttatctcacacagttttattactatgcttgttgggatttgatctctaacttcttaccttgtccatttgtttttaggctgatctaaggaggcatgaacgtgactataatcttgctcaaaaggagattattgacctccaaaaacaggtaaaagaagagatatcagagtgattatttacataatgaacttgatttgttcgtataaaaactgtttgatttgtctctacctttttcttctttctgttttgtgaagggattgatagatattattttttttatttagtctaaaagcttgcattaatcctattgtaacctagtttggtctagtcttcttgtgtgtgtgtggagggttgttaagtgtcccttgtgtgattgatcaagggaacaccaatgtgagatttaattgcaatgatcatcaacatcctagactcaatgagcagtgtatagctcggattgtaatgatttatggtaatcaataaagatctattgtaacctagttcgggtcacttttcatagttctactggaaagtggattgttttgttattcaaaaattttttgttatttgggagtcataaacaaggctccctaataaatttgggaggtcagtctatgacaagtgacctctggctttttccaaaaactaaaaatatatatattgttatttatttattatttatgtaatttcatttttctttcaaaacatgccttctgttaattgacagtatagtgatgggatgttcattgtgtatcctatgttttttttccaactactaataatcagtacactactaagcatgagaggattggaaccatggctgataattaacaaatattttaaacttcaatattatattgggttttttattgatgccatattttagaagagtttgaacatgactttgattatatacatgataaagaaagttgcaaaaagggaagagatgcaaggatggaaaaagaaaaaatgttgtggggcaaaatgatgaaattaaagctatcattttcttacagtaa

SEQ ID NO: 185405 - DNA, 3418 bp, Cannabis indica
agaaaagaaagaaaaagaaatatatatattacaagaaagaaaatccatcgaaatatgttcttattgaaatccatggatgtggatggcttttataatatatgtatctatgtatatatataggttgatatagaggatgtgaggagagaggtatcgataatgtcgacgttgccagagcaccccaacatcgtgaagttgaaggcgacttacgaggaccatgagaacgttcacctggttatggagctttgtgagggaggcgagctttttgatcggattgtggctagagggcactacagtgagcgagcggcagctacggtagccaagaccatagccgaggtggtgaggatgtgtcatgctaatggggttatgcatagagatttaaagcctgagaacttcttgtttgctaacaagaaagaacattcacctctcaaggccattgattttggtctttcagtgttcttcaagcctggtatattagagattttaatttttatttttattttccgcatattattatgtttgtgtttgagattttaaaatgggtttttccttgattcttgttttttattcttactcaattaaagaaatattgatatgattttcaggggatagattttcggagattgtggggagtccgtactacatggcgccggaggttttgaaacggaattatggaccagaagttgatatttggagcgccggagtgattctttacatcttgttatgcggagttcctccgttttgggcaggtaccattttttaatcttctcaatgattttggcattaattgttcatttactacaactttgttttcattctgcacagtgattttattctatttataatatgggtatctttttcttaacaaatttatttatgtatatactgtacgtacagagactgaacagggggtagctctagcaatattaagaggggtaattgatttcaaaagggagccatggcctcagatttcagagagtgctaaaagcctcgttaggcagatgctacagcctgatccgaaaaagcgtttgactgctcaacaggtgcttggtatgttcttgtaattttcttttggttaataaattattgaatttaactatcttaatttcatcaaggtatctcttacgatgtttgtgtgagagtgttttgttttattgttgatagtaaaagctgtctaaaggacagacatagaggatcttcccagtgctctaactgttattgttccctatatctgtggactattgtttatgtctaatatggaacgatatgactccccaataccaataattagcttgccaacctgtctagaatgaccatttttttttctttcaaaacatgtaaaatgactaaagatcaagagttcaaatggtgtgtaggagtgtatatactgaatgattgttccaaatggctatgaaaatttatgagctgggaaattcatttcattttgatattggttactgcagaacattcctggattcaaaatgcaaagagaacttcaaatgttcctttaggagatattgtgaggacaaggcttaaacagttctctgtcatgaatagatttaagaagaaagccttaagggtaagcatcttttgccatctaaagcaccggttactggtcaatgacacaaaatctatgaatatgtgtgtgatttgggtttgtttcaaacaattgatgtaggtgattgccgagcatttatctgttgaagaggtagaagtaattaaggatatgtttgcattgatggactctgacaaagatggaaaggtaacatttgaggagctaaaaacaggactgcggaaggttggttcacaattgggtgagccggagattaagatgctcatggaagtggtaagcctttaccattataagtttataatggaagttccttaaatttatgtcaatatgcagtgctttataatctcaaatatcatcagtagttccacattcattgtttctttctaacatctgttcaattttggacctttatgcatcactacaattctcaatttgagccatagttagagaccaagtattcatggtttcttttcattgcttaaaattgtcttttcatgtcttattgactactttgtttctgcgaaaattcaccttagaagcagcagcaaatcaactcaatgatccttcaatattcggtcatataattatatctacatgttaaaattactgatagaatcttgttgtctgtttaggctgatgttgatggaaatggagtattggactacggagagtttgtagcagtgacaattcacctgcagaagatggagaatgatgagcatttcaaaagggcatttatgttttttgacaaagatggcagtggatatatcgaattaaacgagttaagggaagcattagcagatgaattaggcgaaactgatagcatggtactaaatgaaataatgcgtgaagttgacacagataaggtttggcctttaacccaatctcttacaacaaactaatcctcattgagctgcatccattttttccacagtcacttaatgtactcttttctaattgttatttttttcaggatggacgtatcagttacgatgaatttgttgctatgatgaaaactggaactgattggagaaaagcgtctcgccagtattcaagagaaagatttaaaagtttgagtctaaatctaatgaaagatggttctctacagcttcatgatgggatcagtggggaagctattgcagtatgaaccatacaattttcatgatttcattttgtttgcagctaaagagtgtgttcctttcatttttttttttccattggtgcacctgaagagtatagtatcattatcatcatcatgtaaggaaatttcaagctttgggttcaataacacatcaacacctaagctttgctaaatgcttgtgggctacattggcttgtcttctttcaacatggggctgcattgcaatgaagcttgcattagaggcctgcaaaacggctagaattgttagcacttagcatatctttttgcaacaatttctgttctgtcacatttacttgtatatttctctgtatctctttgggttttatttatttatttttttttgtttgaattgattttagttgtattctggcttatgctttcaattcttacttatattataattttgtaactatttttagatggaatactaatttgttttatgttgtgtatactctttctttccacatcaaaaagtaattttattgaacccaccaaccgcacagcgtcttcatttctcatctctttgggtctaggcctacacccatttgacgagcatctgagcctaggcccattttgacgaacatggtgggctgttatgtgtcttcgacgtctcacgtctgccatgttcatcggattacatccaacaaatttggacccaaccgatcaaatttaattatttatggaatatt

SEQ ID NO: 185406 - DNA, 3518 bp, Cannabis indica
gaagtaaaatatgaatacctgcttaataggccgcaatgttaacaataaatcacatagttctaattcaacctcaacagtttcagcatcagctgtatgattattaatgttagattgaccaacagcatttggtaaacatgcacttgcagggtcaagtcgcatcaatttctcaaaatcattcctcccaataagcatataactttgcttctcaagaactgcctggaaaaagttgggaaagcacccaagggaaagaaagagtgaatgagtagtagaagatagtatcagaactggcaagcatgatgaacccttactcagcaaggttcaagtcaatatttattaagtaaaagaaataatttcttaagacatatctcatttcctgaccatcaaaaaccttctataagagataaaatctcaaaagctatgaatacttctcaaaattttaaaaactcaaacttttctcaaaacccctgaccacttgacttaaatattcattttaaggttcattgtcatcattttgaatgtggatacaaaacaatggctgtaagggtaagaacaataaaaagtgagaagcactataactatattaacaagttgctaaactaaatagcatgaaaaaaaaaacagtgaagagaaaagatgataataaataattttgttctgttttttcatgtagaatattttcctcccttgtgcttgtatttcttctctaattaatacaagcttgaggttttctttcgaagtaaatacatatatcacaagttcatgttaatatgaatcaacattcttacctccatgtatgaagttcgacatctttcatatgttcgctccagaaaagtttgcacatatttcacaagatcaccagaaaatttaggcatcgcttgagcccaaccgagcacctggttaaacgactagatcaagttagggaacctaaacaacaatttattcatgagattaaaattaatcaaacttttaacaatatcccagaacagagcagaggagaaaagaaaacaatctgtactaaagagctataaaaaacttgcctccttcgctaagaaatctatagccaggagaccctgtaagacaggtcgacccttttcaactgctggagtataagttgcagcagtatgtgctcggggcctgaatgcagcgggacctaaaagagacgtgaacaaaattcagattctttattcaagacaaaagtagtagaaaaaaatcctaacagcctgaatgtgtcacaggaacataatctaacaatatcttgaccaattatatgatgcagaagtgttgctttgggctacccatagatcaggaaacccttcaaggaaatcaaagaaatcactctattgtaattttaaacagtttaatgtgttcaggcaaattttctcagttatgctgccccttatagcatgctttctcaagaacattccatcaatgactaaaagacctgctcattgcttaagttcctagggacatcaacagtcttcagacttgcttcgtgttttgtttagcaaaggtgtctctatgacccaagggtccttttttctcatgaacaggaagttgatgcacttcatcatatgtaggtttacagccatatttagatacacaatcaagagatatggaggtttacaaccatatttaaatactcaatcaagagatatgtccaaaaggtgcttagatgatcttaattttgcagtgaccttaaaagtaaggctaacacgttgataaagaaaatacatatatcatgtgttctcatttgattatatttttctgtaaagcaatagatgctacaattgcttaaaatatcaggagtcaactagtcgtagaaacttacttgatatagcttgctgtacactttttctgtagtctacaaacattgttggtaaaaagtggtcctttacaaaattctccacaaatgctagtaaaccatcattcctgtattttcagaagttatgagtaaagaaattaccactaggaacaaaaaaaaaaaaagaaaaaaggaaagccaatttaaaatcagagaagtaataactaaatgacagtggccatatgttatcaaattgagcatgcaatactatgatcatcatattctgatttgagaataatcacacatctgagaccatctatcaaacaagtaaataaatgcatgcccatgctaagtgaaaagagtatttggtttcaagcttaccctagctgggaatattttgttggcagcaatgaagcaactttgtctgtgaactggagcacgtagaataagaaattgccacaaactaaaaattagtaggaaaaccactatctacaattcatgtcattttgaataaaaaaaaaatacaattaatgtcactagatctggagaacagtctaacacctgcaaaacaggtcggtatatagatgctgcaagatatatgccttgctcaggcaagacagatgcggacccataaccttcttgcaatatgtttggacctcttctattccagccttggcgaataagatcaacccctagagattgaacaaagcaaaccaacagaaacattgatgacaaaaaagctatcatgagatgaacatgttaaaaattgaaacataaaagaaaagaatcataaaaaggtaacgcagttttggagttcttaataggagagagagcataccctcgttggggattgatatactagcatctgtgaagcgaaaagcaaaagtgagaccttcttctgccccatccctgcaatatttagcataaacatagcacaatttcaaaagctagaagaagcaatgcaacctcaagacagtaactcaaaaaataaccaggattagaatcagaggacctggaattccaaatgatgtagttgaaagaaaaaatttactacctcttctctttggaaggcaccttgtttgcaagtctagcagtttgtacagcagcatcagcagaggcagcttcaggagttgctcggagaatttcacaaatgagttgttggcactcactcttcacacaaaggataaaaaagggaaagacagaaaagatagaatgttcatgagaagtctaaggactagagtgtgtgttaaaattttcgtaaaatacaatgtttttgagaagattacttcttaataactgactaccagaagattatatgttgagcacctgtaatactgtcagggaaaatccaatactgtagcctccagttacttgagatgcttcagaatcaggattccaatttacatctactggcaatgattttgatgtgttttcaaactgaacagattttgactccaaaatctccccaacaacaacatgattttctgaacagttttagcaggaaaattagctttaacatccaaaatcaaatgtaacagagaaaatgtatcaacatccaaaacaaaggaaaaaggaaaattgtggcccaccaaatatacgaacaacagagtccaaaatcgaatctaagagttcctttgctgaagcctgtgcttttcctgtgggggtccattacaggcgagacagggcttactgtcaatagggtcccagtcagtgatat

SEQ ID NO: 185407 - DNA, 1332 bp, Cannabis indica
tatcccttccagctttgaatttcgtctcagagtgtcgctggcagctgatggagttttgaatatgatatcacgtattcggaatgtaaatggaaagccttttagtttttcatttgcttaccacacgtacttctcagtctctgacataaggtatgaaaaatagttcaaactggtctaaattttcccatttgcatcataaaatttgtaatttgttagagaatatatcctagagaccaagttgcttgtgtatagaacaacctcaatcagaggatttcccaactgttacttgggtgttgactccattctaattctaccttttctttattatctcttcatagtgaagtgaggatagaaggcctggagacacttgactatttagacaacctttgtcaaaaagagcgattcactgagcaagggaacgccataacattcgaatctgaagtaatgccacaatattttttaatctttattttacatggcagaagaaatcaataacttttcttacaaacacttcgttaccctgctaggtggatcgtgtttatgtcagtgcgcctaacgcaattgctatccttgatcatgaaaagaagaggacattcgtgataagaaaggagggactgccagacataggtaagctgtttttttaagatacatttatagaaattgggacccctggagcactttaagccaacctaaacagaaaaatggatgcataggttgttaagacaattcttttttccttgtgtgaaaaagaatagattcagctaattcttgaaagttcataaaccttcctaatctttcgtatctttgtggacagtggtttggaatccatgggagaaaaaatcaagagcaatgggggaccttggggatgaggaatacaaacagatggtttgtgttgatggagcagcaattgttagacctataactttaaagcctggcgaggaatggacagggcgaatgcagctcaaggttgttccttcaagtttttgcagcgaccatctcggtttctgatgttcaagagaagaaggccaaagacagttccaaggatgaagattgagagcctcaatttgtttgttgtttgtttctttatttttttgggaatataagatgttgagttgatgttaggatgttcaaatgtttagaaatagtaaagttatatggttagtgattacgtagaggttgtcaagtcttggtcccctccaggatatgggatgaaactaatcttaaagcctgtaattttttaaaaaatggcatgtcccttcttttcctttgttttattttcttttgctgaatactgaatagtaattgttgcagcttattatttttatatttttttgg

SEQ ID NO: 185408 - DNA, 2313 bp, Cannabis indica
aaaaaaaaaaacaaagttaattacttttaatttaaatatggaaagggttgattcagaactttggctagtgatatgcaaaatataatacttttataaaattttacatataaaatggcatttttaaaacattgggaaacttttctaaagaaaaaaagatgatgggtgcgttttgtaaaatttcatttttaaatttataaaaataaatatatattttttttattttctttaaaaataaaaacgtgttcgatgtttgtagttttaagaatgaaaaattcctcacaatatttttgtgttattttccaaggattattgtttgagatgatgttatcctaattttgcttaaaaactaatgaattaatgtacacactgaaaaataagggtttctattgtattagtataaatatgtaaagtgattcacaaataaataatcaatcaattaaaatgaattataattaagaacatttctattgggagatttacactgttttaaaaagtgtatttagagtttggcatgactcgaaaagtgcaacccaatactttgtatcattttaattttttagacaatgaggttttattagggccagtcttagggaagacaagtatagctaggttttattagggtcggtcttcaaaattatccccattttgaaaaacactatactatctacaattttataaaaatactataatttgtattagacctcataaagttcatatttgacccttatggttataagtggatataaattatatgtgtgactattcaatgtttatattaataatttaattatgatagttacattttttttatgatatgctataacaggttactaactggtaatcatatttaacaactagtggtttattttttattttttatttatatgaaaataaataaaattaggttagtatcaaattataggtaatttattaactatttttataggtaattagtatcaggttagtattacacacttgagtatcctcttcgagaattattggaaccctgaggtggtcgataagctgtgtttcttgaatttccataaatcaaatttgcttgcatcttgacagtgatgtcatccatggcaatgtggtgatcaaggcgactatagtgaaataagaggagagcctgaacttctttgatggtaggattgttgcttcttgtcgtgatcccaaacatgacaaaatcatattcaggacccagaccattcagaagttgaagtatgagatcttgatctttaacgaaaatccagaaacaacaagagaatcaacaagattctaaaccttgtcaacatagtcgaagatggagagattaccttttctgatattggaaacgagcccttaagctggagaagatacgaacgagactggcttgagaatttatgctccaaggctcgccataccgagaaagaagtggtgaagttcgcaacagaggcaagaactccctctgacattggcaatcgtaaccaagagagaagtagctggtctttctgtttccattagccatacatggatttggattcatcgttgagaagagtgagaggggaagggacacttgtgaagaggatgttgtcgaattcatggccaatcacaataggaataacttgtgattttcatgttaaaaaattcatgtgatcaagtttaatggtgaaagatgatgaaagggagctagaaaaaagattccataaggaggtggcctcaattggagttactccaactagaactggagtggcttggagatcatagaatcaattgagaaagattccattgatgtaagtcaatagcaactgataccatgtaaagattaaagaaaagaagagcacaaagtttcaatgaaatgtgtttagactctttttatttataaagaaatgtagagtacaaaactaatcaagaaaaactaattacaactaataaaaaataactaattaactaatcactaacagttagtccaagtaaaaacttatatatactggtgaaacaattattgcatgtggaaaaattacaactaatgtgcagaatcaaatcaactaaaaatttaatcaacaaacaatttgcaatgacaatattaacaattcacaaataataatcggagataaaatattaatgcacaaagtaatcaaaaccagaaaaataaagcaataaaataataaaatcatcaccaagatatatattggttcaaataccctagattaatgtgatctatagctctacttcagttttgaaacaccaccaaattaatcgtctttattgattgagcaagaacatcatacaatcaagatcaattctctatctagattctctctctctctctct

SEQ ID NO: 185409 - DNA, 2564 bp, Cannabis indica
  modified_base (685)..(685): a, c, t, g, unknown or other
aagttctatttttttatcgttaaaagttagcatttttatctcaagaactttgaccaatacaaaatgttgccctcttttattaaaaaataaataaaaattataatattctattaattttgagaaaattaataaaaattgtaaaaaaaatctcataaaatattaaattaattaaaaaatacttaaaaaacctaaattattctttaaaaaatatattttcaaactttattttacttataaaaacaaatcttaaaaaaatcaaactaaaattattgaaaatttaataaataaattaaacaaattaagattttttgaagaaaaaatcaaacttatttatatttacaaactcatagcttaaaaaataaagaaaaataattaaaaattcaataaaaacataaaattattttgaaaaaaaggtagaaattaaactaaaaaaatgttatatttacttaaacaaatttagattttggaaaaaaaataaatttaataaaaatatctaaatgtatttttaataaaaataaatatttttaaattatttaattagttttaaaggtttaattcttttttaattttttaatcattcaaaatgattttttttttaaataaattatttttttaagatttattaaaaaaatattaaatcgttctcatttttattttgaaagatacgatttaatagttgtcaatnttaaaagggcaaaattgttaattaattaaaaatatatcaacatttaaaacgagaataatgagacgaacttaatagaagattaaatttgtgtaaatgcaaaagttcaaagaaaaattcttaacaaaccttatattttaaaaaacaaaatcactattatcgaaatttcacatgccaaaatggctaaattattcattaatttatgaatgttcccaaacaaaggattagaactattttatcccagtgtccaaacacctctcctcagctctcgcttcactctgtcacacacgaacacgaagccgcccctcacttttccattttcttctctgcttcttgccctagtattcctcggcgtcgctcctcctactcacggtggtagtttgaagctctctgctccgacatagctctcaacggaagcttctctcctttccctgttccgtttttttgggtattggtctatctcaatctccatctcagttccagaactttatttttatagcttgatgtcgtttatgaatggcagctctctgttttggttactacttcttaggattgaacaacaaaacactaacgagagtgctctctgtttgttttaggggatttgtgtattgtttatgttgttgttgttgttttttcaagcggggaaatttgaattgataatggccttcttactgttcgacgaaatgcttaagagagacttgtgtaattgctttgtgaattaattatatgacttgttgagtctgtaaacgtgagatttttagagttgcctgcttaatgtttgatgaaatgcgtttatctgagactctttctttcctagtttgctttgtgaattggtttctttcgtgatagtcattacttctctatcttgagatttgaggtttagtagaagaaatttcccaccttcatccaatgtgttgggaagtctcctaccaggtttttcctgcaattattttttctcgtaggttgattggctgaaacaaaccaatttagctgtaacactgtattaggaactaaggcatttagttttgcaagatttgatattacctagttgatgatttaatggctacattgtgacactaattgcttttggaacttaacagatttgaaacaaaatggatgatagtctctatgatgagttcgggaactatataggacctgagattgagtctgacctagagagtgatagggatgatgatgaagatcttccagatagtaggcctggggaagatgctgcggcatcagatggtgaagatgctgctgctgcttccaatgggtggttgactgcctccaatgatattgatatggataatcagattgtccttgctgaggacaagaagtactatcctactgcagaggaggtttatggtgaagatgttgagacattggttatggatgaggacgaccaacctctcgaacaaccaattatcaaacctgtcagaaatatcaaatttgaagttggggtaaaggattcttcaacttatgtgtcgacacaattccttgttggtctaatgtcgaacccaactcttgtacgaaatgtagcacttgttgggcatttgcagcatgatgggaagacagtcttcatggatatgttgattgagcaaactcaccatatgtcaacgtttgattcacatagtgagaaacatacgagatacactgatacaagaattgatgagcaagagagaaggatatcaatcaaagcagttccaatgacccttgttctcgaggatagcaattctaaatcctacctctgtaatatcatggacacccctggtcatgtcaatttctctgatgaaatgactgctgccttgagacttgctgatagtgctgtcttgattgtggatgctgcagaaggagtcatggtaagtccctgtgtctctcttct

SEQ ID NO: 185410 - DNA, 4908 bp, Cannabis indica
tcaaatagttcttgctcatgtgtcgagaatttatcaagaataaattatatactttataataactcacattatttcttgtgtatggtggatcaatttggaagactacagtttgagcttataatcaaccaaaaggattcaacttacgataagtttaaaggataccatgatagtcatcaagaggtatatattcctttcatgtaatttatgttttgattaatatttatatatatggagatccattggggctatggtacaatgataatcagatatacaaatctttcactgcgtacctaagttagtaccgtaaaaccaacacctggtgcaccagcatgcactaagcccatatatgtctcatcaaatctgttgttacagtgagtagtagagtgatcatacttgccacaaacttggcaagttgatctagggccaccaaatcttcctcctctgcctctattgttgtgcctttctcaattgttgttgttatggcctcctcttcttctattactaccactatatcctaagtgattgttcccacctgagtagccagatttccacgagtgtggggtttgtttgcatttggtgagaagggagtgttttgacatttttttggtgcctgagatgacactcagtcattctatcttattgttaaagctcaataagatgtcctgcaatattggtccagtagtagaggacatggcctctatttaaagcacaatgagaatgtaatctaaatctaaaccagataacacattagtaataaccaaagactcaggatatggatcatctgctaagtccaaggcatcaacccattgtcttttctatttcatgtaatcaaccatgctgagagaacctttcttagtcgtttgaattttcgctctatactcatccatttttcccttggattgagctccatccagggcttcaagtgcttgccaaaatgatactgaagaatcacaccaaataacttcagttgtcatcccttctgtcatagacccatagatacatcccatgagtagttgttcgtagacaatccactgctcaaactctatattcacctaaagaccagatctgattttccatcatcacctagaggagttggaatgaactcatttggttttttttttttgttccttaaggtatccatccagacatggcctctaacaatagtagacactattatttttccaaagaaaaaaattcttcctatctaatttgagggcagagggttggttattgtgcttccaaattgtaggaaaaccaccctagaggcttagttttctaaaattattgaagactcgttagcaccatttgctaccaactagaactaaaaaaaattggggtgtttttgttattgattgattgccaattgacatcttgccagaactagctctaccaaattaaaaaaaatgcagagaaggcttttgcaaaaatattcaactcaatgagcattaattctttcattcctttatataacctaaatatacaatacaatatagaacaataaatgagaatattttgcaaaacacaaaattaagaaaattgatacacaatgatgagtattttgacttttactactacgattagtcttatctctgtcatatgattttgagtattttagtcatgtctctataagatggttttaagtattttattcttgtctgtgtgacataattttattttgattcgtggttggtttttatttgttcttcgattaattgctcgccatcaaattgttgtaaataataagtactctgtgattgaaggagttgttagtagtagtacagttacatgctcaagctacgaggttgaatgaacttgttggaataatttctatttttgtatcttctgagcggtagatgaaactgaatataagtgttctaaaagttaacaatgatactataatatattaatttttttttaatttctttgtcaaacgatatgggaattagacagcattatttgattcatttttctaatactaatgttaattatgtctctaataaacagatgtctcaattaaattacatattattattttaattgattgctattatgatttattaaaaaaaaatctctaaagataaaacatataatatgatttataaaaatctattatattgttttatataggacagggttaggcccatttcaagaggcaaggacttgatattttagtgtacccgttgaactaatctgatcatgttctttgactcatatacatatacatgtaggatgaatttgactatttttgtttctgtcaataatgcatggatctgagtttgcataattatatatacacacatatatatgatagtgatgatgggcctcactcagatttaggttagatgaattcatttgttctttttttttaatatatgtgatgaatttatttgtggtggcatgtcatgttcatgtttgatgtttcataaaattcacaacacagaatccaaagctaacaaagttgtattattttgtttatgcaattacattattaaattttattctctggggggtttttctctctcactcccccaccttttgaacaccctatatggctatatacatataatatttaccattaattgatgctaaatttgagtggtaataaagaatgacatagtttattgattatggttattaatctctatccctatatgtaatgtagtcactataactttctataaaagaaatttgatgtaacatgcatatattagagtaaaaataataaattaaactgaagtttgtcaaaattggtaggatgagcctatttttgggtatatccgaaatcacccttctgattcaaaaaaactgttccacttgctcggtctctctctttccctctcgctcgttctctctttcccgtttgcgactccccaccaaacggcaccacgtcgagccaccaagcaccgagctcagaccttactcacctaaatggagagccaccgtggagatctccgagacccacaacatttgacgaaggagattcacaacatttgacgaatcatgcaccgaccttcactatctccaccaccgtcagcaaaacagagacccaaaatcaacccttagaatcagacaacccgaggtgtacaaaaaaatgtcgaaagtaatctcaattgaaaaatatattgtgtattgtggtatgttaggggggagggagttatgttaagtccgatggggtatgatagatggacaatatatgtctgatggttgtaatgttgaatatgtaatttgaagatgagtacccgataatgggacgatgaggggtctgatagtctgtaatttttttagcttttgatttataattggtggacaatatgggtacgatagtttgacgatggggggtcctcaatgtcttctctagtaaatattttttctttgaatttaccgtagcttgtcgaaaaaataatggatcgctaaatcttccaacatcactggttcctctagcatcactggtaccgtctggatgactagtactagtaccaggcgtttgaaaatcttctctacagggtcttcttctaagtgttgtttgcttgggtatttggtacgatagtggagccaggttcaaagctatatcagggacgtatgtctcttggttttctcttacatcatcattgccatcaaaataagcttcagggttaggaccatcaccaaactcatcatgcaagggtatttgtgctacatggttaattatcggcatgatagtgtttgattcaggtaacacatcagttagcaacaacttcagatttattttcgaaacataagtcttaacctctctacaaatatccttaacaatacttgatggaggactaagatcgatacaaacaatcttcttcaccaaatgcacaaaaaggggaacaaatttatctagcttctttgaaagcattgataaatataaacttagacgcatatcattatttataatttcaagatgatatattaatcatttcatgtacttgtaattaacttctaatttcaagtcatattgcactttgtcaatctccagctctaagtagaaaagttcaacccattgtgagtaacttatgttcttattaatcttgaatatcgaattttttgttccattaaaaatataatttctactctgacactccaaataccattatacatcaagaacgcaaacacagttaaccttatcatacgaaaagaaaaaaaataggaaaaaactcaaaaagaactatttaaataaatattaaatttacagaaataatgaaaactatcggtcatatatcggcacaccatcagtcactgttttgcacgaggctcagatgagtaaaaatagtacatattagactactatcaagcaacattgtactcatagggcttgtaagttttaagaaacaactattggcggtcatcggagcactatcaggctatatcgtccaactaactatgctccatcatatcgagatgatatcccgccactatcaaaattttatcctaaccttcaaaccatacaaacaatacccaaaaaaattcagaaaatgtaaatttctacctgaactcaatttccagcaaaaaatattaacaaaccacatatcgaacatctaaacaacattcttaatcatcaaaataagaaaaataacaacaaaaatcaaagaaaaacactaacccattattttcttgaaaatagaccttggctcccttcaattatgtacaatgtcaaccgatttgttttcttcagtcaaataaatgtctttgttacaagattttagtgttaaagtcttgtacaattgataatttttttagagaaaaagaaaaaaaaattagtttcggacatgagaataagtaaaagaaaagaaaagagaaagagaagggaaaatggacgtgataatttttttctgttttgtttattctcctcttggattggatgagtcttgacatctgtcatggttt

SEQ ID NO: 185411 - DNA, 4743 bp, Cannabis indica
agctaagaaaccgacacatgcatcccacaccaaatatcttggattaaatattgaggtcaatggaattcaggatccttgaaccttgcccacaagcaggaatgggtcctctccatctggttcaaaagttaccattatcctttttccatcgatggttacattacatatttttttgcaagaagtataacatcaaaatcctctaaattcaatcaaatcaattgataaccccattcccttcataaacaccaaaagggacctaacccacctgctggaggtaacaaattttttagtaggcattaaggtaccaaaacttctttgtaaagcatctctaggtctatgcagatttccaatcaatattctcgacacatataaatacgttgcaccaaaagcatgaactaaagtattatctctcttttgttctagtcgctgaagctatagacaatttcttttcaaatagtcaactaccccactccagaagcaggctctagtttagcattcaccctgacaacaactcttgcacctcaagaattctagataaattctccaattttttttcacctagttggaaaccttgattactttagaatctctaattaagacccataactgatggattgttaggccttcttttacgatcattcgggtcaacatctttactataatcaacaccaagtgattgtttccaagaatctctcctcaaaccgttcctctttcaaatttgatcctctacaccctcagctgcgagagcaactcaattacctaagcataagtgcagacaacccttagttctttggcaactacaattatatctcgagcgatattttcttccaatactcgaataaacttggtctctctagcagccttagtggccattttatccaaagcaatctttgttaaccaaataaatttggtggcatactctgtcactgccacacttccttgggttaatcgtataagttctctgctttaacaacctaaataaatttgttataataattttcatggaacaaagcctagaaagtatctcaggtcttgttatttagattataactatatgatacaatttcccccactagacgcgggcatcattacgcaacatgttaatgacatatctaacccaatcattactcatccattactccaccttgagtggatcagcagcactctcttacactggcggattctactttctgaatcgcttgaataatggcttcacagaatttgcttgcatcctatggcactaccaaatgtgccagttgagcgcgctgctccctcaattcacaactctgatcacctactgccagttggcctcctacatcacggcataaatcaagacctccagatggtagaaatccacctaggcaaagcatccggacatcaaagtacaattatgatcctctattgccacccccaacgcatacgtttatcccatccaccacaggtcaaatgtctagggacagcactgaactgcatccactacctccagcacctttcacacttcttgtcaagcccttgcaattgatggaaagggacgaagctcgcctggaagtagtggataaattttaccaaaagagccatggttgtgagattgaggagatgaataagatatccaacaatatctccttcatgcgtaatgcagagtttaaagattacgaatggtggaacgaggctgcccctcatcttgtgaacagagttgatttaacaaagaagctttttcctcacgttgggactgatgtgtcactaattttggcagacctattggaagagagcgctaccacaagctataggcgcggggctaatatgttttccatgatggcaagcagggatccgatgtacgtggttgactccatgagggcccaggccaatgcttaaagttccacatttctctaatatgaataaatgttttgtgttttcactttatttttattcacttatgttctttcttttgtagattggcttgatggtggacaagaactactccctaatcgtcaaactggcttataacctagatgtgctgagggcggagcatgccaacgctgagcagaggagggaagaggaggggagggctttagctaaagccaatgccaagatggaggctaccgttaagcagaaggtgtctgaatccttggacaaatcattgaccaacaaatgaaaggcgaccaagacagaaagggagtgtggatacatgtataaagacttgcattccaaggctcttacccaaatcacagactttgaaactgatctgaagcaggccaagatggacgtccaagagaaggagaagaagactccaatcttgtctcaatagtatgataagcaagctaagattattgaagataaattcattaatgagactactttggagaaaaaggtgaagctacatctcagcatgtagcagaaggtagaggaacctgaagtagaagctatcaagagggctgaggaggatgagagtaaattggctgcatcgacaaagtctcttgaggaattccaaaaaataataactaaagtagagggtgaaagttaaaatttaaagggatgtctttaggagtaagaaccctagcatgacaaggctctagaataggcctttgactactcattatatactctctggcagctcaaaaattgatgatcaatcttttgcccaagctgttggcattggagtaggcaggcaaagctaagggaatacctcagggataaggagcggtcaatcctggaaccaccattcccattggtgagaatatgaactactctgctcttctagcttctaaattgcctatttcgactgagtctactatcccagaggccccatctaatgtctaagtccaggatgtgcaatcatttgataactccgctcagccataatgtatatttattttatttttctttttggggggacaagggttcacctttttgagtgtgcggagacaatatattatacccttgctgtggggttttcaagtacttggtactatttattaattcttttgatattttaactttatattgtagaaattgctatgttttaatttttccaacctcgtgaggttctagttccaaaggcataaacctttagtttattttttttgattaaatacttacacttgaatattctttgtgagaatgcaattacaataaggtttatttgaagatttgagtagctaattaattatctcataattgaacattttagtttcatttaccatttattttcagggtttttcaaaatttgctctttaattgacctgaattaattaatttaagtgacatgaatgctatggcagcagcttaattccaattgcttgaggtggccttacattggccaaatgttggtggtccacttgagttgttagccaggtgcagcaggttttggtgactcttctcgcgacggtcagctggcatgcatttctttgggagcattggagggagagtgaagcatgcacacttttcctccttctcccttagacttcatggcgtaagggaatcacttaatttccctctttttccattatgctggttagagccatcattgtagaacatgccttttaccagggatcatttgtgttggtcggcatgacaaatagtacttggggcactattatgccttgtgtttgttcgatgctaattttctctcttatttgggcttgctggatagcttcttccaactttatgaagccatctgctcgatcaagtaacaatttcatgttgttcgctaagatccttctaatatctttctaaggtaggatgcctctatgcatggtcatatatcggccttcttctatcaggcatttgaccttggtggcctaagtcatgaactgttgaatgtagtccttcaaaggctcatcttgtctttgctttattttgacaagatcctctagttgtgaaggtatttgtcttgaagaagagaactgaatatagaactctcatgagaattcttcccaagaattaaatctttatggggctagcttgaaataccattgttgggcttcttcagctagagttgtcgaaaagatttgacatcgcacatctctagatacttgttggagatctatttggatctcaaagaatctcaagcgtactaggggatcttctttccccatgtacatcttccacatcgacatcttgaacttgggcaagggcaagacatttatgtatgccgagaatggtgatccctttgacctgtctagctcaagttctaaacattttggacaagcaaaacccattagaatttctcgtatttgatccaattgtgtttgcaaagaaggatctattactgtaggggcctggtttgtttgcccctcctacagcctcgaatttgctagagttttgctggccctacactaagagagtgtatgttagaggtcggctagccctagccttggaaactgtccatggctggccagcctagtgttgtgtagggtcaggccgcccatgattcccttattagtttgtggagtcggtgtgtttataggaggtagatcacaccagttgctaaagtcaggtaaatctagatacctgaagtgatcgatttcacttctcaagttatcactttgggtgttttcacctgctccaacttctatccggttgaagatttgcctttaagtggctccctcaactccgagaaggagtgtactaccttagtaggccagaggtactcgtactagtggttgaacaacaaaaggttggttgatggggtttattattgaacctgagatccttggctagccacccactgccctttactttctttgt

SEQ ID NO: 185412 - DNA, 3433 bp, Cannabis indica
tttatttatttattttgagaaaagaaaacaatgttatattgttttacttgcctatgtaggtagttatttaggaaagaaaaaagcaaagataattaaggggtcattatccatattaattgttgccgacaaatttatagaacgatgattaacaagttagaaaaataattatagagcttgtaaaattatagaatagatacaagtaagcttatattaataggaccatacgaccctaccaaaatgttagctagaaacactagtgtttggtttttttttccttaaaaaattgcactagagtggttttaattggatcaatgcctttaaaaaaacattattacttttattttattttatgttatttaaagtttatttatagaggatatgataaaattaaaacttaaaagcaaaggtagagaaaaagagaaagaagtgtgtgtgtagagtggagtgtcaagtggtgtggacttcagctggcgccttacatgtaattacaacgaaaacgacgtcgtctttcaaattgccgttatgaggaacatcattagcgtgattaaacaaaattaaaaaaagaaaattaagggactgaaagcgaaatagtcgcaaataaaaaagatcggtgtttgtttctctctcttctgcttaaactgtggttcttgggttggagaagagggagagttgaaatctgagatagagtcagagacgaaggccaattggttatttgactctcttttatcactcaactgcattctcagaagaacccatggattccgattgcgactagcatttctcgattactgctctactcttcacttctttctttacctctctctctattgtcttcattccactggtaagttttatttctctttctagaattgtcttcttcttgaagattgctttgcttttttttttttaattctttcagttgtaattgcagcttccgatccacaatgggttcgaggcggcaaacgcttgcggctgccgccctgaggggccgaggcggtgctggatctcgatttccttttgtcattcttgtgttcttcgcgatgcttctcgcgcccttgatttttttcttcggccgtgggctccacgcctcttcttgtcagttctcgacttccttttttttttgtctgcctaatattttgatttaggttgatgagatttgtagatccaattatgttgctctatttggtgtctgtgtttcctattgtccttcttgaaattacgttttttggatttgaatgcgggtagtgattcctggtctcagttgcaatctcattttgcttaaggaagcattaacgattttcttcggaagtaagaattgaatattagactaatttgaattttacgcgtgctgggtttgatttgggactaagctgagaaatactcaacttggaaagtgtttaggtggggctttttcgaaagagattgattgccttgtttgttctgggtaacctggattggctgccctggtggcattgagttcattttgggattattgggtttgaagtttttaggtggattttaatgacttccgcattgcacctggaacaagctacttttgttcccctaatcagtagtgttgatatgataatgagaatttgcgagtgtaatttcaatgtttggtggaatgctgattgtgcatgtcattaaacagtgatcaaatttttgttgtattttttaagacagccttaaattaaatacttcaaaagatgtagagttactaatttgtcttagacatcgtcaaaagaatatttcagccgaaactgtggtgaaccttgctaggatcttagttatggtattgtttctacttctatgcatgcgtagatcattgatgaggatgtatttaggcttatctttgattaccatgtgaagttgatattttaattaacaattgtttgaagaacatggtgaaagttctatattgtagtctttgatttgcaatttgtgtttctggcttgactagactcccaatgattctttactttcgtagcaatgtcaatcttagtttaagtatattgtgtgctttgtccacttgaggctagccgatttgggttagtgcgtgagtcatctggggttcgacttttttaaaagtattattaacaacaaaaactgtattgtgtactcttacctgtgctttttaagattaacaaaagaaccttttaggattgtatagctgttcacagacaggatttcattttggatacatcttagaagcttgccatggtgcatacattaacttccaggcaatgagaattttaaaggttaacggttgagaaccagattagtttatcttgttgagatatatgattacttttcattgtctcttaggaaaacttgtagtggtaaagtttctggcaaactgaaccagagatgttagctcctcatttgcttttaggctatagcaaaaagaaactgtcagtaagaaagagctgacacggttttctgttacttgagtcctgatttgacattttccagaaattcaatcaggtgttgatattcttgtcattctgaaaatctgttgtttgccagtattatgtatgcattgtgatgcagtttatagaactgattattgttattaatgcagatgacaatgatattatatctgtccccggaaaacaggtattattttgcttgcatttatcatcctgatataagtggcttaccaagcacactcactttgtattatgtatttatagaatttatatatgcagtttttatatttatatgtataactactttgttatgtattttgatgtttattttaaacatgtttgcagggtgtgggttggagagaaaggctggctacgcagcacctaaaatcccttttctccaaagaggcaagtgcatgcatgttttatttcatatgagattggtagtagctgtatttttattcattatcttatttagtaaattgcttaatattcaggtcatcgatgtaatcattaacagcacaaaggacacaggaccttacagccttgattcatttagaaaaaataatttgtctgcttcatggaaatttgttggtgtagatacttcaattgttactaattctgaggtgagaatgctctgcttgactttttaacaaaggtgacattataaaagccgtgctcagaaagctatccattttatacatgcttagttcctgatgtgaatttcattgctatttgtgctcaaaggtaaaccaaacagctccagaatttagacaagaaccgccaaaactcaaagggggcaattcgacaggtggaaatatgttgttttatctttgcaaagcttcttcttcttcttctttttttgttgggcatgtttctgatctcgttgtgtaatgcagatcatcacagtcaatctactgactcacctgcaaaactagcccgaagggtaattactcaacttggattctttgagtttttttttttttttggggggttaggggggttta

SEQ ID NO: 185413 - DNA, 5420 bp, Cannabis indica
atatatatatatatattatgaatcagtaaaaaatactaatttgcattttattaaccaaaataaaatcaaaacgtattacgaacccccacaatagattatttttctttacaagaaaagacaatgttattatgtgaaaattgtaacatgggtaattaatacaaagaagaaaaacgcacgtgttgagtggctcttttatctgttctactactacattaaagtagcacccgttattaattattgtctcagaaactcccatacatattgagcggtccttatagagagggtatcgaagggtattttcttttttcttttatataagagaaggctatcactattggcaattatagtgaaaacgattcaaggaatggtctttaataaaaattgagcatattctttgtacgatttctaaaaataaaatatcacatttccctattaatttgtatcaactttttatttatttatttttttttacacaaactaaaatatttagaatattatatagtattatgttaaattaggcaatgggacatgttagagaacaagactcggcccaaggtggaggcccaatagccttagactaagagaccatgggtaaacaaatcagcaagtggatccaagtggaagcccaaagtcacaaccccaatagtgttgctgagaagagaggatcgggcatggaggagttggttccagtggctgctgaagaagaaggagcgcgtggtaagagggtgcgcgtgaagccaagatggatgaaggagtttgttaggatggagaggcgttgagaaactctcaccaattccaattttctgttgcttttctgttttatgaattttgctttactcatataaatactcaattgtaaccatggggattttttatcaaagaaattgcaagctgaaaggcatttgggagttttgcactgactcgaagagtgcgtttggtattattggtgctttcattgatttggattcaccatgaagaatgaggaaatcgccggactgctacaggcattggagctcaacttcaaacagcattccgatgctcaatttcagaagttttcagctctgttggatcagcacgtatcgaagacggaggagcgactagctcagatgccctctcctacttcgggtgaatcggagggtaacatgagtggggaacgggacactggccgatcgggaaacagacgttcggaggcgatggatgacaatagagaactgaattctttactcaaaacattgagggtgaaggtacccaggtttgatggagctaatgtagaggattgggtgtacaaaatcaacaagttctttgacttgcataaggtgggggatgatatgcgactgacaatggtggcttttcatttggagggaacgccatcgacttggttccaatggatggaaaaagggggtgcaattgcggattggtcttcttttttgagagcattacatcagcgttttgggacatcaatctatgatgatcctttgggaaggatttctaagttaactcagacgggtcgagtctcggattatcgagccgaattcgaagcactgatgccaagaattacaggtgtgtcggaatcaatgtttctgaatttttttgtgtggggattgaagatggaaattcggagggaatcattgttgttgaaaccagtagatttaagcgatgctatggcgaaagctcaattgtttaaagatcggaatgaagatcttagtggccgacgtcgaggggattcatctcgcactccatggtacactaaaaccccaacatcctcagctgctacggccaacagtcctacggggtcatataaatcaggtacttctcaacaaaccactcccactgctagcatcgctccattaccaattaagaaactctctccagccgaactcaaggatcagagagacaagggcctctgttttacttgtgatgagaagttcacaaatgtaagaatcgaatgcttgtactatgtgcctcggaggaagacgatacgaatatggctatggaacacacggggtctgagttggaggatagtacagaagatgaaatcagtttgaactctctgtccaacccattgaatccacgcatcttcagaatcatggcacaacacggacccaagcagctggaagttgtaattgatacgggtagcaacaacaactttatccaagaatctttggtgactcaattacaattgcaatgtgaggacacaaaacgttttaaagtctatatgggtagtggccattttttgttgtgttgaaaactatgccgaggggtggaattattgttgcagggacatcgatttgtggtggatttatacgtgctacccatttgtggcttggatgtggtattagggatgcaatggttacaaactctaggtccttgtattcatgaccacaaggctctcactatggaattctcatgggaaggaagtgtggttaaacttgctggtgctaaggatgtcaaagcacaccaactatccttttctcaaatgcacacattgatccaagaaggagatgtgcgggactgttatcgactttgtgcaactatcacagaacaagacttgaataccaaaacgctcaccacagaacaagagatcttgccaaaagaaggggccgagctattgacggagtttcaagatatttttgccgaacccaaaagtcttccaccacactgcaacatggatcacaaattttttttacaaccagggacacaacccattaatgtgcgaccctatcgatatccttatttccaaaaggatataattgagcagctcatgcacgaaatgaaggaatatggttttgtaagaactagtaccagtccctattcttcacctgttctattggtcaagaaaaaggatggtacatggaggttttgtgtggattatagggctctcaacggtattaccatcaaggatcgttttcccattccgacaatagacgaactattagacgaattgggtcaagctcaagtgttctctaaacttgatcttcgagctggttatcaccaaattagaatggatccaagggacatccataagaccacttttcgcacccacgagggacattacgagttcgttgttatgccgtttggactcacaaacgccccctcaacatttcaagcgacaatgaaccatgttttcagaccattcttaaggcgctttgtcacggtgtttttcgatgacattctagtgtacaaccgctcttgtgaagaccatgtgacacacttgagatcagtgttacaattgttgagaagccataacttttatgccaagcgcagcaagtgtcaattctttcaagacactattgaatatttggggcatattgtttcgtatcaaggagttcgggcagacccaacaaaaacagatgctatgatcaattggccaaccccaagtacactcaaacagctccgcggattcctgggtctgacggggtactatcgtcgcttcgtagctcggtacgctaccattgcagcccccctaaccgcattacttaagaaggataatttccactggtctacagaggcggcacaggcttttacgaagttaaaaacagccatgacaactacaccagtccttcatttacccgatttttctaagaactttgtggtcgaaactgatgcttctaatgtgggtattggtgctgttttgatgcaggaaggtcatccactagcctactttagcaaaaagttgggcccaaaatttctccaagcttccacatacagtaaagagatgagagccatagtggaggcggtgactaaatggcgccagtatttgttgggcagacactttatcattcggactgaccaccgcagcctcaaagaattactcactcaagtgattcaaactccggagcaacaataatttttacacaagttgatgggctaccagttttccattgaatataaaatggggaaacaaaactcggcggcggatgcactctcacggcagcaagctgaacaacaaccaacactcatgttggcgatgagtacggggtcatatgagttcttggatgagttgagactggagaatataacttccccggacttacggttattactccaccagcttcaagaagggagtggggacacctccttatactcagtccgagacggtctcctttatcaccatcatcgcttggtgatcagtaagaattctaatctaaaagcccagttattatcagagtttcactcttcgcatatcggaggtcatgcaggtgttgagagaacttttttacggttgggagaaaatttcttttggccgaggatgcgcaaagatgttaaagaattcgtccgcacctgcccaacatgtcagaccatcaaatactccactaaggcaccatatgggttacttcaaccacttgcaataccggaaagagtttgggtggacttggctatggattttattgtgggtttgccaaattctaatggagctaccaacatcctagtggtggtagatagattcaccatatatgctcactttggagcattgccaactcattatactgctacaaaggttgccgaactatttacgaagatggtgattaaacttcatgggctaccaagaaccatagtgtcggatcgtgacccaatctttacaagagccttttggaagaagttatttgaacttatgggaacatctctcaacatgagttcctcttatcatcctcaaaccgacggccaaacggaagtcaccaatagatatttggagcaatatctaagagcattctccgcggacaatcccaaacaatggagcagatttttatcatgggctgaatacaactataacacaagccaccattcggctattgagatgacaccattctaggccgtttatggcagaacaccaccaaccataccagcatacacaagggggtctactacaatacaagcggttaaagatgagttgctcactcgggatgacattctgcaacatttaaagtctcacttagagaaggcacgacaccgaatgcaacagcaagccaataagcagagaagggacatccaatttcaagtgggagacttagtcttggtcaagctacagccataccgacagactactgtagcaaaaaggttgaatgctaaactttgtcgacgtttcttcggacctttcgctgttgctgctagagttggggaagtcgcttacaagcttgcattgccttcccacagccgcattcaccctacattccatgtctcgcttttaaagccatatcatggaaaggaccctactacttgttacccattgccggagttaagtgtggctaataagcctttgatgatgccaaatgcaatactcgcttcccacatcattccaagctctacaggatcgatcaagcaagttctagtccaatggactcttagttcacccgaagatgcgacatgggaagagttcacttcactttgcaacacatacgggctgactaaccttgaggacaagg

SEQ ID NO: 185414 - DNA, 627 bp, Cannabis indica
gagtaacgcacgtgcaaattagacaaaattgaaattctcatgcacttttcactagaaaagagattggacatcaacgaaacatacgtcccggggacttttccccagacttgggcacccagggtggctcccaagagatctatgagcgcctaggttgacgtatgtacccctggggcgctttggcacatatttcgaggaagtatctcaagaattttcctcattttttttcaacgatgaagagaaaatttcttctagaaaacaaacaaagtcatatgaagcccagatcacatgctgggcgcccatgttgacagtttccctatcactgggcacccaagttgatgtattccacagttcgtgtggttctggtgcttagaatgcaattttgtcttgagcataactcttatttttctcccaaaacaacatatggatgtagaattagaaggatccatcatccaagtggtggttcaatcccaagcaccaccagacattagccctgggcgcctagtttgacattcaacctaaagctcagggtttcgttcatcaaataacagttttgttccagtcataggtcttatttctttttcaaagtaagatttggatatcttaacaagcaatatatcatgtaaatgt

SEQ ID NO: 185415 - DNA, 2950 bp, Cannabis indica
atgttgttgttcccactttattttatcaaatactagttccaaatgtgtcttttaattttgtgtgcttacattaacgtgtcaatctagctagcttgattttgtctaaggcaatcatttttgtttagttttaaataattgggtcattttgctagtggtgttattgatttgccatttggacataaactagataacattattttttaaaaaaaatccagaaaatgaaatcactgatcagtcctacatatttttatgtcttagtgatgctttttcttctgtgtcatggttcgtgtttctggtttatttggatgcacatagtggtggtcaatgaatgttaagagtgactagaaacctttattttcgtccttgttatattgctgagtgatgtctattgtttgttatgttagcctgcaattatggaaatggaaaatgggttgtagaccacaaccggtctttatattcagggttcggctgtaagcaatggctgtcagggatgtgggcttgccggatgacacaacgtacagattttgcttatgagaaactgcggtggcaaccaaaagattgtcaattggaagaatttgaaggctcaaagtttctaaaaaggtactagaacattctaaaaatgttttaatgtagaggttagaaattcatgtggattatggttcaaggttttgtacaaaatcattgaatctgacctaacttcccttttttggttgctcagtctagcttgctgagatgacatatgcagaaagattggtccttcacacttttcttcctaatgtaactttttatgcgctctaattattatggcattgagttgggtggggggtggggtggggggtggggtgtgtgcgtgtgggttcctgttgttgccttatgctcaaggcctctgcacatggtatgacaaccgaaagattacacaaatcacaatctcagtggaactaattttttgttgtgggtgtgcatgattttctctttatgagaacagatgctgttgttcagtactttatgtcacattagattacctccttcctcaccgattttgattttttgacttatggtgttttcttgtagatctgcctccacatctaattccacgtgtccttttttaagttgtatttgagtagccaataatatgcaggaatatgatgtttgcattgttttttacaggatggaaaataaaactttggcttttgttggagactcactgggcagacagcagttccagtctctaatgtgcatggtgacgggtggtcatgagagggatgatgtcattgatgttggggaagagtatggaattgcccgtgcttatggcaatgctcggcctagcgggtgggcatatcgattccccagtactaataccaccattctctactactggtcagcaagcctctgctatatagagcccattgacaagtcaaatccaaatacagaatatgccatgcatcttgatcgtcctgcagcattcttagttcaaaatattcacagatttgatgctttgattctgaacacggggcaccattggaatcgaggaaagatcaatgcaaaccgctgggtaatgcatgttagaggtgcacggaacactgataagaatatacaaatgatttggaaggcaagaaatctgacagttcacagcgttatcaaatgggtgaactcccagttacctaaatatcctaatttgaaggtcttttatcgatctatctcacctaggcattttgttggcggggaatggaacaccgggggaagttgtgacaataccactcccatgtccataggcaaggaagtagaacgagatgagtctagtgattctgttgctgcagcagcggtgaagggaacaggggttaagctgttggacattacggatctgtcccagcttcgggatgaggctcatatatcccggttccacagttcaaccggatcatctgattgtctgcattggtgtttaccaggccttccggatacatggaatgaaattctttttgcacaattatagccttttttggttgattctaaaccacaatatgtttccataagatgccctgaacagcagcaggtaaaatggaagtctgtgaatgctgtactgcccaggacaattgaagcaacgaatggagaagaaaatagcaatcgtataagtcacaggtatttgttgattgaaagtaacgaccatgctagtccccatggtcttggcattaatattatattcatgtctagctgtaggtagttagtgagccatacctacctcgttcccggttttgctgattctggtgtttctctagttgctggagttggagacactagagagaacaaccatgtaagtttttctcaactttcaaccaaacatcaggttgatgatttggtcgttttttctgtttaggaggagaaaatacagatcttaggacattctgaatttcactacccttaaattttatcaaaatgtacgataaatgtgtaatttattttgtgattatgttctattcatgttcatttttcgaaacactcactatttcactttttaatagctgtagatcttgtcctttgaaaattctgtgacattaaagattgtcaaaattatggaccatttgattatcatataattttagttactttacagttaacatatgtactccttggcctaggagcacgtgtatgtatctttcttgactaacttttgcttttctttctttagaagaaaccattgtaaattgcaaacagtttttaaaataattcaaaaaaaattatttaatgatagagaaagatccaactgtctagtcaaacttaacgagttttatgggaggcgtaactggcctgctaagaatatgacccaaaacatcatccacgttatgtatgaatttaatttttagggatatttgtggcataaataccacatttatatattatatttttttttactattgttagagtatctaatggagatgcaaatgagtgatgtaaa

SEQ ID NO: 185416 - DNA, 1730 bp, Cannabis indica
tatataatcataaaatgccaatagctaattcaaattacctttactaatccataatctaactatgcggtcattacagacccaatcaattaaaaaaatggtcccactcatctcctatggttatgggtcccccacacatgggtctttttctctacttaatccattttgggccctaagcataggttttctttccttcgacttgatccatggggcagtttaattaaataataaattgggcccatcactcaatcattacaacggcccagtttttaattcaacccttgggtttaccatttgagacccaagcctagagctagatgcatatcgatctccaattataggatttgcctaagtagttctagttctcaagatcttcgaccaatgccacaatgaatgctcagtagaaaatttgctactttcaagtctatccaaagaacaatgcacgtggtggtgttaggtggtcggtgttgtgggtatggctagtaaaaaatgttggggattgttaccccaccattagagttttattttgagagaggtaccaacattttccttgttgtgttttctccgcaatctgagtttggttttgagaggggtacttaagtgaaacgttctaagggtggacgaagttcagtttacaagggtgtttttggaccttcatttttcttctattgttgaagagacgggtttaggtatcaaacttaaaatttttaaggtatggcaacaaaacaaaggcagtaccataataattttatggaacgaaagttcaaaatgatagaggatcagcttcaaaaatatggtgctaaaatatattcctgatgtatgtcgtgtgtcgtatcaaatttactaattattttgattctaatacttaaaattattttagtataaaagcaagtaagggtcgatcccacgaggactatattatccgattattcaaaaattagtaacaagaattaaaaagggggtttgtaatataaagattaaataacataaactagaaggaaaataaaatgttatactatgatattaaagaaatagttaagggttaatatctaccctcaataatcatccttaatttcttataacgaatgttatttcaatttttcaatcaaattattaatcttgcaaaaaatgctaaagcagtcaattattctaatctatctattgcaagtaatcaaggcgaagcactctataattaactttttatctaattatgaagcatataatttatttgacttatttaaagctttgaattcaatggagatagattaatctagacaataaattaatggagcatataattcatttaacctaagttctattcttcatcacaattaaaaatacttttgataataataaaaattgtaattaatcacatacacttagaatcatagactattaggtgaatagtaatcctaagatgataatagattaaagtaaaacctaatttagtgatcatctaaacaaggttaaaacaataaccatggcattgaaaatagaaaaatagaagaaactcattatattggaaactaataacattcatcatagaaattaggaattcatgtcttgggttttgaaataacccttaactaaatagaaactactttaaactagatattttaataaaaatcataataaaaagtacgagattaaggagaagaaaaagaaacaatgatgatgaacaattggtgctgcaatctccttcttcttctttttctcttttggacttctctttc

SEQ ID NO: 185417 - DNA, 7212 bp, Cannabis indica
atttattaaccatcactgtcctcagatatacacttaggaggcggcgtatctccatcatgaaactacctcctacagatttgggctaccaccagctaggatcacggtagcatcttctcaccttccaatgtcgaaaatcttcaggtattatcttcccctctatgtctatttaaggttatattttgaggttttttttttctatgcctccctgtttactgccataagtcaactcctccattctccatctctattatccccaactatgtctcaacacccatacaatcttcctccccactcgcttaatctcactcttgacgaagctctcgttcacgatttcgaccacgtttccatacactttgaaactcaacctcaatccttctgccttgttgtgaaagtccttacccctaaaccaattaaacccaaatggatttgcaaagccatgaaggatgcttgggtagcttgctccccttcactttctcaaaatatcattttggtttattcttggcaacctttggctgcaaaggggattgccgcagagttgtcgaacgccagccttggcattttgaccgtgccttgatgctctttgccatccctgatggtttcgacaccattctccctagtcagcttaggtatatacccccctggatgcaagtgcacttcatcccttttggtaatcggtcccatggcttggctcactttgttgctgatactataggggatcttattgaagtttatctcccttctctgtatgactctatcaccccatttatgcgcattcgtgttctccttgacaccaccaagcccctgtgtaagggtatgaatgtccactttcgtaacctttccctcactaaatggctaaagttccagtatgaaggcatccagaactactgctatcactgtgggaagcttgatcacacattcaatcgatgtgagtccttccttcatttctgtgatactcgtgctcaccctctctcttagctataaggatgtgctaagagctcctgtgaagtccttttataagaaaagtatttttgagttgtctaactcaaccccattcgaagaaattccctctctcaacaacctgtccatccaaagccttcaggatgctatggatcaattccttgtccctagcatttctaatacttccattgttcatacttaagtcattgagagttcgtctgcttattctctcccaagtgctctcctaatgtccctacttccatcactttcacgaccctcacctgcaacatggaatctgctcctattatgacaacctctgtggttacttccacctcaaagggcaaggaccccatgtatcctgagcctcccagggacttaccagcttctagggactcccctgtccctcctatttgtcccaatactagggtcgctcttgtcttctcaggcaccaagcattcttacaacagacaaagctgtcaagtgggctcctctgtcaggagcatgttgaagagagccatatcctcaacttgtgattttgttgtggttcctaccctttgtaatgctgatgaagaggagcaaccccgcctgaaaaaaatgagtttcattagttggaatgctcgtggattagggagttcccgagcattccaaaatctctccccctagtcactcaacatcgtcctcaacttcttttgtgatggagactaagcaacctgttgaaggctacattgtcttttgataatgcttttgaggtccctagacaaggtttagggggtttgtttttgttttggaatgatgtggttagtgttactattttgtcctactctttaaaccacatagactgtaatatctcccttgttaataataataatttttatttatcgtgtttctatggctctccttatattcataatgaagatattacttgggctttgttaaataggttgcatgatactgctcctttagcacaatggctagtcttaggtgatttcaatgattatcttgggtataatgatagaaataactctaatactcccccttcccatgccatgattaacttttaaagatttgtccataagtttgatcttcatcctcttcctgctatgggtagtccttttacttggaaacatggtacctctttggagcgtctggattgggctatttccagcccttcgtgggggaatcttttccctcatgccaccctcaggcctaccttccctttttttggttctgaccatcgggctattaagttggttttcaatttaagtcctcatcttggcattcgtgaaaagagatttcgatttgaaaatcgttggttttagaacctgattttttcccttgctcagagtcattggcctaattcttattgattccagacacctccaacacccctcctccgtgattttctcattgtgcaatagagttgtattcatcttctgtttgattggagtaaataaaaaaaataatctctctgcttccatcaagaaacttcagttggacattgatcatatttacaatcaagtccctctttcatctcagaacatcaacattgctaaccaccttcaatcgtctctcaattaccttttgcataaggaggaaatttcttcgaaacaacgttcccgtgtgaactggcttaaagctggggataagaatactagattctttcattccaaggccaactccaaaagaagaacaaacaccatccgatgcattacttgtgataataaccttcaagtttctgatttcgatggtatttgttcagcttttgtggaattttatactaatctctttcactctcaaggcacgaatgtgcattccattcactatgttctcactggtatttcacataggatctccccccagcagaacaatttccttgataacccttatgatatttctgaggttaaaagtgccctttttcagctggctggtgacaaagcccctaggccagatggccttaatcctttgttctaccaaaaaagttggccaataattggccaatctttcagcaaggcggtcttggatgttctgaatggggatgctgatatcactcccattaacgaaaccttcactgttctcatccctaaaaaaagcaatgcctccacggttcgagactttagacccatcagtttatgctccaccatctacaaagtggtgtttaaagcgattgccaataggcttaaagttgttctgaacaacatctattcccataaccatgatgcctttctcaacaataggattatctttgacaacatccttattgcaaatgaggtcataaatgctattaatagccgtaaagctgggaaaactacctgggctgctcttaagctggatatggagaaagcctttgataaagtggaatggagcttccttcaacacattatgctccacttaggtttccctcctcggctggtttctctcattctcaattgcatatccacagtctctttcagactctgtattaattcaagcctttctcctcccataatccctacttgaggcattaggcaaggggatcccctatccccttacttattccttcttgtggcggagggtttatcgattatcattctctccaaagagcagcttaatcttctcaagggtatctccatctgtcgatctgcccctcctatctctcacctcctttttgcggacgatagtcttctgtttactatggctactccccaaaatgctcacactaaaggatattctgcagacctacaatatggccactggaaaatctgtgaatcttcataagtcctctgctttgttttctcaaaatactccttcccatgcaaagtcttctttcctttcctccattggaatggaggataagccttttattgagcaataccttggtgtccctcaatgtctctcgcgctctaaaaagtcctcattccactttatccttcaaagagctaattctaaactcaattcatggaactccaagtgcttttccaaggctggtaaagagatacttctcaaggctgtgattcaatcaatccttgcctatgtcatgtcttgctataatatccctgtttccatttgccatcagttggagaagttaatggccaatttctggtggaatcctaagagttgcaataagtcgagtattcattggaaatccttgactaagctttgcaaatccaaattttacgggggtcttgggtttcgatccattattcatcaaaactaggccatctaagccaagcaagtgtggcgtatccacaataaccccaattccctccttgcttctcttctaaaagccaaatactacaagcataacaccattcttgatacctcccctagtcacaacccttccttgtcctggcgaagtattctctggggtagagatttgattaccaagggtcttctttggaaggttggtgatggatctaccatttctactctttcttcccattggttgcctgacgcccaacatattgtctataagaatggttttctgccctcggtgtccattttatcctttttcatcaactctgatggttcttgggatatcaccaaactaaacaattactttgattctgacaccgtccactctatccttgttgttcccataaatcctcaccaaaatgacagtctcatttgggggtaccatccttctggaatactcacagtcaactcggcttatcatctggccaattcttcctccaacagttcctctccttcctcttccagccccaatcctttcaaaaactggtggaaagcagtttggtcctcctccattccccccaaactaaagcatttctatttggagagcttttcaccacctccttccttctaatcttaatctctttttgcgaaaagccttgtcaaacaccgtttgttccatctgtaagtccaaagttgatacaaactctcatttccttctagagtgttcaagagtagataagttttggaaatttacaaagtctaacagatactgtgatattaaagagtttattttgcacagttttgacacattccacaaagatgatctccacttactgtttgctatcctttggtctgcttgaaattccggtaacaaatttcttttgcagaaaaggaacctgttttcaaagatatagagcaacatgtaatttcttacttgcaggaatactcccaagctcaacactcccagatacatggtcatgatgtttctaccaatgacaataccctagattcgacatcctctattattgttcccaggctccatcctggaaaattcaagctttcaatggatgttgctgtccaactttctcacaatttgcatggaaatggggcatttattaaagactacacatgtcgggttattgctagtttttcctccaaggagttctctcgtttaccaccagtttttgcagaggcagaagctatgcatagaactttactttggtgtgaagcagtcagactcccaattggattaattgtttctgattgcctagtcctggtcaataaggttttgaaaaaacaaagagatccctccgctctttctgataagatttggcaaatcattgcctctctatctcactttcttaaagccacggtccatcactgccacatacaattcaacaccttagctcatgatgcagcgaagcaggctttgggaactgataaagagattttgtggaacaattgtgtttcacagttttagcagctctatagctttcttttgttacagtttttgcttctaaaaaaaaaagaaaatccaaaaatcaatttcaaattcaatttaatctcatatctgaaactcaaactcaagcctatcaaatcttaattcaaaatccagatcgaaaagacaaaatttcaaccatctaagatttcaaatacattaataataaatcaaatttgtgtatgaacacgattgacctctatttgtacaaaataatgaggcttcagatatgaaactaaaagaaaaagctagagattttgaacagaaagcccctattctcttgttcttgttcgctgactttaatggtggatcgagaacctctgcctcgtcgtcgctctggaaaatgaacatccaaccacattgaagctacatctttgttcacaggctttaatgatgggatctgagatggaggagttggagctagcgtgttagcggaggaggagggacagaggaggttggcgttcagcgttggttatggaggaggacgtcggggacaaccaaagaagaaggagagatgggtagtggttggagagctgctgaggtggtcctgtgttggtgctcaaaactaagatcaagagagagagaggagatcgactaagagaagagagatttacgtgaaacaaaaaagaaaaaggaaaaaaaagaaaagaaagaaaaaatatctaaggaaaagaaagaaaaaaaagaaaaaagaattttttttttcattttaattttttttaaaaaaataaaactatgcgtacaaatacaattgagccacgtatacattatgtacacgtggacaatccaacatgacacttaacacctaaaatggatgaaaattataaattgctaatggttttgtagttttgggggttttatcgccaaaatttgagtttttgggggttaagtgcaatcaaattgaaagtattaggagttatgccgcaatttaaccttttttttttttatttttttttatcttgctttgaaataatcattctttctatttcaaaatggaatagtcattccactaaagtgatggaaaagtcattttgttggaatgacattctaatactttaaatgcaactaaacaaatgaatagattaacctttccattccattttattttatctttatttgttttcagtcatgtttactatgccaaaccttattgttttaatagcacttgaaaaattgaatggtgatactttctttgaataaaaatcaatttgaatttgatgttggtttatgagaactacaaatttgttcttattgaggagtgttttgaagagctcattgccaatgccctaaagaatttatgggacaaatatattgcttggattcaatctaacaatatgacaaggtgtttcatgcttgtcagcatggatgacattatgcacaaaacgcatgaattgatggagaatgcatatgcgattatggattctttacagtacatgtttgggtagtagttagatcaaactagacatgatgttacttgtagctacatgaatagtaagaaaaagaagggtgtccttgtgagaactcatgtattgcatattgtagatgcatgagacagagatacactgggttgtgattgatgagaggat

SEQ ID NO: 185418 - DNA, 4291 bp, Cannabis indica
tttttttttttttaaaaaaacgggaaatcgaccaggctaaattgctaagtaaaaggttgtggaaaagaaaatattaaaaaaaaattgcgcacgtaatatcaacacactactgaaaatactcttcttcatccagacagctccaagagacaaaaattactgtctggatatctggaggtaaaccatctgagtgtatccattgaaaacagacctatcaagtctggttaatccaaggcgctggaataaaccatagcgaccatcttcaacgataggaggtggtgaacgagcagggtcatatcgagtttggtgagtgagagaaggaccggccacaggaggaagctcccaataaacatctagcatcgattccacaatccgactgttctgaaaatgttcttcataggaaatcaccttgttgctgtggttgaaattatccctcatgtatcctctaacaccccaccatgcttcacctggtccacaaagttcttctatatctactgctttttcccagaaattctttctttttgacctgatcctagcttcgtcactgtctttatagcagctatggccacctcctaaagcatttattgcacataaccataattattttgaatcagtaaaagataagagtaaatcataaagcccatactacaaaaatcatactaataacttttattatattgcacatgcaatctaaataaagcattttagtttctaaagttggaagaacgaagataataattcactaacgaagagccgcaaaagacaatatagggtgacataaacctcttatataggactgatcgcaaatttgccttaaggaataatgatctcccgttccagtatcatagttatcctcaaagacaagatgccggaatccagctaccagagcctgttgtattctgttcatcaaagcacaagatatgaagagataataagcatttcaaaagaagaagcagcgctgaataaacatactgcattaatgataccgtgactaccttttaagttcattctgatgatcgtcaaagaaaataagaacccgggaaagatcaatgatcccatgtttcttcatcacttttttccaatcaatgcttccaaaatctacaaagtcctttccagcaaagtaagtgcaatttccatcaacatatgcaggccccttctttagatacttctctggatgccgaggcgtaatagatataataggtgttaatggcattgcctgtcgcaaaacccaagttgagtgtcccttaaaagcaccactctcaatcataagatctggcttcagccaccgggcaatgaaccaaagaccaaaactgtggtcaaaacccatcccatacatgttgtttttaattggtcgggtttcatatatcggtacaaactcttccaaacccttgattagatccttcgatgtccattcaaccgtttttccatgtttcgatctgccttttgccaaggatacgaaataagaaccaactaaaactcaagcattcataatgttacacagttcaagttaagctaaaacaaatacaaaatccatcatagaagttaacctcaaacagattatctcaatgcaaatattgagcaattacattaatagatacatataaggaggaaaaaagcaccactcaccagattgcgaacattgagattaataatacataacctcaaactacacagtacacatcaaatgtagtggaaagttatattgaattcaaaatctttttcaatttacctatctcttgagttttcttattattaatcaatcaaattctcattcacctgtgagaaactcagagaagtaaaattgataaatagtagcctttccatcggctaacttaactaatcgatacttttataagcctatggaaaccccataaaacataacccttaaagatcaaaagttcaaacttgatttcccaatctaattttcaaagtcataatcactaacattgatactcaaaaggaaaaccaaaaatgagacaacaatgtagcaccataaaattagatctgggcagggaaagaaaaaaagaaaagacttacaccagggcacgccgagggatccaaagtcggattcgagagcatcgaagccgaagaaaccggatcgatatgcggggtcgtgaggagagacgcaaacgaggttgcgagactggaagacgatggaggaaatcaagaaaagaacgaaaaagagcgcgataacgcagggccaaaggggtccgattcgaaagtgattgatgaggcgagtgatgaagaagaaaaaggggaggtgcttcttggtcttggactcgtcagcggtggccgcgtcgtcttcgttagctaattcgtcgctgtgcggcggcgctcggcgggaggagaggacccgctccagcattttggctgaatgggtcggactaggagggcgatgcgagtgagtaaccggcatctggttgatatttagaatcctaaactaaaccgctactcctctacttcactctattcattatttatttatttgtttatttatattatttattgttattattatctgattatttttttaaaggaaaaatcattttataccaataataaaattggtattaacaagagacacaaatgagaggtgagcaactgtcggtttagtcggtttttaacataaaaaaatatctaaaatttagttttcaattttcatgaatataatctgaaaaccgactaactattatataaatgtaaaaaaaatcgaccgttttaatcaacggtttggtcggtttaattggtcgatttaaaccgaccaaaccgagctttattttcgttttaaaaaataagtctttaaatttgttataattatttgaaaactaaaaaaattagaatattgtatcaaatatcatataatttaagaacaaaaattaaataaataatgtaaaataaactttttagaatttgctcaaattatttgtgctactaatatggtaataagttatatgaaaaactcgtactattctatgaatatgtgtatataatacgtaaatatatcaaattataataaaataaagcaataaatagttgagactttaaataaaaaaataagaagtaaaattagtttaataaaattgtatatatattaagttaatatgtacaaaaataattatgttatatatgtatagtgtataatatatatattcggtcggttatcggtttaatcggtcggtttgccattgacactaaaactgaccgtgcaaaggcagtattaatcgaaggcgatttttttttttattatattttagttttttctaatattcgggcggtcggtctactcggtttggtcgggttttcttaaaattttttgtctcacccctaatacaaactcagttgagacatcccttgaatagaaagttacaactaagcattaaaaaagaagcgtttgcaaatctatgagctaccaaattagttgattgcttaataaaagaaataaccattgtaattcagtaagaagttttttgcaatcttcaatgaccaagctaaacaaagaaacccaataaatatcactctgaaaagcttcaactacaaccaaacaatctgtctttaactaatgttttgcctttaatccagcttaaagcttctcgaacccccatagcttcgaccacctgaggatcaatttgaccttgagctcgcttagtgcaattgccaatcaaagcacccctatcatcacgggctacaatctcaaacccagaataatggtcctccatgaatatcgttgcactaacatttggagaacttgagacaagtgcaacttcatgtgggactggcaattagtgctaaaaaagtaaaaaaaattcacagattcaccttctcgcctacaactgtttcaaatttaagcaaaagctcacgaatttttatcgcttcgaattcagttgctttacaatacttgtcgtccacgaataacaaatgggaaattcgaggtgctccattagcaatgttgcaactgtgaatccaaccccttccttcatactttaattataagaagagcacaaaccatcaacgcacaatagaaaaaggtagagagaaataagatgaccttagtgaataccacgagtcaagattatagggccaatctctttaccatatttaataattgtacaacgagctaaactgactcatctcaacaataaatgcacccatctttcatggaaatccatcttcaggagaacaactctcaaaaagtctcattcaatgtaatcatacgccttacttatgtctagcttgagtgccaaacataattagaggtttggtctaatatggtgatatggtgatggggattggaaat

SEQ ID NO: 185419 - DNA, 996 bp, Cannabis indica
agaagaagaagaataagagaagaagaggagagagaagatctctccagagaattctcagccatggaatcaagaatttctgcctctctagggcttccgtcaccggacccaaacaaccacaacccaaactcaattcactttcccaatctcttcacccatttcgccgccattaacacccaatcccccaagcttttcgactcacttccattcgcctccgcctcatccgccgcacccagatctcaaaattggttcaaacccaccaccaaaaacagccccagagtccaatccctaatgaagagcctcaccgtcttcgagcgtgccgtaataggcgccggcgccggcggcattgccggcgcattcacctacgtctgccttctcccactcgacacaatcaaaacaaagctccagacacgaggtgcctccgaaatgtacaagaacgctttcgacgccgtcgttaaaacctttcaaagcaaaggggttttgggtttctacagcggaatctccgccgtcatcgtcggctcaacagcttcctcggcggtctatttcggtacctgcgagttcggaaaatcgttcctctccaaattccctaaatacccttctgtccttattcctccgacggccggtgccatgggcaatatcgtctcttcagctataatggtccccaaagagctaattactcagcaaatgcaagccggagcaaaaggccggtcttggcaagttctattgaggataatcgaaaacgacggcgttttgggtctctacgcagggtactctgccacattgctgaggaatttgcctgctggggttcttagctactcttcctttgagtaccttaaagctgcagtcttgaacaagacgaatcagaccaatttggagccttttcagagcgtgttttgtggggctcttgccggagcaatctcggcttctattacaacgccgcttgatgtggttaaaactaggctaatgacccaagtccgagttgggggagcacctaaggtg

SEQ ID NO: 185420 - DNA, 3179 bp, Cannabis indica
taatgattaaaaaaattaagtaaattaaattaaaaaattttaaattatttttttcaataaattacaacgctgacatgataattatctaaataattatattatcattttatttgtcactggtgacaaaatttaacagaatgatcaacttataaaattataaataattttaacgagttaaaaaattcaaaaggcacaataaacatataacataattcgaggcaaaaattctaaataaacttttatgtaatattgaatgttctttttcttttacattgttattttgtaacctaaccaaaaaaaaatactagattcactcttaacatatgcacgatcttttatatatcaatattacttttagttcaattaagtatcgagtatcgtataatttaatataaaatttttaaaaaagtatcgctaagcaataacactaaacaccattactgatacccaatagaaatgctcgtaagtaattgggtggaaaatatactaaattcaattgggtgttaattgtaggttttgtttggtatcttatcttatctggcactggaactggcttaaacgtgtaaccaaacaacacctttcctatataaactcaaaacaaacacaaccaaacaacccaacaaaccaaccaaccaaacaactcctctttccctttcccaccatggatccgccgcagccgccaccacaagcagctccggcgtcgaccctaccgccggcgccgcctccttcatcaacttccttctctcaccatctcagttacccagactcagtcgactcatcacctaggtcacgaaacacagattcatgggacgaacagcttcctcaaacctcaactcgacttcgcttgatgtgtagctatggcggacacatcgtacctagaccacacgataagtctctctgttacgtcggcggtgatactcggatcgttgttgttgataggaatacttctctttctgaactatctaatcggctttcgaagactcttcttaacgggagatcttttactcttaagtatcagcttcctagtgaagatctcgattcgcttatatctgttactacggatgaagaccttgataatatgatcgatgagtatgatcgtacggtttcggcatctgcgaaaccctcgaggcttcggttgtttctgtttgcttctaagcctgaatcgtctcagtcgattggtccgattcttgataatccggcgaaatctgaggattggtttcttaatgcgcttaatggtgcagctggtggattgcttaatagagggttttcggattctgcttctgttaattgtttgcttggtcttgatgatgacgtcatggccggtggtggtggtgtggttggtaatctcgattcggctgcggcggcggcggcggctgctcagccgggtggatttgggaatgggaaaggtgggaaggtagttgttggagggaatcaagatgttcattctgttccagattcgcctatgcttgaaactacctcttcttttgggtctacttcttcgtctccttcgcttgcgaatttgcctcctattcgtgttcatatggaggagggtggtggggttaggatggttcaggatcataaggttgggatcgaggagcaatttgctcaaatgagtatggctcaagctggtcttaaacaagaagagggtggctttgctatgatatcttcaccaccgccgccacctttatccggcactgttcaattgccagtgagttcctcggctgttggtgttgattactcttcaggaaatcgggttgtctctgatgacgaaagatcagatcatggagtgcctattgggtaccagaagcagcctgcgcctcaacaatctcagcctcctcaatcacaacaacaaaagtctactggtgttcatgatttgccttctcctgattcagtttcaaggtataaaattatgctaaaagcttagatctttagtggttagattttggttttgtgtttattgaatgttttttatttatgatgcagtgataatagtattggaaatgcattgtctcgacctaaacctgtaatctatcaagaccaagttcagttttcaggaaccacaagggttgttccagcaaaccctgttgatcctaaagttaatatttctgatcagaacactcgggtacaaatacaacaacaggttcaggattctgggtatgtgttgcaagctcaatatgagttgcaacaacaacaacatcagcaacaacaacttcaacaccagcaacttcaacagcaacaacatcagcaacttcagcaacaacatcatcagcaacagcagcaacaacaacatcagcaacttcagcaacacatcaacttaacaacaacagcagcagcagcaatttgttcaagctggaggacattactaccaccctcatccttctgggactgtgcccatctcggcttactacccggtatatccttcccagcagcaacatcatccacaggttgatcagcaacagcagtaccctgtttactatgtccctgcaagacaggctcaagcttacaacaacttgtctgttcaacaatccaatataagtgaagcttctactgttatccctcaaacacatcccaatcccgccatggttgctactccaacagctgctgcagcagcagcagcttacaatcctgtaaggaatgccccattgggcaagcccgaaattgccgcgggcatgtacagaacggcaaccacagttgctcaaccttctttggttcaggttccttctgctcaacatcagcagcagcaatatgctggctactcacaggttcatcatccgtctcagtcggtcactcctacttccgcagctgctgcgagttacggatacgaatatgcagacccttcccatgcccagatgtactatactcaggctcttcaacccacaatggcttctcaatatcagaccatgacagcgactggcgcggtagtgatgcaggaagtttccgggcagatttcagctgacaacatgaagcagcagcagcagatgagaagttcatagccattataatatatcagaagaacataagaaagaagcaattttgaagggacaaagaaaaaaaaaagggtttggctttctttttactactatatttttcgtttgtgtctgcattgtttgttgatggtaaaactggattgttatatgtatttgtgatagataataagaaaactctggtcgtcttaagct

SEQ ID NO: 185421 - DNA, 4968 bp, Cannabis indica
cttacctggaaggagttgcaggaaactttactgagctttgacagtaaacttgtgggaaaactcacattcatttggagctggaacatctgcagctttggccaataagcatccacaaccatatcaccctgctggacatggcaacttcaataatagcaattatattcgaggggttagaggatcaaactatcataatgacaatggcagtaacaatagaggaggtggttcaggccgtggtcgaggcaggggtggtagaaatcccaaaccaacctatcaagtttgtggacgctatggacattctgctgcaatatgctataacagttatgatgaatcctttatgggattcacacctagaaccaacaacaacaacaatgaaaagaaggatcccagtacttatgtggctacaccagaaatgatagatcatgagaactggtatgctgattcaggagccaacaaccacctcacttcaaactaagataatatttcgaacaagtctatctacaatggttaggatcacttgactgttggtgatggtactcagctacatatttcacatattggttcaagaactttgcaatcatataatgataacgagttatttttaactgatgtattacatgttccaaagattgcaaataatttaataagtatttccaaattgactgctgacaataaagtgcttgttgagttcttttctgatgtttgttttgtgaaggacatgaaaacaaagatggtggtgctgcgggggaaacttaaagatggtttgtatcagcttgaaggtgctaccaaaccctgaaacttaaagtatccaagccttgttttaccaaacactagacccgagtcttttcatttatgtcttagtccatttctgcaattgttgagtctgtttcttagtccaagtcctttgttagttcgagtcatgtgtctgtcaaagaattgtggcatagaagattgggtcacccctcctctaaggtcttaagtcaagtcttgaataatgctaatgtaaaaacatctataaatgaaaatctattgttttgtgaagcatgtcaatatgggaaatcccatgccttactttttaaaatttataacagcagggccaccaaagtgcttgatctgattaatatagatctttggggtccatcacctgttatgtccaacacgaatttgagatactacattcattttgtagatgacttcagtagatacacttggatctaccctctcaaagccaagtcagatgccttaggggcttttgttcagtttaaaacaaaggtggaaaatcaatttgagagaaagattaagaagttacagaccgattggggtgaatatcagtcatttagcaatttggttgttgaaaatggcattattttccaacattctttcccccatactttggaacaaaatggccgtgctgaaagaaagaacatgcacattgtcgaaatgggactaacactccttgctcaagcaaacatgcctctaaaatactggtgtgatgccttttcaaatctctgtctatcttataaatgacttccaacacctgttcttgggggtaagtcacctattggaccctatttggcaagaaacctgactacagtttcttaaaggtctttggtgctgcctgttaaccgtgtctaaggccctaccaaaaccataaaattcaatttcattccaccaagtgtgtgaacctagggtatagtgaagtgcacaaaggatataaatgcctaagctctaatgggagattatatatctctagacatgttaatttcaatgagagagagtttccttttactgtaggtttgctgaacaattataggaaagagtttgatatcactatttcattaccagatgcctagttttgacttcttatacaacagcctgatcccaactttatctcaccaaattcacatccaccacataatcaacaaaatgaaccatctgctgccacaccttgtccatcacctactaatataaatcatcaaaagtcaactgaagcatcaccatcatccatgagtccaagttagtctcctacaaaccaggtagatctcactgaccatttatttattgatttggattttgctcaaactcatgctgttgacagtgagacaacaggagcacctggagctgatacatctgtacaacagtctcttgaaccagaaatggttccacagtctagacaccccatgataaccaagtccaaggttgggacatttaaatccaaactctacactgcacagatcaaacaacaccagggaacttctgaacctaattatgtcctggaagctcttcaacacaaaggttggaacaaatttatgattgaagaattctagccttaatcaagaacaagacctaggttctagttctaaggagagcagaaatgaatataattggaaataaataggtgtttaaagaaaaacttaatcctgatgggacagttgaaaggcttaaagcaagacttgttgctaaaggatttcatcaaagacctggcttggactttggtgaaacattagtcctgttgtcaaagtctcaactaccagaatcattcttactatagcagtcaccaatggctgggatgtgagaccgttggacatcaacaataccttttaaatggcaagcttgaagaagatgtttacattgagcaaccacgagggtttgaggacaaggaggagccccattatgtctgcaaactggaaaaatctttgtatgggcttaagcaggcatctcgtgcctggtatgagcagctgaaacaaacacttctcgagtggaactttgtgaactcaagggctgacacttccctttttctcttaagaacctccaagtttgttatcatggtactcatctatgtggatgacatagtcataactgggaataatggccttgaggttaacaactttatcactcgacttcacaaggtgtttgctttaaaagaccttagtgccttgaatttcttattggggattgaagttattagagacaaaacatggatgtacctatcccaagggaaatatgtaacagagttgctaaaacgtgttgatatgtcaaatatcaaaccttgtcctacactcatgacaggaggcaagcctctgtcattatatgaaggatatactatctggcaggtccccagatacgagaattccttcgaggacaagttggccaagctagcaacagatccaaaaataaaggaagacgaggtagtccccatagttcatcttgctacgctaagcactagatatgtcatcctagacaaaaagttgtacaaaagagggttatttgtaccatatatgaagtgcacagtcgggacagaatcaacgtagttatctatgagatacacgaaggtttttgtagagatcacacatctagaccaagtctatctaagaagatcatctggcaagggtattcttggcccacgatgaaaggggactgcattgactacatccgaaagtgtgagcaatgttaatgttatgccaaggtccctcgggctaggcctactgaaataaccctcattagcagtccatggcattttgcagaattgggaattgacttagtatggtctcttctaattgggaaatgaggagtgaaatacgtcatatttttagttgactacttcaccaagtggatagaagcagaatcaataaacacagtcacctcccaaaaaggctttggattttgtaatcaagaatattgtatgttgttttggcattccacataagatcgtgtccgataatgaaaagtaatttgatagtgaccactttactgatttttgcaccaaacactaaattataaaaactttttcaatcgtggtcaaaccacaggcaaatagataagaggtcgatgccatgtgtattctactcatgaaaaacatagagtttatcagtatccatgacttgatgtcttgaaattcaagaagactaagattatacattgttttgtctaccacaaagaattcaaaagtgaagctataaggcttcacaactctcgagcaccaaaggcttggggtaaatattattcgtgtttctggtagggtgacacgtgtacgttaaagattcatctaattacttcaggaagggccattctcgagcccaatgagggccagtccactaaggaagtcaatctgagagtttgcgttcagttacagattaaactcatccattacaaggttaaattatctgggtccgggaagggttctcagccagaagaaagaaggcacaatatgggatatttggataccctcatggggtattcccagaaggactatctagaaaatatttggaagcgaaggcttacgtggagatccctccaatatgggatcccactaaatcaggaattcacctagagccatatcctccgaaatttattgtataaatgtgatagcatacaacaacttttaccattaaatggactccgtaaatatagatgatcgttatcttgtaaatgagttcttttctaattaatctaaagtcactattaaatgtatttactccttcagtgggtttagcttcatacaaaaatcctaactgtcttaaccctagcctataatagaagattgtatcttcatgcaaatggtggaaaatcattattcaaatactaagacttaaattagggttcttaagtttggaaaaaatattatccttgtgtaaaacatcaaagtttctcaaattataatatattgactcgtggactaaagttcatcaacgctcaaaccacgtaaaaatcttagttttcttcttctttaattttttttgtttcttaagctctatttattttataatcaatttttctaaaacttggtaaacattcaattttatgatcgatttgtattttgtcactcctaaaatagatattaggatcgaagtattagaagcgatacattaggcgtgacaagtcgcccctattacgctttagggacgattataagagtttttaggggtgacttttatctcctttaatattctcttttcttgtagtttggttaaa

SEQ ID NO: 185422 - DNA, 1029 bp, Cannabis indica
tccaaatccacagctattcttccctgattttctccataatttttgccaccagtccgattgcaaacctgcctccctaatcttcccagaattctctccactagccacgccatcaaccataattgcatccctacaatcacggtttgaatcaaccacccccgcactctgttttcccggtgagaattggctggcatcagcctccaaaggttgccccatattgtctcttagccaacgagctccgatctgtcttgattgtcgtctatcaggcgctttcatgaataaactgtatggtttagcaatagtttccaaggactccttaaacaatctatggcaaaatctttcggaatggccaatgataccataattgaaacaaaaagtaggcaccctctcatatttaaaattagcccagaaccactccaccttgttcttgtatattcgcattctccgcttgagaggtttctccacattgatcaagacacggactctaaaataatctctccaaatacccgcaaaaattttcgggcatgaggaaacatacgttccaatatacgctaccacagcttgtaaggctcgatcggatcgatatcccactttaagattgtaaacttggacccatatttccatagtattcaataacttgtttctaggattttccttttcctgtagtctttcaacaattagcgcacttctgttaaatgtccatggagtaccttcaagaactctactgatgtctacctcatgaaagaattgaaacaaatatcgattggtttccaactccttgacgtacattcctctccctggatgccatagcgatgccaaaacattccttagcgaatcaaaatcagtaggacggtcagacaatagtttgcccacaagacaccatctgccgtcaaagtcatcgacaagtggttccgcattatcaaacaaaagactcatctcatcctcatcttctacatgtagatccgcccattgttgtcccaactcttccatattacggctgcttgatgccataactacaaaaaaaaaaaaaaa

SEQ ID NO: 185423 - DNA, 4188 bp, Cannabis indica
actattgagattgttgaatttaaggatttttgtccaattttagtaaaaaaaattctaacatgaatgaaaattcagggggcatgatttagtacatattaaagttcgacaggcatgatttggtagatatcaaagtctagaaagcatggtttaatacataaacaatcactgaaacagtaaaagttcaaggggcataatttggtacatatcaaagttcgcagaaaaaaaaatcttaattagccttataaatattagctactaaaatgtatattttgctctttaatttttaactattttgtcaaataattattgtcttatatttaaaaacacattgcattttaacatatagtataattaccatattatataattattacccttctaattacactgtttaataattacaaaattattttgaaacttatctttcattgatcttacaatattaattgggaatatcattaatctcacaatagtaagagattaatatgtagcattaaatatggagaattatttatttatttatttatttattttattaagagatttgatatgtagtattttatttttatagttagaaaaaacaaattgattgaaaaatatatagaattacttaaagttaatctctaatagaataatgaagttatataaaatgtgtaatatcaaagctatttctactttcaattaaaatcaaatcattttattttatataaatagtttctagttaaattgtattattgtattaaaagttcccattacaatatacaactatttatacatgtaatgattagtaatggtaactttgattataggaattttctacaccacatactcaaattttgaactcttttatatttttactctgggacggaatttttaaaaaaaataatgtattttttaaaaaatactgtttaagttttatattgtgtgctgtgttaagttttcacggttatttttagttgttctactgttgttttaattgttttgttttgttgttttacggttgttttatagaaagataatatttttttaaaaaattctatgtgacagtaaaattgtaaacttttactcaatatccaaaaagtccaatacgttcaagcaaattaacacaaaaaggccctaggttaaaataggctaggcccattcttaggtcgaaccaaaaccttgggcccaaaacatgtatggtaatattatacttgtgtaaattaagcccatacatacccattttcttaggcccattcggcatctcaatgggtgcaacaatttggtgaaactttttaatttttcacttttcttttacaatgtataattgcttcataaattatataaataaaataaaaactagtatcttttaaataattttatttagtgcaatattatatgtcattcttaaagctgtacaaaatttatttacaccaaaatggtgaaaatcctttagagatactaacaacggaactaataattacaattttattttcgagtaataatatgtatgtataaatatgcactaaaatacatcattcactaatggtattatttgtttgtttgattgttttttttaagaaaaaatattgtattattttaataattagatgtgattggaacaaacattaagacccagtgattgaatttataatatatataacaataatagtaataataataaaaaggttaattacttgttaaaaaaaattaattataatagtaattattgtatataaggtgtcatcataatatcatatatgagtgtagatggagtacatcccaatcagattggcacccactctaatctacactctattaattaatcattatgataatcccatgcaattacgtacgtacaattacaaaccctaacttggtggctactcttcctcaacaacaattaataatccttccaatcaccacggtgatatcatcgaatttgcctcctctatagggtttaccggcctctgtagatgctattgagaaaggagtttttcgaaacttgtcaaatgagttataaagtgccaacgatgcaatataactactaagattcttcaaatccatgatttttgttttttcttttaacacttgttctatctcccatacgaatatgttgtcccaaactccgtcagtacccaaaataatgatatctcctacctccacttctaccttcacttccactgcaactgtaggagtgtcacaagtattaccgagctgatatggcgtgttaaatgttttctgttgagttgctgatcgatatatacatctatttaagaacaaagttgtcgtaaatttagtgagaaaagtttaatataattaaaatatatatttagggagttaaatgtaattttatttgaatatggataagtttttattaattttttttagaggagttaatatgtaatatcatattttttaaaaataaataaatacatgttatttttttagtgtatccttattatttatattattatttttttaattattatttcaaatttgttataatttttttaaatatttaaaacgaggcttaacctgttgtttctaaacaccataaaaccactatctccaacgttcactgcatgtaaaattccgttgttgtggcaaactatgcatgcagttgatgagccttgaatttcagagtaagcattttccatgaatgctttctccaaaatcattttcggattaattatttcgttgtcgacaacttcatgaattgagttgagcatgagttggcgagcgtactcaccagcatcaatgcctttcttggcccaaccgcccactccatcagctactccgataatttgttcggttgagcaaataaaatgggcgtcttctcctaaaagatggtcttttggaccataagaaacctcacataccatcttcatctttgtaattaatctctcttaatctctctattaagtttagtcgaagtgtttttattatgtattaaattttgtcttaatctctctattaagtttagtcgaagtgtttttattatgtattaaattttgtttaatattaaaatatgagtctagttcgtataataaaaggttaagtatatgtgggtgagttcattcaatatatatagagaatcgacagaatttcaaaataaatcaaatcaaccataaaatataacaaattcaattaaatttaataattatttttaaggaaagtacgactaaactttcctatttttttcttaaaaaattatacataaagaacaaaatatgtattatttgagttaaaattattattaaattaaaagataaatgttacgaaaaataaatatctttcaaactgtcagcaacagacatatatattttaatctaattcaattagaatcatcaattaataattaaagtaattagagtattttcattaatatatttataaataaatattttatttaattttagaataataaatatatatttcttatttctttaaaaatatatcttatctttttaaatattcttagaatcatattccaaatatatttcaactttcaacattaagattattgcttgtgtgttagtagtggtttaccatggagtccaatattttcaatgagaaaaacatttttgttggaagtctccttcatcaaattagagcatatgaattgaagacatatttcagtgattttggaactgtagtagaaaccgaaattatttatgcaaaaataactgataaaggaaggggtttcggatttgtaacttttgattctgaagtggaaaaagtgttgaaggagaagttttataacctcaaaggataacaaatagaggtgaagatggctaaagtaaaaacagagagaaacaatcaagtttctactataacaaacaataacttgaacttttccgatttggcttctccattttattattcaactcccaattcattccaacctcacccagtttattgggtacctaattataattacaatcatgttctgcatccatatgaatatggtacttctccatattagccatactaataagagctcattttcatgagaacacataattcaaagtctttgttttatcttatgtttgatgtcttttttattttatagttattaataaattctttttcattgtgtgtaatctttaaatatatttagttgtaatcataaatgtaactttagtaattttacacttttttttttataataaagaggttcttcgatatttaggtgccgtttggtaa

SEQ ID NO: 185424 - DNA, 919 bp, Cannabis indica
tgagcaaggccgtaggatttggagccaaaggggatgtagtgaacttgaacccagagaggaatgaaacgaagctggttaggaaggataatgtcgaatccatcaaggatggcaaagatcattaaagagtggtcgaaatgccaaggctggccttccataacccttcttgtgtcaccgtcacatccaaaacaaacaaggaacattcctgagtgatattcagagaaggtgaaagagtaacaggccactcaggcctctttcatggcattacaaatccaatcaggtttgagaggtttagtggataggactttgacaagaagacaaaaggaatcagattggggtttagggtgaatggagacatgatcgaagttaggaatcagtgcctcctcagctgtgagttgaacaaagtggctagggtcatctaagacgacattcatggtggaagacatgcaagacaagagaataaaggaaggcaaagagaataaaccagagatgggataacacatgaacaaccagtttaaccataaatagatgaaaaaaaatagaaagaatacctagagagagaagtgggtagaagctggagagatgcttgatcaatcgtagccatcactagcccaaatctacgcctgctcagaatcgtgatgatgattcgtatccacctgaaaatggcgacgaggattaaatgctggatttgatcccatggaggagtatagccaagggttctctgaaaatgcattaaatgggattctcggttttggaggggagtggaaagcattaaatgttttgtaatcatgaggagaaagcattgatggaaggaagagaaagaggaggaacggtggttgtgcatcacgaaggaagagattaaagtctggaagtactagaaggaaagagggaaagagtccctaaagagttccagagcaattca

SEQ ID NO: 185425 - DNA, 3993 bp, Cannabis indica
cattaccattatggcattatcatatcatatcattcacattcatattttcctttattcctcctccttgagccaattcattttaaattacatgtcgttgaagatgcttattatgcctttcaatcaatatataatagactaatagtaatcactcatagaacactcttttccttactgaagaaatcaattgttgattgtcattaattgagaaagaaagggaaaactgcaaaagaatgggtaatatatttagtatatactacaaactaccacttttacaaaaatctgttattccaaggcaaaaaactcaatttcttttcttcctctactctctctcccaacaaaatgcccaccacacagaaaagtttattccacttttttttatataagcatttaatgcaaatgtccccattgagtaagaggacagtgttaccatgtccttgaagcatgctgagactttgcggtttccttcaagacagcacccacaatcgctgcctgctcgagacattcagccttgtgcaatgaatctaagaggacaacacaagtcttgctatggattttgaaacctttcaaccgagtttcttcgaatagcatatatgcatccattgcttgatttgcactgcttagcccttctatcatagcattatagctagcagaatcaggcattccaccactagcttttaacctttcaaacagtcggttagcttctgctatgttcccggcctttgcaagtccagagatcatggtggtgtaggtgattgtgttgggcttcaacccaagtttttgcatctcttgccaatacacaaaagccttggtaaattttctaactctgcaaaatccatttatgagaatgctataagttatttggttgggagcacagttcaagtctttcatggactgaaagcaaacaagggcttcatcaatttcttcggctttcacgagggcatcaagcaagcaattccatgtgtaaacattgggtgtcaatcctttctgcattaattcttccattataagataggcttcatcaactctacccaccttaccgaatccgtcgataagactactgtagataactaaattcaactctataccctttgatttagcttcttcaaaaagcatataagcttcatcaagcctatcaatcttggcaagaccatcaacgacggagccataggtaacaacggtgggttggtgacccttcgtcttcatttcctccagcaactggtatgctttgtttacctttcctgatttgcagaatccatcaataacagtgttgtatgctcgggtgtccaaaacacagccttgctccttcattgcataaaacagctcataagtttcatgtgcaaatccagcctttataagaccatggattaggattgagaagctccgcacatcgggattgaatccttgagctttaatctccttaaacaaagctctacctttctcagtttcaccagctttgaaaatgcaatccatataggtattaagaagcatcaaatcaggaggacagccccgctgcaccatttctttgtatatcttgtgaccatcctccttcctgccacaccgaaaaaaattcctaatgagagatgtataaataatagcagttggaatcttatcagtatccaacatcttttcataaagcttataggcatcatctactcttccttgtttgcccaagccatctataagagaacaaaatgtaaactcatttggggtgcaaactttgtaatccatttcttcaaatatagaacaagctgcatcgagtttttgagctttgcaaagtcgatcaatcattatgtttatagtcataacattaggatacaggccagcttctttcatggcatcctgaaccttcaaagcagcctcaagctttccttctctgcaaagcaagtctatcagaatattatatgttggaagattgggcactgcatctttcttcatttcctcaaaaattctcaacgcttcatccactttcccttttctcccaagacacgtaagaatacaattatatgcaatcacacttggaatgcatccctttgttttttgcctctcaagtaggctgtatgcttgatcaaattttcctgctgaactatagcccataatcatggtgttataagcatatgcgcatggtactgtcctattaagatccatctgttcaaataactgaactgcttcttccaatttgtcagccttacaaagaactcctatcatgctagtataagtaacatcatcaggcctcaaaccattcgctttcatttcatgaaaaaatttccaggccatatccactttaccaactttaccaaaacaatctatacatacattataaagaacaatatcagcattaagcgagttgctcttcatctcatccaacaaagagagtgcagcatcaactcttccctccttagcaaacacacgaatgacagttgtaaataagtgcacacttacttcataacctagctcctgcatttgatgaaagagagtgagcatgagatctgcttcatgaactgtagatagtgctccaatcagattagtgtaagccgagaatgctgggcggaatttaaacctcctcatggtttgaattagatcaaaagcttctcttagtttctgtgacttgatacagctcacaactaactcaacagtagtataattagatggaccgattcctgctacactcatttcttccaaaatttgatctaaccaaatgaaatttctactcttagccatgaccgtaattagtgaattatatgcttctggacaatgtgcctggtcaatttgtctctcagaccaccgaaaataatttacagctagattaacatccttcagcttcctcaacactcgaatgactgattctggttgaggtttctcaaaacgtgccaacagagaattctcaatggaaggtccccaaggactgctctccaatatatggcatgtttcatcaactacctgtcttgtacactcagcattcaatgggctttcagggatactaccaccatccacaaaggaaataactttcccctccgactccgaaaaattcccatttgatgaaaatgagcacttttgtgaaaaattgtaaatcttaccaaacttgaaatcgaaacgatgtgctattcctgcaaaacccagataaagataggcagatgataaatgaaacatacattacagacaaagatgcaagccataaaaccaatgctttgaccgccacaaaagaatacaagttgaaacttaccataatttcttaggagtgttttcatgtatgcacatccagctgataccatccaggtctagagtgaattttttacttcatatatctgatgcacacggtgcaaattattatttttttcaaaagagtttcctttaaatactaaagcagcaaaacaaggaaacatacccgtacatctcagcctatggagatcaacaaaataataaaagaaaaattcagaaatgccatacaactttcacacattcaaaccagttgaaatactattgttaacttaggttttttttattttattttttaaaatattaaacacaaatatatatatatatttcgtttttggtttcaaaaataaataaatatatacataaatacgttttgggaacttttattttttgtctaaggaccattatttattattttcaaaatcaatataagagaattatgattgaaagatcaaattaaaaggctacattgacagttaaaaatatcattaacaaatggagaagacaaaacacacacacacatacatataaaggtcactctatcctcttcacaatctcaacatactccatgataagaagaaaagcaataggactttatagattcttagactagctagccattatagtttataggcactgtttgaagagaaaccaaaaaacacataatggtccaaaacttcaaaaagggtcctcgaaagagcagtaaaaagaagatatcaaaggattccaactgaggcgcggtgatgctctggaatgatttcttctaaggggcagtggtca

SEQ ID NO: 185426 - DNA, 4852 bp, Cannabis indica
aaaacaaacacaagagttatagatgttcgccctaaattcaagagtacgtcttcttttgagctcgccttgaagaacgatatcagatctgcactattaatggtgaattttacatcaggtgagaaatccaaatcacaactcgactgttatttctaatatttctctcgattatttctgttaatattgtttaatatttctctatgttaataatgtgtcaatacaatattagctatcaaagtgttcacataaccgatatgttagctttgtaagcccatatctcacgtgtagtttttgtttatattatcattgtatataatttatgttaaataattaaatactcgtggcataactttctataaaaattattagattactatcgattattataaaggtaaaaactgaatgtataccacatttatccttaaatgtaccgttgtgttgtacccccacacaagagcccaaacagtataacaggtggcagttggcagtgatgtaaatcattgtcacgtgttatccatgataaaagaaaaataaaataaattacaacgtaaaaaacacatggggacctgaattctttctattaaacaatccttcttttttataataatgagctggtgcaaaagtgcaacagtacaacaagtgcagcaactaactcttttctttttaatggaaacaactcctaaattaaatccctactattattattcattaaggaattcataacaaccaacttcctaaaaaaaaaaaaaatgcctactattattaagctaattagcaatttttcttctcgaactttgacatataccaaattatgttccctgaatttttttgatcgttaaaaattctcttgtttgttagatttaaggatttttgtctaatttcatttaattttactgtttccgtgattaaaccatgttccccaaactttgatatctactaaatcatgtactaaataatacccctgaattttcatctatgttagaatttttttttactaaaattaaataaaaatctttaaatttgacgatcttaatagtttaggaataatttttaacggttaaaaaagtacataatttagtacatgtcaaagttaagacaaaaaatattaatttactttattattattattattattattattattattattatatatacatgtctaatttacctaatattaattactcgtgaaacgagccctattattaatgttatatttaaataaaattatctttagtttttcagtttttaattgtatttctttcttaaatgtacttgtaaatcgtggcttcaaaccaataaaagagagcttgattgaccaagaaaggtcaagaaagtaggagtattcttggtgcaagtgatatgagttgtaattgtattttttatactatataatttagtgttaataatttgtgcagtataagcgatttgatgaacacccgaaaaagttatttttctataaaaaaatcaagctcacccacccatagtgccttgtaaaactgaatagacaaagtaagtatctttcttataaaatatgaataaactccgttttaagtcaacattttaagtattttgacaatgttaaaccaaaaacaatatactaatttttattttatttgtaattatggcataggtttgataatttagagatataggtgtaaaaatggggtttgatggttgaatataaaactcactttaacgtgtcattcctatcactttgaattcgctgttgttatgatctacatcgaagcaaccgacaaataataggataataccgtaaattaatgccaacttgtaccaaatattacaacaccttataagaaactccacatattaatttattataattaattaaaaacaaattttattatttgaaaaataaaaaaaaaaaaaatgagaaaatgacatctcctaatttagaaaacaaaacacttaactcatttgtagttgtaaaacattaataccatttagccaaaaaaaccttaccatttcttctcaaaagaaaaaaaaatggaagaaaccaaagctcatcaacttcatgtcttcttcttccctttcatggctcaaggccacacaatgccaaccatggacatggccaagctcttcgcttcaagagggctaaaagccaccattgttacaacctcttactacgcacaaaacttttctaaaacaatcgagaaaagcagagcctttttaggcacacaagtcgaagtccttacaatcaaaatcccttgtagcgatgttggattacctgaagggatcgagagtgttcacatggtctcttcacccgaaaatagactcaaattctttgaagcttgcggtaagcttcgaacccaactcgaccaacttcttaaacgacaccgtcctgattgtcttgttgccgatactttcttcccttgggccccaaacgttgctgctgaatctgggatcccaactcttatattccattccacaggctatttctctttgtgtgcttctctttgtgtgtttttgtacggaccccaaacgaaggtggcttctgattccgagccttttagtaccattcctaatctaccggatcagatcgaggtcaacagagacagactacccgttgactttttgagagaaggtgttgttgagaatgagttttctagtttgtataaagctactagaaaaatggaaatagggggtagttatggggttcttgttaacagcttttacgagcttgaatctggttatgttgatcattacaggaaggttttgggggttaagtcatggcaaataggacccctttgtttgtacaacaaaagggtctcgtgaggagactgaaaactctgttgatagacacgagtgcttgaaatggctcgattccaagacacccaactcggtcatttatatgagttttggaagtgttgctaacttcaatgatgaacagcttatggagattgcaagtgggcttgaggcttctggcaaattgttcatttgggttgtgaagagggagaagaaagaaggggttaaagaagagtggttggcagaaggatttgagggaagaatgaatggaaagggactcatagtaagaggatgggcaccacaagtttcgattttggaacatgtagcagttggtggattcatgacacattgtggttggaattcgactctggaagctgtctctgcaggggtaccaatggccacatggcctattgcggcagaacagttttacaatgaaaagttggtgactgaagtactcagagttggagtagaagttagtgcaaagaaagttgtgagaagggttggggacattgtgaagagagaatctatagaaagagctgttaggagggttatggaaggagaagagtcagagctaatgagaaacagagtcaagggatttgcagagttggctaaaagagctgttgaagaaggtggttcttcttgtttggatctaaataagctgattgaagaactaacacatcatcgtagtaattcaagctagctagtaatgcttttgctgaaaagggtttatgatatttagaggtaaaaatgagcttttcttcccagatttatttttgctagttaagttcattttatacatatttcatctgtgaaatcatagttttgttcctattttcttttatcttgtcaaacatctagctataccagtaaatgacctgagtatggttagaagtaacaaaatgggaaatgaattatagtccttgatcgtttggaatgaagtagattgaccctagttgcactgaaggggcacaaagctagtttagctaatcctttgtgaagaagtggctgcaattattttctagcaggccctagaaatgaaatgcataattattgcattattatcttttgttcatttcttgttaaatactgatatttgaaaagctattataactctactaccttcctaatccaataattcttcatatacgtactaatacttatcatagctcaaatataatgtgtccatacttaaaagtttatgtaatgtgtattttttatttttgttgcacaataatattcgttatatgtaaacatttgaaaatatttggaaccaactcttaacggcatatttgactaaatcagattggctaatgctataatcctgtgaaagaatctaagtggggtctaataaatggatggataatattgtgggattgactatagcagtcctctcttcttctttttttttattggtttaggtaaggagtgagcctcctcctatttgacaatgtgtgctacacaaagacatgtttgttacattagcaaattaaagagttagaaaaaaatggtttggtgggtcattggacttattacacatggtggatgtggacctcttcccttgtggcattttatctataacacatttaatggtgtggggctagcttgaccttgacttttggtttagccaaacccaaataccatgccttgttagagggcaattacaagttgagtaaattgtccatttggttctttcttttaacaaaactaaaaatagaaattaaagctaggtatggaacttctttggtcatcttatctttttcttgaaaagttttgttaccaacttttacagctcttttcacctttctcctcatacctattttaaaaacaagtaaaatcgaactgtatttttttgtccctttcttgaaggagaaaaatgttattattgagcctttaactctattctaattacttcttagttaataacaattattgtggaagtatcaccttttatccataataataggacccttttatttttgttgtggagagtgggaaggatgcagagtagaagagatggagagaatagttaggtgtgaagttagaaggatatatagagagtaaaattacaatcttgcccttttaaaca

SEQ ID NO: 185427 - DNA, 2842 bp, Cannabis indica
gtaggcttcttaatttccacaaattaaactttcggcaaaagtttacaattatttgttttccaacaattccttgtatattattgtattatacacaccaaatcgagcaccagtgactacactgactgcaaaatgtgaacacataactttttgttctttttagtactttatttaagtttgaaaataccaacgtaatgttgaccaccaaacagaagctacctactttaattttaatccctaaataaataaataaagaaaaagaaggaaattgtgtgttttggctcacattttgagagcacagagtaaattcttctctgtttttgtccttgattctcatcatattgtaccagaagtgaatatctaaaagtcaaactgaaacattttcattacacttctcggttctgcttttttatgaaaaagtgtagctggacgcaatgctagtgaacccactctcataactacccaaattaaatttctagtataaacagaagaaaatgaatcttaaaggataggcaacagagatggtaccacacttttctcatgtgataccatactcgactaaccaacaaataagttatcattccgaatttaatccacaacacaaataacataaagaaaaataacaaaactttatatatatatatagaccaaaatatgaaaacagtgtataaatattatatttgatatggtgcttagcttagtgagcaaagctgcgggccacctatctttgaagccacttcagctcttttcaaaacaattcaaattaactgagtctgataagatcatatataagaccaaccaacagtcctcctccctcaaagtcaaaattagtttttttttttttttaactaatcccaacgacactttccccttcattttctcactacttctttcctttcttttttccaagaaaaatacaacatgattcacctatttatatatatatatatatatatatatatattatattagtaagtagtaaggcttctgaaattgggtatgaatgagtcagaccctgaaattctttccggtgaaagtctggccaaattgccaattggaaggaacaacgttccaagaagtggaggtgcgtcggtcactgcctgtgaccctgaaagagagtgactgaccaatcaagatggcatttgattgccagttctgaccccagttacgactcaagctcatccacccagtctttgatcctttcacgctcgccttcacgatatcccctgcacccgcgacgttggtgatcaggaccaagttaaagtacttgaacccgttgatcgtgaacctgattcccccttgctttcggcacggaaccctgttatttaaatatatttataatatttgtattacataaaggtataaggttcttaaattgtgattttaataaaaatttaaatattcattttataatattatatggagcatttttctttttgatgtggacgtaacttgcttgtaggacaaaaaagctatacactagtaaaaatttggatggttattataacttacttcctatcaattactactttataaattattcattaggatttttataattatgagagtgataaggtaggggtgtgaatgtgatactttttatatacaacataggtataggtatcatgatttaaagttgtgtcacgttatttataatataattaatttaatatttgataactaatttgttaccggcgataagagacgggaacaatgccggcgcggtactcggcgatcttgagaaacatgggcatggcgagatcgaaatggggacgtggagggttgcaccaaccaccgttgtcgctagcttgagcgaaattcgggggacaaaagttggtagcggtgatgaaaatggaggggctgccagcgtggcaccactgaggatcattagcacactttagctcgaagcaagcaccgcagctcagcccgttgttgaacagcgccgtgctcagcgctgccgtgttaacgccgtacccttggctgtaaaggttcccgtatccacaagccccacctgaccatttaattttcaccacaacaaaacaacattatcaacccaaaaccacaaccattttaactacaaaatgtatatataaaaattgtgagaggtacccattgtgccagaagcgtcgctcccgccgtaaaatgtagcgtgggcactttgccacgccccaccaccgtaaacgccgagggattctggcgtcgacgctggacgcaaatgctaagagacaaagtgttagaaaaatactcataatggccatagttgatttgggctttgactcactcaatgaccactacaagagacgaaaaagaagagagtaatttttgctcttcaaaggggcagagtgtgaggaaccaaagtagagaaacgttagctatttatacaaagagaagcagagagagaaaatttaaaggattagaattgtcaataaagtgaaattatcacccttaattaatgctgtttggtctcccgtttgttagttaaacatgaactctttttttatttgtttggcagtaattccattcaactccctctaactccatcttttgagttagaaagacgaaaatgccatggattttttatttatttatatttttgcaatttttctttatttaagagtttttttttttggtaatgaaattaataaatgatgatggtagggtcgtaaaagagggttggagctcaaggctgatgatatgaaaccgctttgtcttcatttggaagttgtgccattatctgcggctctctatgtgctcctaaattctttgtttctttgttcttctgataactttaaatttattttatttattttttgggttgttcactttttgaaaaattttggaacac

SEQ ID NO: 185428 - DNA, 935 bp, Cannabis indica
atgctgacaaattcatgaatctactcaatattaatataattattacaataagaatctattatttcatcaagatattaattaagctggcagttggcataagatggtgacattaacaataaccaaaacctcacatgcatataatgcatgtgttaattattaattaattattgaatggtcgaataagtacaactttcttcctaaaaaaaatgcagtgcatatatgatgcatatatattattattattattattattattattattattactattaaaaactaccgtcttatagttatgtatgtccatgattagtataatgactcaaaagaactaatttaaaaaaaaaataatgaactcaaaacaattgttcaaaaaaaaaattaaaaaagatgacttgatcattatgatcatactttcaatattaaaaaaaaaaacatattttcatgatacttttaaagtcataaggtaattctaacctaacactttttcattaataaataaagttatgatatataatacttcatgtcttttccacgtcccctaaattttatatatattcttaaatgattaatcttaaccaccatatataattaagaaatatgattcttgggttcatttttttttctttggcatagcagaatcatgtggtgattagatattaatagattcctcttctcaaagctgtattaattgcatcaaagcgtagatactgatcctatacaacagttagctagcctcgtacatatattttagactttaattttaaattacttcttttcttaatgtttattggttctttctattttcacttcttaattttcttgaaactgatacttatgttattaccataattatcaaatcatcaatttttttattatttaattataaaatagataaatggttactaatatataaagttttacatatttaaattatt

SEQ ID NO: 185429 - DNA, 2398 bp, Cannabis indica
tccattgattatattatagattcgtaaagccatatggctcacatacgcatagaggtatgttttaataaattattaatactctaaataaatactttcatcttggattatatattcacgagcattattgttgtattgattatctaaaataaaatgctactacaaaaaaatattacttttgccaacacatttttgtgttggaaaaagtttggtattacactgataaaatagaatttacttttgatgtattaacaaattatcgttggtattagaacttttgccagcacaaaatgaaaagtgctggcaaaaatgacttttttcagtgcgtgaatgtgttggtaaaaaattagattttagccactgcaaatgtacattagtaaaactttgacctttttgccagcgcagcttgcgaaatgacgcgggtaaaaaatacttttacaagcacaataacaaactgtactgataaaaataacatttcttgtatatcataagtaatttttatcaaatcactcatcactcatctagtggcaaaaaaaaagctacaaattacataataaaaccctagcttaaacacaaaaattttcggagtcaaatttcattattcatggaaaatgattctatttttccatgataattttaattttactatttttttttaaaatctagatagttttatttttcttatgcagtaccaaaaacaataaatattctccagttatggacttccctaccatgcatccatgatccatggtagctattacccttagctaacactaacacatattaaacagtaatccttaattattaattattgtatgagatacaatataaattacgtgtaaaaatccaaattataaaaatcaaacttttagatacagagatcgtatccaagaagccgtacgtacccgtagagaagtgagtacgtacatagaataagtatatacgtgcacatacatatataggaaggatataaagacacaactatattatgaacttatcaaaatctcatcatgacatgacaatatatatatatatattgatcatgatcatgcataaccacagtagccattatcacaagcaactccagccttgcatttcttcccacactttccacaattgtgtttattgaacagaactttggtgcatttcccattacagcaacggtcctcaaacttgcacttgtggccacatctaccacagttgttacggtctccaaggacgttacgacaatgcgttttgcagcaatacagaatgctcttccctttgttagccgggactccattgcatatgttgtacgtcttggggtcacagtgcgtgcctttctttatgatgtagctcgccaagaatcgactactactcctaatcccgacgtttgtggcaggcgtttgccccgccaccttgtccaggacgtaaaactcttcatcttcgtcgtcttcatcatcttcattgtcattgcggttctcatctttttcagcatattgatgatcggaagtgttattttttgatgatactgttgaaatattttgtattgatgatgatgaaacttgagagttttcggatgtggatagtagaagtagtaatgaggcgattattaggaagagaatggttgagattttgacaaggaaattattaatggccattgtgctcaatctcttcaacttcttagacttaagtgtaagctaagggagatttaaataagggtgatttaaaatgcaagttttgtaatcattaaatttccatataatgagggagaaatttgcctccttaaatatgaaaatgtgcccaggtttgtgaaagcttgaagctagaaaactaatgcagttacttatttgtagccaagattctcggttgggtccataaaatgttattatgtgcttaattgactttaatttatagctaagtcaatgtaataatatggtggctatatgtataagaggcagctaataactagctagaactatagttagctaacatggctctgaatctcatattattggttttttttttcttttatctagaataagtattaattaatgagcttataatgttttaaatatatctatttatgtatactaccatgtactactactccattataagagtaaaggaaatgaaagctaggtatagatgcatcctctaaatattgacattattaatttattcacaaaactatatatttgacatttcatatgaaatactactatttatatggacatatatagctgtatccaaataaatctaaagtatgaaaatcccacttacagttctctattttccagaaactgacaccccacacaaggggggataaaagaaaacattaaaaaagaagattcgaataagcaccaacttgcatatacacatgaatcaataagtaaaacagtgtcacattatattaattcat

SEQ ID NO: 185430 - DNA, 1232 bp, Cannabis indica
ggaattcgctgcttcctctttttagggttcgtatcagtctcctcggaagatttagatcttcgagcatcattgggttttctccctcctccttccgagacgtctgcttttggtttttcgcctcctggaatttctttcaatgaaggctttctcacatttccaactgctggattatttttctgcctcttccacgctccccgttctttgccagcagtagctccattggaagctacattttcgatctcatcttttttgtttactgcattatcgttaggtttttgatactcacctctgggttttcgttttctggacttgttatcatttggatgtgaatctggttcgttcaaatcattacttatttgctttacatcttgtgaatcatcacggggcctgaactgagttcgttgttgctgaattttcctaagcttcagtgtttgaacattatcaacagcaaactctacgattgggcggtgatcaggaccaaaagttgctgcaattcataaaatactaaatgagaaaagaaaacagccaccatttgttataaagataaaaattgtaatcattcaactattcaagtattgcaagaggtttgcatcacccacaattcgaattgaccggtgaccaagattagataagaaaatagactccacttagaaccatgtaacagaaaactaattttacactaaaaagttaccagggttattattgagaactcttagggcaactagtgcatgttgatgctctgaaaactcgacaaaagcaactccacgagagtgatgctttgcgacctcctttcctttcttcatatccttcattatctttacctacatgagcaacaaagattagtgaatattcaactaattggtaataaaaatgtgagaaattgggcaagggtattcttctctgcatctgaatgtatatcaaatgaaacaagagaaagttgcatagcctcgatttagaaagaaaaactaacctgtttaattacagggttttgctttgtagctcgtgatattacagcatctatgcaaagcttcttaagctctttttcattcattgtcttaggcaaattataaataacaagtctagtcctcgatacatggaaatttggggattgaagctttgttgtcttctttttttccaacctacattgtgtagaaaacagcatcaaaactgtgccagtatcaaatataatggtagcacattattcagcatcttggattttttttttttttttt

SEQ ID NO: 185431 - DNA, 5304 bp, Cannabis indica
gtgtgcaccaaaaacctgccatgacaatggctggctggccgtgcacctgcaagtgcaagctggccggccatatggtgtccataagctagtcggccatatggtgtccataagctggccgacctatgctggccataaggcgcctatcaggggtggccgaccagccccctcgaggtagctagttcgtcatttcatcgtccctcttaagtactcgaacccctcgttagttgaagtgttgagtagatggcttgacattcttgttggtgagctgtactcccacgtagcattgatgttggccacatagacatgccacgtcaggtgggcaaaaatcaagaacaattataatccaacccaatgtcccacctttagcaatcatcttcctttttaattccataatagataactctttatttcctcctccaatttcattaagatctaagttttccatgatcataaaaatattcttcacattatcctccacaaaatcagggccatgttgatgcacaataactaattcttaaatctcatgatctcttgccctgttcattgcgccaacactttccatattgggagtcatcgaagacctccttacaccaccaataaaattacctcactggccctgaaaacaagtagctttgaacccttcccgattgcaaccattgagaagcaatcaggtttttttgttgacgaggagcaactctcataaattccccatatggtttttcaattttttccaaaagagtatcaaaaatctttccacaaaaaccctttaatgtctttttattccacaaataaagcaaaaggttagagcatactcatatttaaaattcatccagaaccaatcactgctatcgatccttcgaatattcattcttcttgtagtggcttgtcaatttcaatagtgactcttaatcttaaatattcatgctagacccctagaaaaattattaatatcagactcaataaaacgtcccaatatagttcacaatctcattcataacattatccaaacaaaactatgttgaacatcataaagttgaacccatacgttcggcttgttaagagctattgttcataaattatcgtccaaccagagatgatggaaaataagtttgtagtattcaaaattttaaagactcccaataatcactctttgaatatcaatctcatggtaaaaataaaatggatataattgttttttttaagtctttgacatacagacccttactatgcttcaaagaaaagccatggtatgttgcatttcttgaatggcaattatccgacacttagaaagctacccactaaacaccatctcacgtcaaaaccatcatcttccacccttaccaacaacggcagtcctcaaatctcatcattctctagaaaaattctagcacactacacctccaaaccactggaatcactagtcgaatccattgatagaacaaaatgacaaaattgcgattttctgacacagaacaaaattaatcatgtcaaagacaagactagctagctatgtattaatctttaaggttggtggtacttcacaattgtagtagtatatatttacatatatgaatgaatattcaatgattacatcaaatatgtaactatttatgattatattaattttagtcattagattattaataaataattatgattaattcagatattaaattaaaatattaatagattacgtaatttaatatattttatttccttgtattatattaattaagattacttttattttgaaaacaaataaatttaattttaactactaataattcattaaacaaaatgttagagggttggtttagcaattacttatttctattcttttcacttattaggtccttaatgtaaattctttatcacttcaatcattaatcaaaattttattcaaaatgtaatcatgttacgttaccattgaaattttttttcttggatatatataaatatacatatatatctattatatgtacaatgaaagtgaatcattcagattattatattacaacaaaagtaaaagtcaaacacagcacaacatatttcaaaacaagaaaaccatatgtaatcaatttgtagtaattacacgtgtgtatcaatttgtactaaaagctccactactttactcatggcgggtcttaagtttctatcttcttgcacacacaaaagagcaactttgaccaatctctcaaccttcttctggtcaaactcatcatcaatcaaccttggatcaattacttccttaagcccctcttctttcatattctcactcacccattgaaccaagtgattgaactgagcattataatgatcatgagtagatgagtttgagaggaaattagacacacattttccacttacaagctctaaaacaacaaccccataactgtacacatctgccttagaatctattttcaagttcatcatccactctggtgccaagtaacctctagtgcctcttactctagagaatccaacatcataggcctctttgaaaagctttgacatcccaaaatctgataccttagcctctaagcaatcatctagtagtatgttctgaggcttgacatcacaatggagtacccattctaagcactcctcatgcaaatatgacaagccttttgcagtccctactgcaatgttgtatctttgatcaaatcctagcttttttgatgagtacaagactttgtctaatgaaccattttctacatagtcatatacaagtagtttgtggttcttttgtgcacaaaatccccagagcttcacaagatttctatggtttatattccctatgatacttacttctgcccaaaactctgcatctccttgtaaaatgccttcaagtctcttcactgctacaactcttccatcatccaaaacccctttgtaaaccgatccaaaaccgccttttccaatctcttctttgaagtttttagttgcccttttcaattctaagtatgtaaatctcttgaaacccaatgctattgccatgtatcccatgttgatcatctcctcattgacgcgctttcgatagatgaaccaccaccacaaggcaaagcagagtacttcaatgacggcaaaagcagctacaaaagccattaggtacttgaggtacccatttttgttactcttctcacctctagcatcattattgaaaagtacttcagtagatgaacagctcaattcgtctcccttttcacttgtcaacttcatttgagagcttggtatgatctcttttggaaccttcatgtgtatgacactatgggaatctggtgtatgataaccatttacaagaaaactctttggaaaacattgtccttgcccatctagcgaatatccaaaccctttgcatctaacatctgttaagcatgagtttctacattctttgaaagagactccaagtttatatgtttccaaatcataaccatagtaatctgtgttaagaagctcaataaagtcaaccttatctgcatcattagacagtttcaatggaggcctgcagcctttagaccaatccgaaacatcgattcttatgaagccattaggacaatagcaagctggttttggattcttgtagctgcatataccatactcaccacaaagaccatcaaccaagcaagaatctaaattgaaaggtaaccatgatatttcccaaagaccagttgattcatctaggctgtacaatctcaaaatcccatcataatccactgttaatcttcgttttgggccaatcccataatcatatgcattaaactgcaattgatcacttgataaaaactttccatactcatcaagaatggctattctagaactattgtaaggtgttctaccagttacaaatacattaccaccaggttgtctaggccaataaatacttgaaagtttaggaccattatagactaaattcaacacattattgtcatcaaatttcatgttataaacacctgtcaagtatgtacctttactcctcttagacaccaaagttgtgttgataacaagaggctgcagtggcaggagagtgtcagtagggaaattaaagctaccccagatgatcttcttctccacttgatcaatcaagacaaagttaccagtctccaaaagctgagcttcaacagctgatgaatcagaaaaagtatctgtggaccaaacaattgaaccagaagcatcagtcaagaccaggttcccatttttgtgaagtgttattcttgattgtttcccattaactggtttatccctattagccatccacacaactgttttgtctagagatttggtgaaccatattgagaaacaaaaagcattagtgcccaccttgtaaaagccagctgagaaagtaccctttgctgaaaccaagaattctgtttctaatttgtcaattttcaaggaacttcctttactcaaacttggccacccaggtgatgatgagcttgaacttggttgagaccaaattattgctggtgcaacaaaaaagacaaagaaagtcccagaaaatttcatggtagggaaagagagaattgtattactttcttgtgaaagaaacctcaaaccatatatgtatatttatacatatagttattatacaaataaaacttctgaattatttttttttatgaacaataagcttctgacttttaaatgtcactgttactatgttatactacgctatgctatgttagctatcaattattcccattgatatgtatgtatataataataataataataataatttgtcggccaagcagcaaatgccaacttggcaatgaaaacatttataatgttgggaagacttgtcttgtgaagttcaatttttgttaatctattcaaagataaagctgatgatcaaaaaatttgattcacattgattcgttgacaaactagcgcagcctaaaatgatctcatcattattatacataaataaatcaaagggtacctgacacaaatgttgagaacctaccttcttacttcataccattcaatcatatgaattttaatttttgtactagtctctaatttttattctctaatataaaataaactcaaaagagaattttagagactgtttggttgtgttttctgtttctagtttttaaaagttgataataaaaataaatttttgttcattttaaagtttaaatggtatttgtacacaaaatttttaaactatttttagtatttttcttactaaaaaattcaatattttaactatcataccatgacatgaatccattcaatctgagttcgggtttagttcttggattttaggatctgtaatatgtgagcgaaaaatgtaaaaat

SEQ ID NO: 185432 - DNA, 11673 bp, Cannabis indica
aacttacaacattaattatcttttgtaaatttttaatagattacaaatagtttactacattaaaaatgagtttaaatttttttaaattggcatcataaattaaaatattaaaactctatgtaaatattgtaattattatgaattttttaaaaaaattcatcttttatttcataaaactataacaaaaaacattttaaaaaaaaattataaaaaatatattatggtatgtattttcagataaagaagctgaaattagagattgacaataacattttcttgaaaagattatagtatattatttgataaaagagtactatttttctttattattttgagttctgcccttagtttactgctgtgttaaatcacagttaatctcaagggtttcaatttcattagcactttttctggcccacaaaagtgagaattttgcttgcgaaattggcaaaagtagaatagggaatcaatcaccagcaaaaaaagaaaaggtaagtagtttgctatgagctttgctcagaattaagatcattttggatatactttatatactttgacataatttcacggtattttacttcacaaagtagatgacaactcattattgcacggcgaaattgtcccttatttgtcttagcccattctcaccaccctttttagcttagggattcttataacattttaaatattaaaattgtctgcttgtttaggttccaaacaaaaacccattcacagtatattttttattcttttccccatgccccttgattgactttgacaaaatttaacgatcatgcatttattggtagagattaatttaccatttaaactattaagtatgaacacaattagcatttataggaaaggaacattcaaaagcagggataaaaggggtggaaagatataaatcaacaagcttgtaaaaaggttataatgtaatttccttcattcatgcacagcagcaaaatcataattggagacaactagtaaaacgacctgaaaaatacattataaaatgattaatttgggcaaatcttaccaagtcaagatcataacagtggacaactgagatggccttcttgccatgcaaatgttgaattgtcaacattttttacctttttttcttcttttgattttagtctagtgggctataaatatcttttacaatctttctcgttcagtatgaatacccaagaccaaatacgttgaaaatgggctaccatttaatctaacggacaaagtttatgtctcacaagaaaaagaaataaataattaaataaaataataataataataatatttaacaaattcctatatttccaaaaaaaaaacacccttgcagtgtaaaaaaaaaaattacattccctatttatttatttataatggggttcattttgtgctttagtttatacccaagctccggtttattttgtgctttggtttacttaccaagctcgtatgaaatatatgtttttttcttttttttttaattactgaaatatatgtttagttaaaaatagtgagacgagtctattatttttggaccatataactccaataaatcttaatcgtgaaaacacaagttcagccctgtaacactgatagcagcagaaccaccattcaggctgacagatctgccattgtgggctaatatgaggctccaattcgagccaccaagggtccacttttccgattatcacgctcagtatccgacaaaaccaaatggccatagaaattagaaacagatgctcaatacatataattttattcatttatttttatgcgaattttaaatctcaacacctaagttcggcctggtcaggacacctggaaattaacttaacaatttttatttattttttttagtgtactgctgaagtgtgggctactacactttctaattacacaaaaaaatataatttgataagaaaagagacgagcgtgtgggtaccttaatttgagaagacatatcacccacaatagtcaggtctgtggcaagcaaagttgcacttttttgtaaagaagtgaccgactttcatgtgaactcataatgcaataaaaatcacgggcactccagtccaatccagttctgatttcatcatatgtcccagcaactaatatctgtatctctgctgagaaaaggcaaagcaacctgggaatccacacatggtccataacattttgtccaactagtgacactaatagattatgggaatcaaagatatttgtagagagggtaataataacattggaaaataaaaagaacggttggtatacaatttaaagtcacttaatctgaatatatacaggtgcacttggcttgacttggctatctaacaggactcgatggggacaaaaattgccttcataggcctcaaaaaacaaaaactataactcatgcaaaataccatttgcatgtgcctacaccaccaatccatcctgtttgactagctgttccatcaggcaccgtcgacgacgccatgaatatatataaatatttcttgtctcgttcacttaccaggatctagattcatatttagactctaagagggttgtgggtttctaagcaaattagcatccataaatacctaaggctatatccaaaacgataggtggcaccagagacaatattttaaaccataaatagatatttaagatcttctacagtcaagcgagctccagagcctccactgtgatcttcaccaaaagcagaagcaaccatttttctcttttcttcctgcaaacagagtaaaatatcagttggcatatatatgaacaattcatatacgtgcattccatttcctcactgctctaaaacattctcatatcaagtttttgtgcggccatggccttaccacaggatcacaagatatagaagggaagtggaatttaagacttcttgataagacccacttgcaagcatctatgcaatgaaatgcttgtactgctatgaatattgtactaggtacaggtacaaccacagttttaaacataaacatctcactcctctgtgacactccaccaaacaccttacacaactaaccaaaacactatttcccgcacatatgctgactagcacaaaatctaagtatatgcaatgataaaactagttctatatacttctcattactactaccaacaataacaaatctaccgcaaaaaataaaaaagcacaacaatgactggtacctgcagagctaatatcctgtcttccactgtattttttatagtgagccgcgttacagtaacaggacgagtctgaccaattctatgtgccctatcaacagcttggtcttctgtagtgggattccaccaaagatccaaaaggataacatgacatgcagcaaccatatttagaccaagatttcctgccttcagtgacatcagcataacagtaacctgcaatacaatttagcaaatatgatcttagtattaagagcatctccaatagggctctccaaaattattctaaatttgagctaaaatagctaaaaattattttacacaacaacttctaagaagttactccaagcgtcttctttaatttagttacactagtacttagtaaacatgattggagaagtaataaatataggttttcttttcaaaagaaaattactctcctttatctcaaattgttttgctctctacatttaggtagtgattgacattgttgatgaaaatatgatatacagttagcaatttagacaaaggacagtaaatagctagcatggttggagatgctcttagaagattagagtaagttaataaaaagttatttttgcacaatgttgtcaactagcaagctcaagaaaccatgtaaagattcccccagctgagtgaaacagaagtaacttgtatttaaacaaataatgttatgagtaatatataaaattttagtagagcccatatcaacaagtacaagaaagaatattcaacagggtggcaaaacatgtatagcaaataagcaagcaaatagggatacttaaagaatatcttggtagagatcaaacctctggatttgaattaaaatctttgacacccttgtctcttgagactagactcattgtcccatcaagccttctgtatcgtatacgagcttgttttagtgagtcctcaactaagtccagcatgctagtccactgggaaaaaataattgttttaatgggtccttcaattggcttgttcgaatatgttgttgtatgctttaacacatcaacatgtgaatggctactatttgcaaattcattagctaaagaagagcttccattgcacccaacagagacagagccacatggttctccatccaagttgtttggctttgaatgtgattgcaaaatttcaatcacagctttgattttagatgaattgtagtcactctgcatgactactgttttatcaacaaatgaataattcacaggactaccatcaagatcatcagagatgcaacttcgcagagtagccttggaaaaaacgacatcagagccaacttgttctttgcactcagtagcaggacatgtattgtcatccccggtcagatactctgatatacactgatagcagaaaacatggccacacatagtaacaacagggttttcaggtgtatcctgtcaatagcattaagtaccaaaatattaagtaatcagataagccagcgatggcaacaggaaaaaaaaaaccagcctaacaacaaaaggtccatacaggagtcactctaatcaaaaaaggaaaaaaaatagaagtggccattaatccttttcttttcttcctaaatccttcagtttatttgcctttctttttggttgtagatactttttttctttagcctgatttgttgtactcttatcattttttattgcaataaaagttgtttcttaaaaataaataaataatagttaaacagagagtgatatgctcttgaaaactcacatcacacttactacagagagccaaagattctaagagattcaatagattgataagcaaatctctggggagtcttctagccatatctacagaatcttttccaacgcaatcagaattatattccttaacaagaatcgggtgatcacaagcctgccggagacgcaaaagcatcaaaagaatatttgcataattctgattcactgtgccagcagcagcatatgcctgccatgcatgaaatgataatatcagcgcatatgaatttcatccgcacaaaatttcagatgagcaaccactaagattcatgatcatgagagcagacagaatataactccactgtgctcttaattcagttgatattattaattttgcacattttatcaaccactatacatgtatgttatgcaatactatcgtgctttagttactacagtcataacttctatgttgaatattctgaaattagaattgcttttctattcacaggcataaaatatgagtagcctcagcataaactaagaattccaatgcaacgccaaaagtgtagtaatgctatatttatatataatatatatgtaccacttttaagtacttttagtatttttagtacatgaataagtatgtgtagtaatgctatatttatatacaagtaccactttgggtactttcagtattttcagtacatgaataagttgaaactataatagtttatcatgtagttttcggagatttattacaaattttccaaaacttcttggcaatttaggaggccgaaataagaattcaaatagtctcctgcacaaaaatataaatattgaaacaagcaagcatgcaacaagctttttgaatcccgatttcgccatcctaaattatttcaaattttctgaaaatttgtggcaggtctcctgtaacagcattatacaccgtagtgtataataaaatagagttgtaactaatttatgtgccaaacatattagaagtacttacagctagtgacttttactgtgtacctacagccagtgacttttactgtgtacctaaaagtaagcattttcaatttctcaagaagaaacaataaattaaatacatagaccttaaattgtgaacgtgaatcagcttctagttgagtataaaaagcccgctcctctgatgagaagtccaccttagacaagcaaacattctttggtggtaagttgattatgggctccccatcgatacatgttcctagagacagtagtagaagatgattagcacaaaagggcataaataacacataatcaagttagcctccagaatatagggttccagtatataagcccgtatattatgaagtttgtaggctgtgttattttgagtgtttattgtgattttctaataatgacactaactgttagatggcagggcaggactaatttcatgcaacactcttatgaacaaactacaagtactcaatgaaagtagagagaagtgaattaattttgaccacacacttttatgaacttaggaaatgaattgcagattggagatcgcagaaggttgatcccaaatcacgcataaggcaattactagctattatactaaaatcaaagatatctatataggaaccagctcccaaggttttcataaaaagtcgctgcatgttttgcaataacatggagagaacacacatgaaacatgaataataaatgggtataaacaagtaggtccacaaaagaaaaagagtttaaaacacaccatgtagactctgaatttcagcatagatcaaagaagtgttatgttagaaagaaagagagagagaggacatattcaccttttgttcgacgtaacattatagctcttagaactgcttgtagcttcttgtatccttgaactgcatttctagatattggaacctttattgtgttgcaaaatgatttatacatcgcataggggtcatatcttagaaacctgaagtagctatacaaatcatcaattgtattttgtattggtgtaccagataagcaccaccttcttttagctcgaagactgcagcaagctctagccacttgagtcctgtgattcttgattgtctgagcttcatccaatatcaccctcagccaaccaactcttgcaaggggaccacaatcataatcaacagtagagctatcaattccttttctacctttcctacccttcttgccaacatttgaagtcttcttcttcctcttatttgtggaaaactcggaagataatccatttttttcatcatcatcctcatcaaccagaggttgttttgggacttcattagttacaatggcatatgttgtgacaaccacatcatagctggccaagcaaacaggatcctttgtcctgttacctccatgatagactaggacatttaacaccgcttcacttgcaaccttctcctcaagctccctggcccactgtcgaagaacactagctggacacacaaccaatgtaccagcatctggcctccgcttattgaaaacccttgaagaggtactaacttctggagctaacttaacatcatctgattgttcagttttcttgacttcctctgggccaaccttaccatcatcatcatcatcaatgtccaaagctacagttttttgactgcatgactcctctgatttggattttttctgcaagaacctttgcatctgtatgagagcaatcattgatatagtcttgccaagtccctgaaagatatgcaacacgagtctaagtaagctaatataagacaagccaagcactaagctacatgtaagagaagggtcaactagactccaagcaagtaacctgatcatcagctaaaattccacccagacaatgtagacttctagtttccttctgaagcatccatgccaatgcaattttctgttgagttaaaaatacaagatcaagaccatgtaattcataaaaacaatagaatataaaaatagcaactgacttaatatacctgatgtctaagaagagatactgacaaaagaccttcaggtaaattagcttccacttttggttggttgagatcctgcagaaaccaggcatttttagcactaaaaatgagtagaaacccgaaaatgaaattggtaagaacaatactactctgctacagcagcacaaagaacaggaagtactgtatccccaataacaaaccttttttccaatataaaatttgttagtgaataacaaattaagaaggacagggaaatgcaaaggaaaagaaaacgtagatttagaagaaaacaaaagcacatagattatagagaatcaatacaatacatctttccaacaataaaccaaatgtttggaagcccaatacaaaggcaagaactttactacagaggtgagacccaatctaagagaagtaaaatactccttagaggtagaaacctaaagttatgctgagaatcttacaactacttcccataaacgagctacaccatgcacattatcataaaaaggagaaaaaagaaaaagacatactccaactagatcagccaaaggacagctaatgacccttactgcctttctaaattaaaaccaactatatcccccaagcaaataaggcttaacaattttttttacaaaaaaaaaaaaactggtactacattaatttccttttcataccctacttcaactagatcggccaaagtacagctaatgacccttactgcctttctaaattaaaaccaactatattccccaagcaaataaggcttaacattttttaaaaaataaaaataaaaaactggtactaaattaatttccttttcataccctacttcaacctacaattcttgtctttcttaattttgcatgtgatcttctctactctcggctgctatgaaaaaataaatcaatgcaacacataaaacaaataaaatgatgataagacacataatcgaacatgttgcaattgtaaaaccccaaagtaatactagcataaacgaaaaagggtaatactagcatagaagtttattgcttctgcaaccaccaatagggttatggcacattagtggttgatacactcctaaagttagcatcaccaaattgaaaaaccatcatgatacaaacttgcaccattatgtacatctttatcccgagacatatgtactatggaatttttatggctctaaaacctgtgtacaactgcaatgttaaaataggtaatgaatacctccaatgcagcttgatatatcagcctctcatcactttcagcaaccctttcttccccagtcatggaccggtaaacggactcacttgaagtggcaaactgtgtaggagcagtggactttaaatgcatcatagaagaaggcagagtcctacccccattgttttcatgcatgaaaacatcattatcgttgcccatgctggagtgatctctcatgtggcccttgcttatggttgaacttggccctgttgaatagcgagaacttgcataagtatctcgaatctgattgctgcttctatttgactcagtacttatagtagaagacagaagagaagatggaagtatcctctttaaagcctgttgggaagagctattctcatgggcattaccagaaaaattagccttacgtggagtattggccggacgctgctgataagaattaacatcaatatgaaacttcgaatcatgtggtcgtccaatgaattgatttgagggacctgcatcatcactgaaatgaggatgaatctgctgctgcacccgggtatggccattaacactgtgtgagctcccattagaagaagatgccccatacttaggagaagcaacatttctagactgcccaacaagacctgcaagtataaaaaaaattgctttgtaattaacaggtgaaaatttaaaccttaaatagccaaatcctgtagaatcgataatcaatctgacctctaaaatttgagtttctgcctggtgctgatagcgaattaggaagacgtctcacagcggaagtacctctactatcatctatttctacatcactatcagatgaacttatgtccacaatatccgtcattgcaagtcgattttcccaaccttcaaccaattaaaatatatatgtacaatactataaaggttacaaacctaaagtgatttgcattcgacttataatagcaacaagaaaaacagcaaaaacagcaagcaacaatgtatttaaaaacaagtcaccagcagcctgatagcattcactagcttttagcaatgtttcagcaataagctgtaaatacatatccctagttttgtggaacacatgaattctgcaaggaagaccagaattcaggataaaattatacaactaaaaaagggagacaatctctcttcctaggcacagcgcaatgtgaaagcaaatattggatgaaatcaaaatgccgaaaaattgggagacccggaatgtgtcaatctcagcagggatttacaacacccttcaaaatcacaaacctgccccatcttttatttatttacttttttttattaagccgttcacaatgaaactcgcaagggcatttgtaacagacctatcaatcaagtttcacgttcagttggcattccaacaaatgaacttatcatcgtaaacaaaacaaacagattgaagtaggtctatcaatggaggagctaaaatatgaagtgatgagtaatttaagtccgtaatattttaattgagtcaatactaacaggaagagagaaaaaagaaaactcgacatacacgatcaaagccattcaaagattaagtaaaattatagcaaaaataaggtacattagaaagaaaaaaaaagttacatagtgaattttataaccctcattcccctggaggaaaaaagaaccaaccttcaacacccaaaaccataaaattcaaaaaccagaccgaaattctgaagagtcctcaaagcaatcatcgttaccaagatgccctatttgaaattttcatgtaaggtaaaccgagtcgtgatcaaacacataaacaacactgaccgaaaaatcgcgaagagcaatgcaacccattcaaaaagtcaacacaaaatctatagcaatagcagaaaaagtaaaacaaacccagaaacccaatcaattaagcatgcaacggcagcaaaaaaaaaaacagccattttggtcgactacgaataacatcaaattctcacacatgaacaccaaaataaaaaataataaaacaaaatcgataatgcataagagagtgttggaaccctaacctgaaacaatcgatcggggttgcagttgtgaacactgtggggtagggtttacagtgaaccaaaactaagaagtgagagagagacagagagagagggggggaaaaggcaacggtagcgtttagagcaaggaaaacattattaaacacaaaactcaaaaataaaaaatcaaaaatcaaaaatcaaaaatgtagtacggtgggaaatggagcggttatataatatatatttacttttggtttggtttttcgtcagatataataaaaccccaataggttacaaatttagatccccacttgtttcgaattccaatctaagtgtgttcataaaattatagtttgaaacacattacaatatggttgtagtttgtatttttgctaaattgctcaatgcaatttgattagcggttcaaattgcactaatttttgtaaatttatacaataactaatatttttagaaagggtatctcaaaaaaaacatttttataaatgaaattttaatttaagtaataaaacatatatttgtttttaaaaaaaaaattcatca

SEQ ID NO: 185433 - DNA, 4032 bp, Cannabis indica
cttttgccgcaattatcccatttgtaaattacgaatgtttttctaaaaaatgtgaaaatgattttttttagaaaaaaataataatgcaaataagagagggtaaaatgggaatatcaatatacttttatttgtttgtttatttttatttcttcagaaaaacggaaattcctttttcagtctcagagataacttagacgccaaaatccaaagaaacagaccgtagtggtagcccaaatggctcaccttctcaacacttccttcgcttcttcctctcaaaccttcggcgggaaccccaatttcccaccggcactcctcatttctggtcgccggagcagggtccacgtccaggctaagaccaagaacacggtattctcatcacctatctatacagtcacctatctatacagttgggtacactatcaccattgatatagctcatgatatcagtcttctccaaaactttgggataaagctcaatgggtttctctttgttgtgtttattaggttgatttttattcgttttcaagaaagtggaaggaattagttgataaggtccaggccaagcagctacaacctcaagaattcaacaatggtaaaataagattatgtttgcaagttaagaaattggtggaagtcttataaattctggacgtaatcatttttctttattattattatattattattattatttataagtatatatctgttttagataaggaggggggggggggggtgggtgagttattgatttataatatgaaagggtgacaatttgataggtgaatatggttcttcttactattttccactttcccaacatggcttatgtatcgatttttgaaagtatggctgataagcttagttaacactaatgccatgatgatgcattgtacatggaaagggcaagctttatttcttcttaacattctccatcagtagatagatgggtggcaaataggctagtgttcatttggactggaactcaacattcttatgtggactagctcttgcagatgagatattttctgcctattttgattttcaacctttgttgcaaatgtatatgtttattttctataaggggctacgggttgaaggtctatattggagacaattgacttagtaaagttctcatgtgcgaaattctgtggattgatgaattattattagtttttgtttttgtaaggatggggaagtggttgaggtgaaacatatgatgtatcacgatttagactattaactacatgcacgaatattcttgtgtacataaaataaatacataatagttgaataagtaccctttgctctgttaacgacattttctatctaagatagtttgagttaataatgcttaggcttatgataatggagtttctttttgaaactacgaccttggggaaagatgttgattagagtcatggcacagaaatgaagtcaggaatagctcaagtgttattatcactctgttgttcatacagagtgatttacaattcaaatcactgaaattttcgtagttcattagctgattaaatattttacaatatttttaaatatgatgtaggtatggttgattccatatcatgcttctgttggtctattacttgtgaactatcttgacattaccatcttccaattgcagagcttttcaggaatctttttaatttcaatggtgttgaagttgtgaaaaggccactactttgtgcatccacattctcaatgggacagaccttatggttgatttctgttccatttgcacaagcaagtgaaagtataaaatataatgctgtttatgaggttggcgagttctttgagttaggaatccagctctcgtatttgctgatattgttaggttttcttggtgttggaactttctttgtgattcgtcaagtccttgtgcgtagagaacttgatctttctgccaaagaattgcaggtaacaccagtctattctcatcatgtctttttaattttccttcaacaactgtctctattaaacaacaacgacaaacaatttagagagataataatccaataggtcatttcatgttttgctatcctagtagagatgaacaatgatggcaacctagtttcattgactttataatattgtgtttgttgtgaattcaggaacaagtaagaagtggtgatgccagtgcaactgagtattttgaacttggtgctgttatgctgaggagaaaattctatcctgcagcaacaaagtacttgcttcaggcaattgataaatgggatggagatgatcaagatcttgcccaggtatacctagaatttatcattaaattttttttgaagtattaaaattatgtcttctcgttgttaaactgtcaaagtaaaataagtgaattgaaatttcaatcaaattaaactaaacaattgaaaatgacgattgatcagattttagagaaacttaagattacattcttccacaatgtgttattttaacagagctgttcttatttagttccatccttcaatgcgaattatcaaccaagaaaccataatgattcgcaagcctcttcgatctgatggccatgcagaaatatttaattttatcagctatctatattcctttcattatcaaattaacgtaaatttcattgagcacatgttcttaaaaagtttatgcatgcctatatgagaaacttaaagatcgtttagtgatcgttcttcattttattcaaggccaatcaatattccctgtcccatgttcatttaaatttactaataatctaattaatgatcaagtaattagaaacaataagcatcgaatagaatgagaaatttatcattgatttcagcaaaccacataaaatatgttaaaacattatcattatcgagtttacaaggaaaagcaaaagatttggaatgtaaaagatgaaaactcgtggtagaaactcctaaggaaaagtagtatcctaggctgtgtgaatcagtttctctaaaacgaaaaaaactagtaaaagtcgacctctcatcagtcctttatatcctaggtcaagtcttgtaagaaaaataagcaaatgtattctgaatttttgctcttttaacactggttgtcgcaatacttagccttcgagttcacaaaattccattggcgtcgctactcagaagacggctgtcgcgatgatgctgagtgctgattctgcatcatgaaatcttattaaaactcaagtcatcaactccatttattggaaagaaatttgtcttcaaaatttgatatattttttcattttttacctttctgatttgaaatcgttttctccaacctttcttcttttcctttctcaccttttctttatatatttatatttttgcccataggacaccccaaacttctttatggattctcttcttttcctttcttttttcttagatcaactaactccacaatttcccccgaagtgatttcttgaattcctttccttttagatcattctttttaatggtagcacacatgaaaacattaaccataggcacattaagaaatagtcgaaagcatctctttaatattgcgttgcctagggttttgcctcaaaaattaatcaatcaagtttcgaatcaatgagaccacagcatatacaatagccacaaaaagtttattcaagcatgcaaaagatacaagacattcactttatgtgcagaagagattttaggaaaccacgcaatatataagttcagttctatcaacttcaaactcaccaaacattcacttttcctgtttcaacttatttcttattgacttcgataacaaacagggaaaaaataaagaaaaactgaaacaattagactgaacaaagaaaactaaaacaactagactagaagacaagacaaaaacaaataaatcagaacattcctccaaacttgaacattgcaccggccgtaatgtagaaaaataaaagataatgaaagagaaaactttgttagaattattacacaacaatggaggcttcttgatgatgactctacattgtgctgccccaaacttgtgcaataacccgattcacacaaaatc

SEQ ID NO: 185434 - DNA, 6985 bp, Cannabis indica
aaagaaagaaaaaaaatgagaatgagagaatgatgcagagagtgcaaaattggaagaaaaacgtgtatattaattgattgttgatatgaaaaggaaatgtacaaccagtttctttaaagagattataaactgtataaaatctaattaagttaaagaataatagtatgttagttttaaaaaaaaatgtataaatgaaaatttaaaaaaaataaccgtataaaaatttaaattgtaaaaaaaaataacactttgtttaaaaattccgtaattaattaattaattttgtagaagttgtagctaatccaaaatggtaaggcaataacctcgtaccgaattaacacacgtggaagaaaacccgatatagaattcccatttaaccaccaaagtaatgccacgtaagcacattggcggtttcagtttctgtcgatccgaaacgaagcgcgcccttatattaaggagaaaaacgacattttatttttatttttcaaaatattcaacaaaatacgccttaaattaaatgaacagcaactttcaggcttctactttttctgtatttatactttccgtatctaacttgttcgacctttaaccatctcagcctaagcgtggccttcaaaccctctcttttttcctcttctctatttgtctctccatttcctttttcttatcacagatattttccctcctcttaaggtccgtataatttctcatttgatttattttttaatggttgatgatcgagtaatctgagttttgttctttctttttatggattcatttcatctcggtgcatgctttgaaacttctattttatatggttttgtttttggtttgatggatggaagcaattaatctgtggattagggttctatgtttttcttttttcttttttctgaatatgtttgtagtttgatctatggataaggtttataatgtttgattaagctttaatgttgttatatacttgtattttaggtatttattgtctggtttagaaccgatggatttatgggtatgtggattagtgattttagatgtgtaatgattgaagtttattgattgaaaggtgtgttttttgtttctttattcagaaagtgggtttcacaagttagatagcttttggaagcaaatggttttatgcttataattattaagctttgtgtttttttttttttcaggagctatcaaagtttagtgagattatagaataaagcaaggatatttatttgaaattacacatattctaaaactagtatccaacccaatgacaatggataattgggacccggatgttaagagatggaatcttcatctgttagatgtttgcactctttcaaatgacacctctcatagtactgttactagatatgaccctgattttagtaaagtggaatatgttcaagaatgctatgttgagcccaataatgttgaaaatgatgaagttatagctcatgcttatcaagaggagttatcaagacttgcttcagcagaaaactcaggacgtcctgtttttgaagaagatcacttgcaacaatcaattcttgcgcaagattggcttggaccttcaaagaggcatgatagctctgattatgggaaaatggaaggttagatattttttaacaattgtttattctttccgtgtttctttcatccttattggaacttgacttataatgatgtataggacatgaaaacgtttggaatatggaaaatggtcatggtagtaatgggaacacagaaggtcaccacaacaatggaactttagtagatggttatacagaagataaagcaggggtggaaattgattctggcataaggataaatggagatgtggaagatgggatgggatctatctttacatattctgtcccagccgaaagcaaaggagaaaacttaagcaatggggaagactggtcatatgcattggacataacagacgagtcttcgcttgatagtgaagttggcagaagactgaatcagatggttcccgttcctgtgagtgattgctgtgagatgttattatacctttaattgggttgatgtcatttcatggggataacgcatgatatatgtagtttgtttagtcatttaaatttggtttgcatttttagaatatacttatattggtgatttatttcatttggcagcatgttcctaggacaattgaaaaaattccttcaattgatgaggagatatcagatcacgagaggcttctagaaaggtctagtgttaaattctctattgtattaaagacttttgtctcttatccatgtatgtatattattaacttctttgacactactaagttcttatggaattttgataacagacataactggtatagaatttcattgagtaatgtgctttgtgaagtgctgacaaacattataagagattttatttttttctcttgcaattaatatatgttatgttcatgggttaaatttattcttagcactagctgcactacaaaaccctgagaagtctacaatcatttgtgcatttgctttataagatcataatgacttagttgagtaggttggatggaggtcgatatgaaagagaacactctgaattatggataagaaaccctacggagggaatttattggtccagaattttctgtaggggtataatatatggggacttgagaatgttacaattatctaagcagttgtttttttttttatttaggttgacctttattattttagtaattaatgacacgtttaacatttatattggagttcttttcattattttagctctttatgttttgtaaattgtattacaaatgttaccttcagtcatccaactgtttaatggttatgaaaataacaattttcttattgttgtggtgaatacgtgtatgcaaaatatttcaaaaaattcaatgtgtgatagctgtaagcagaaaatattcaacatgtgatagtagatatactcgctgttttagtcaccttattaactgatgtattgcttagtaaaacctcattttcttatagattgcagatatatgatttggttgaacgtaaggtccagggagatggtaattgtcaggtattatcttttttcagtttgcttcctagactttttatgtgaatgtgtattttttaatgcatcttgaggtttactaaaattgagtgtgtatcatctgttttctattgttctcagtttcgtgctttatcagatcagctctatcgctcttctgaccaccatggttttgttcgagagcaaatcattcaacaggtctgatgtgcactagttcatgtttttagtttgaacttgcattcattttaattattgtgcatatttgttcagcatttgaccatgctcccatttctgatgttattagctgaagggtcaaccccagacgtacgagggctatgttcctatgggttatgttgactatctgaagaaaatgagcaagtaaaatcctaggctttattgttgtgattttcatccaaatactgtaatttgttttcttttttgatattttttatgtgaatgaaataggaatggtgaatggggtgatcacgttaccttgcaggctgctgcagattgggtatgagataaaagttgaccgttcaagctttccattgtttctgtgaagttgtttaatgagttttaaacatggtgttaatatgttcttatattgcagtatggtgtcaagatatttgtgctaacctcttttaaagatacatgttacattgagattcttccacaatcacagaagtccaacagaggcaagttttgaacaaataattttttcaataacgttttgcattgtcattatgttctaaattgtgattttatatcgtataactgttggactttgtcaaacagtttgtttaggaactgttggtatcatcatgtttaccatattctatctaattctatttgatttacctgttattaaaagcttcatgttactagtaagtgttcattctaaacaacatattatattgttttttgctcatgcagttattttcttgagcttttgggcagaggttcattacaattcaatctatcctgaaggaggtagtgctttcttttctattcttggctttttctcctacagaatcatttttaaaattaagggcccaaatttacttgaaaaactatacattaaatgagcaattgctcgtaatcggtatggtttcaagtgatatcattttgccaaggagaaaaaattgagttttaagattcatttcatgatatatattatgtataaatgttttgatcatttttgttttgtatttgcttccccattgatagaggttcctgaactttgcacaaggaaaaagaagaaatggtggaatattataacttcataagctatgatggatgtcatgaaggaaatgagaatcttgtgattgctactgctactgctgagtcaaatcaaccattagtcttttcgtctgtaactggtcttgcagatagaaaagcaatgatgaaagacaagattttgcatttgttgtaaatattttattcttttagagtaatctttatatgcttgtgtatatatacgtatcatctattcttttttttaatatatatgcttgtagttgttgaactcaacatttcatggcagtttgcaactaaactttttattaaatgggcctctgaatgaagaaggtaaaaacaaaaatgctaagtgaaatgttttgagtacctaattgccttaatcattggtgggtagagtagttgctagtcagtaaaaccacaaaaatgtatacccacttggtctgtgataattgaacttttgtaaagagaaaagtgtaatgtacacaatcaacgaactaagaaaccagcttttggtacaccccaaaaaaaaaaaatgaaggaattagggtcaattttgtgacagaccatattcaatcaacatgatcatgtttttacaatcttaggcctccatgcttgccacattaaacaacctctttctccaaatattggatctaccacatgctttttcaacatctctcttttggattttcttgcttcatcatccaaaggcaagcttttgagaggagtttgtggtgggcttcccatatctgttgtctgcataattctgtttaaaatatccaatacttcactcattttaggacgcgatttaggctgtcgaaccaggcaacggttagctacagatgctagccttttggcagccttgagtgaatacttcctttcaagccttgggtccaaaatcagctcgaatttttttgagtcggagagatgtggcctgatccattctaagagcttttgctcatttctaggcttgtttcgatccaaaggccgcctcccagtaatgagttcatataggaatactccatagctccaaacatcgctctttgaggtgagacgcccagtttgaatgtactcgggagctgcatagccaatggttccaacaacctacatcaacataagaagagtatcattttttttgtttgttaatatacaacatacatagaaaacatatatttatatatgaaaatacattatgtaaacatactgcagtagagacatgactcaatccatctgaaggccccagcctggccaatccaaaatccgacaactttgcattccattcttgatctagaagtatgtttgaagacttgaaatccctaaagatgatctgttacaatgacaatatttcagatcttaagtatgagaatcatgacacaaaagacttagcaaagaaattaatttaacctcatctatactcaatatgagcctacatctcaatctctgtagtgctgatctcatttatcattaccaacttctccaaccaagtcatcacacacatcacagtagtaagatttaacaagtacctgaaattccattccttcatgaaggtaagctaagccgcgggcagcatcctgggctattttcattctcgtggcccaaggaagtggcgcctgagaccggcttgacaaatggtcttgaacacttctattaggcatgtactcataaatcagcaatctctgaatccctctttcatcatcctcagcacagtatcccaacaatttgacaagattaggatgttccacaatccctaaaacatttacttctgtcacccattctttgtgaccctgcaaaacaagaaaacaacaaggatcattagaaaatggtaattgaattatgggattgatgattgaatgaaagataggatgagaagaaaacttgtccccttttacttagttgcttaacagcaactttcaatttttttggttgaatcaactgtgctccttgtgatgcccttataaacaccaccaaatccaccctctccaatcatgagagaacggctgaaattcttagttgcggttttcaactccgcgaatgtgaattccttgagattactttgtttctgagacaaaactgcaaatgccttggcagatgaagattgtgtgctaaactctgaaacattctgagaatgactttcagaaccggatcttctcatgtcaggatcggttgacaaagaagtagaaagagagccaatagaaatggattttgaactctttggctccaactctttcttattcttgttatggaaataaaaacacttcattgcacttctcaaacccttgtacaaatctttcaagagccttcagctaatcagtagctaaacttggctgaagattaaaacatttgaccaaactttagatgttcataaaactcaaagtcaaacttgcacaaagttttcctttttaagttaagttaataaagaacaataataataatgtggccaagctcagaggaaactagcatacactttcacagaaattacaaccacctaatgtaatactcaaaataaactttgaccacttccaattcctatttgctatattatatatatacactcaaaaagtcttcttctccaggcatccatatccaaaataaggttaatatattgctgaattgcactactttctctcccaccataagaaatttcccaaataaaaacattaaggttcaactgagataaaat

SEQ ID NO: 185435 - DNA, 1558 bp, Cannabis indica
aaaaacctcgaattgatacctctcaccattttcaatcaccgccatgtctatctgagtctgaccttcacactgctctctcctcaatttctctctttcaatggacgagtctctcaaaaatctccctaccagccatttgctcggttcagttcctgtacgtattgttcattactattaatgttttgtaataattgcattttcccatgtctatgatttactttcctttttctttttagttttaatgggaaatttatttaagtataattttgtcgtttaatgatctagtaaatgaagtgatcgagattgatcagatgttgttgaatttcttttatcctttgttttctgagaaattgaaggaaagatgggtgtagactctagatatgtgaagtcttgaaaaaaatctcttatgatttgacagaactaatgtcttgcccttttcgcttgtgggattttctgttgtgttctttttcccttccccattgagaatggtaaacaatggcaagctaaattttaacccgtctttttaattacgtagtattaattggtgaagccaattttccccccttttccaaacggtgtattcaattatcgtgggtacgatgaaattacctgtttatgagaacccatactttttaattatggttattacatgtaagagcaacctagtttttaacttatctagtatttttcgattgattaatgatgaaaaaacacatttgtaggtactattaatatgtacttacatgtgtttttgtgtctttgggtaaataggctgttatagatgaaggaaagggaaatagtacaacaagctatgaaggtatgatttgtactatcattttttaactcactgagtctttccttaggtacaggttatcctcaatctaggtctatttttctctaacatattcctgcgtattttttgtttgtattttttggtgctacagtgccatcagctaatatgcaaatttttccaccaactaatggaggagacaggggaaggggatatcaaactcttgaaagtccaggtccaagtggtaaattgtttgataaattaactgattttgtcaagtatacacatgaagattcgctctaagctttataccaaatattggtttcaaattgatgtttgcttatttcatttctggtttgggagattgcatttgtttatttaggtaaataatagggctgttctgattttatccttggactgcaattgagttaaagttaactattttttgtattttatcatgaatttgaaatttatgcatgtgtgtgtgtggaacaccccacccacccaaaagacaccctattctattctgttttattaattattatttcttgttcacaactgtttcactttttttttttaactgtagaaccctttgaacaacaacctgcaaacagctggaagggagtatttagtgtctcatcgtatacacaatatttcaatgtagatacagaccttgtcttaaacagattgctaggttctctacatcctattggcggagacttttttaccaagattgatgctaaccctgacctgtgagttctgatctttgtt

SEQ ID NO: 185436 - DNA, 4045 bp, Cannabis indica
agtccaaatccaagtcaatcatcaatagttacaagagttggtatttggccatgatttataaactcaatctattcaaccgcacacagcataacactttctctggcaactcctctgtttttgtgcctataaacataacatattatagataaaaccagtcagttctttatacttgtaacaaattgaggaactataattaagtaataatcagctcaactagcataaaattaggtacctgaatagttaagcccaaatcaagaataccattcttcaaacggtctcggaatgattcaagtcccctcctagagatatagctgaacctatgtatatcaaggtcaatctcaaagtaatttggtccctgaaagaacacaatcagcattttaaaattttaaatgggttgaatgagttcattcatgtctgtacatcatcaacaagagttattattttaaccttaaaaaaactatgttgagggcgtgagagtactggcttatcattataagcattgattagttttctttcagcagaacccaactgtagctcctctggattcaccactccagccaaaattttaagtctttccctgaaaggcacaattgactcccttgcaaatcctttgactttctctgtctcatcctcaagaaatctctattgaaataaacagaaaaggtcaatattcatggacaatttatacatgtattacattgcaaaatggaaaagaaagcaatacccttatgctgtcttgaaatgtagaagagatttctttgtcaaaattctcagaaactttaaagtataatacaaggctcatgccttctccattacaatctccaagtaacatggtagttggatatgttggaagctgcaaaaatgacaacgaatttaaattcagattgatcaaataagacttgtcatatcatatcaaacattcgacattcatatacacacacatatatatatatagagagagagagaatgaacctgaatattaacaattagtagggaaggtactttgtcattggctttgacagaagggagctcaaggtgctgagcaatgtgattaatctttcgtggacatataaataaatctacaccaaacggtacgtaaggactaaagcctgaagccgattgcttctgtttatctctgcatataagccaaaacattttcagcctaacacattcccatctctaatgggaaaacaaagcagcagcaacaacaacaaaagaagaggaagaaaagaaagttacctaaaataattctccccgcggagcttaaaaacagaaggcgaaatggctgaccagcatccaggtactggcttatccccagttgaacatggtattcttagtcctgctcttggacgatataatagcttctcagcagcacctgaattggttggtacagattttttgtgaagaaaaagagggcgatttttgttaacttcaagggttaagtattactattatgagtgatatccaacaaaatgaaatgaacgtacaaaattcagtcttttcatttccatcagcggattttctcttgtaagaaagcatgatcaaagtggattgttgttttctctgagggtgttggggactactagacaatggttgataagtactcttgtcattattgtactgtgttgtggtggctccatctattttcaagtaactctcataaaattcttcatacttacaccctgaatccacatagcatgaagcactttcgtactggaccagttgagtgtttggtatgcttccaatcggattagccgctaaaggaaaaccatctaaaaacccaagcaaccaaatctcaatacaaagaagcagagtttaatatcacatatcatttataaagtcataaacagaacaaaagagatggaaagtactttagttacctccatgaacactactgaagtcatcatctgagtcagaatcaagaatgctaaccgagtcaaaccaggcttcttcttggcatacccctgcataaaaattggattatatagtcagaaaacaattttttaaaaaaaaaaaacagaaacagtagaatgtgtaataagaaagggtaatgttgagaatgcaaagagagttgttataccgccatttgggtcaacttgggcatggttccattgaagttgagcaaggtgaatttttcatgttggagacctctgatctcttgcgggttgttgtagcaccacctttcttaaaaccaagatgaacaagctcacttacatcaaaatctctaacacgatttccagcatcactaactcgtctgattggcacatcaggaatgcaagtggagattattccccttcgttttccactagatcttctacagccatttcgacttgctacgatccttctatttgatttcgaaacacaggcccccattttgaagacgaagaagaagaaaaacaccaagaacagttgatatactaaaataaacctgcagcaactaaatcaagaaaaagtatcaaaacaaaaggtcatggacacctgggagttacaactaactaaataggagcaagctaagctttgcaatcagccaaatcattaaagtaaattttcataggaagcaaatcacaaccattgagtacataccttaaaattgatatgcctttctaggaagttttcctgagtaaattggttatcataagaatagaaaagaataaattccttttaaaatataaccaccccagaagccactctaatataaatactccgcccccttgatctccatccctggaaaaagcctggaaaacacacagaatagtagtaagataatgatatgtacaatatataattttacaatagtaacatgaacttttttctcttttctctttttccttacaagttagcaaatgaaatgagtacattcaaatgtcaatgtttatgggacgagtgatgtatgagagttcctatcactatcaaataggatttttatttcaaaagagtagaggacagaagttgatatgttgattgattgtgataaaaatgttgcaataacactttatggaatagacaaacaattacaaaagcgttttctataaccatatatgaaaagcaaaaaccccacgataaataaaattaaatatataaatatataaattatttacaaaaatgataaactctatgaacccaataattattctaagaggctcattacaaagttaaatcacgcacacatgcacacacaaaaataaatataaatacctgggatggaaagatgatccagcattgatgagtttatttttgtcaagaaaaagaattaaaaaaaatgaaagggagaaggaacggggaattccctcctcctttttctttccctctgtgaaaaaatagataaggaatccaccgaggacagaaaaagggaagccagataatatggagaaaatatatcacataacacaattcgatgacagagcacaaaattgaatgaagtccgttctattcggatccaatcttttcaacctctctctctgtcctcctctctttctgtttatttatatataaggttttagtttctgactaattatgtatgtattagtattaccgggcatatggcattatggcaaagcagagacaaagctttttaactttaagataataaattcccgccgactgcggttctacttccccacgtgtgatcaatgatcactctttaagcaaataaaactaaaaatactactccatttaacaaaattgattctacctttatgctatatagattttttttttttcagttgtagatttatttatcatacataaattttcaacagaaaatggcttcagtcaactcaatatacagtatcatactgccacacacacaaacacaaaagaaaaatactatcatatttattcatgacattaattattatgcgataaacttattaactaatatttattgattatttattcgaagcctaaataaaattatataaaaaaagaatacgtactttccttttttatttatatggattaaacgaattaattagtttcttatgcatactttttgtaggcgaacatataatattagcgtaagaatatttatacttaattatatttt

SEQ ID NO: 185437 - DNA, 4748 bp, Cannabis indica
ttttttaaaaaaattttttagcttaatttgagatattataccttacttagcatgcatatattagcgagtatagttaataggtattttatggtgcccaatatcatattgatgtattatgttgtgaatggttagcgatttctatataatttattaaagtaaaatgtgagacttaatattgaattgtaccaatagtagtatgtcactttttgtgataaaataagttatcaacttctttacttttaggagcactttcaaaaaaaattctaatttatcttttaaaataagttattgaaattttaattttttttttattttacttttacacattcatattattctatatataaaaattatttatattttttctaaatcatttaaatattatatttataatatacataaataataataatatattatatattatatccaacatatttaattaaataatcgaaagcacctaataaagataataaaatattataactatgtactaaaatctaaaaatattctagctacatttagctatacactgttgatgaagtaaaattttgttataatatttgatatttttttagctttagctatattattaattttgtgtttattacacctgagttagtgtgagtgctctaatgaaaaagtcaaaattaactctgcatttcgaatattacaagactattactgaatgtggattgtaagtgatgaattaaagatagttaattatttaaaaggaaagaacaattaattgggtaaaattttataatttgatttgttggtactcttagttagtttgtccctgaaccagagaactacaagaaaagaccaccctctttcaaatcatgccactataaaatcacaaataactaaaattaaccaaattggtagaattaggaagatatatttaggaaggaaggaaggtcggtgggtccacctcttcttgaaaaaaaaaataaagataatggagtagtgactagtgagtagtcaatcacttaaaaaaaaccaataaaattgagaaatgcttaaaagtatgttgtatagtttttttaggtgtaaatatcgttattaatgcaattaattatcgaacctcatcaaatttaatgtaataatttttaaaaagtatcgctagctaatcgcaagaagacatatcaagaggtgctaaacaccactaactagtatgtaatatcaatcgaaatagaaatagagatagagagcttaatgtaatgaagggtaaatactattttgaaccttgtattttttaaaagttaccgattataccttttattttgttatttaacaaaatagactttgtattttctaaaaaagtaaaaataggatcatgaatttaatttttgacaattttttttaatataaccaacttgaataaaattcttaatacaaacaaatacaaataaatacaaacaattttgtcataacaataaaaaaatttacgaaatataaaatttaaaatatttttatccatattataatgaattagagggtgacattttttaaaaaaccgtgagatgtcctttgctgctgcgccaaaaccacgctttcacttctgttgatagcgatagtgacagccaagagagaatcccggagcaaccaacttcagtcttctgatgggctgagctgggctgggccgggccgagccgagacacctttggattgaattgggcttaccaaggttcaggttatcaagactaaaactctcccaaattctttcttccttctcactggtcaaacatctatgtataagaatctgaaaccttttgtcctatatatctgcccactgttcataatatgtacctcaggctcaggctcactgcactgcagtgtaggtctaatgtaatcaagcctaaatattgcagcctttcctaccaaaaacatttctttcttttccttttgttcaaataaataaattgaaaaatatatggtagtacacttactagtaaaactaactactcccacctcaaagaaagtaaaaaaaaattgagagggtgaaacagaaacagatcccagagattgaaccaaatcaaaactgcagagatcacggggaccgagaaatccgccacaccccaagcgagccaggactacaaaaaggttgaattgtattaccttattattaagaatgaatgaatgggataacgttttcattctaattaatcagtatataatatactattgttatttgttaccaaataaatattaacctgaaaaaaggaaaaacaatgattcaatttttgttttttaatttttaagtagagagagggagttgggtcagtgatagagcagcacatatgagcaggcaaagccaataattgcctcccacgctgatcgacacgcatgattttgtcggttctctctctcttactaaccccaaacttattcctttttcttttctccacctttggcggttactcactctcaattctcaattctcaactctcaaatcaaattccctcttactctattccaattccaccccaaacaaacttagaacatacttattttaaccaaacgaaatttataacaaaacaaagcagcaaccatgtatcagttggttggttggttttgttggtaggtacagtcttaattcttaacttgagtagcacgtaataatatgtttcccattgacaactaagcatcattagtagtacaatcttgtgtatttaccttacaattattgacactctaacagtaaattcccctataccaagttgtagtaataatacccattacatacatatgtataaaaacacacacaaacaatcataattagtaaaaatcaatttttttggtgtcatgcaaccgaaagtaataataataaattaataataatattatggtatagccaatgaataaggtttgcttggcttcctcatcctatcctaatcctaatcctaatacgtatagagatgtgtaatcagacgatcatcctcaaatcacgcctcgataagatagtggaaggaaaacgtgggaaattctgattggtgaactgaaaagactatgattactgtttatgtgtctcgaatatggtcaccaccatcatcaacaacaaatttgtattcgccacgtaaagaaacccaaataaagtgattaatagacgatcacaccagattattgatttgtgatcccctcagtcctcactcactgtctctctcaaccttgactgctcttaagaccgcacgcgacaccacgcgctccccaaccaacgtacggaatcaaaaagactctgatttcctttcctccttttgtattactattttattattataaaaaaataaataaaaataaaaataaaataaataagacactactcactgcctcagtccttcattccattccattctttcttttttatacgagttcgttctttctttactttcattattctcatttctcaccaattccaaaaacttcattcttctctttttctctctctctttcttcctccaaaagccccaaatcccaaagacaaaccagaccagaatgccctcggaatcaggggataagaaacaagcggcaagaccccaactaagcatgggacaccttccgccggcccaccctgaaccactcccatgcccaaggtgtgattcaatcaacaccaagttctgctactacaacaactacaatctcttgcagccacgccacttctgcaagggctgccgtcgttactggacacacggtggagcactccgtgacatcccagttggtggaggcactcgtaagaacactaaacgcactcgttcttccaactccaactcctcctcatcctcttcctcttcctcttccatgacccatgaccaccagcttctgccatctaaaccactgctccctgacttttccctagtgaatacacaaaccgactcatctgctgtttcacaggcacaagtgaatctgaacaacggcagtgtggccggtggggttgggttcacctcgctgctgaattgccaggcacctggtgggttcctggcacttggagggtttgggcttggagtcgatgagattgggttaggatatgggtacggagggagaggtgtttgggcttttcctgaggtcggtgagtttgtgaatggcggtggtggcacagctgttggtccgggttctacgtcgggttgtaacgcgtggcagcagatgaacggctcggatggtgggttagtggatggtggtggtgattgctcatactggccggaccttgccatttcaatgtcagggaagggtttgaagtaacagcactgctgacgtggtatttcgaataaatttcttttctttttctttttagggtggttggtgggtcttactttttctctgagtgttctttgtctggtttaaaaacagagattttagaatgttcagagagtttggggttgttggttttttttttttttctttttcaaaaaaaaaaaaagaagaaacttttatgggttggtttgttgttactggtggatatagtaaggaaatccataatagaagaagaagaagaagaagagagaaggtagcttggttaattttaagtctttctttttagagtttttgtttttaagatggctttctgtaaaatctttgggtccatctgttttatacagagaaaaatggccaaacaaaaaaaagaagctacttgctagaaagaaacggattatcttcctttttttttgctatgcatgtgatttgaatatttctcttcttctttaagttatctttttcacccataacccatttctatatagcattactatttatta

SEQ ID NO: 185438 - DNA, 3068 bp, Cannabis indica
aatgcattatatatcaatccagttccaataatccaaaccctactgatgtctgacataaatgggacctcatttctctctctccctttttagttcaaaataataataaaactcattcaatttttttcaaaataaaaagctcacgagcacattttgtatatgattttctaaaccttcaaaaaaaggtcatccacggaaaattatatatgcaaagtagagagagcagacccaaacaaaaaaccaaaaacataaaacaaatctctcagagatctcaacactcaattgtggttcatattaattctcttcattatatagtcccactctgtaaaacaaaaataaaaaagaccaccaacacctccattatataacacctatttgtctctttataacactatactatactcttctctcctcccacggccatctcccataaatcaatattaacataataaatataaaattttattaataataatacaaagcatatatagaagaaaattaagtgttagtatatttgggggaggaagaagaggtgtatatgattattggaatgcttgccgtgtcatcgttaagggacacttacaaagatgaaaaccaaggaggagaggccatggagaccagtaatcatatcaacttttcaatcaacggtggagatggattcccggatttcgccgactgcatcgatttcgacgatcttttcatcggtatcaatgtcgacggagatgttttacccgacttggagatggacccagaaatcctcgccgatttctcagccgaggattataactccgacgacatgaacacgtcacccctttcggccgagaaatccgctgatattgacgataacaacgttagtagtattaatagcgcaataacaagcactaccactacgactactacgacaactcatgccgaagaggaagaaaattataataataataatagaaaaatcaaatctaccactgcggagattgaagatgacaaggattcgggttccgggtcgggttcggtaacgggtggggacgttgcgtctgcgaataataataaggaagcttccgataataaaggaggagggaaaaagtcctcttcctcaacaacggctcagtccaagaataataactctcaagggaagcgaaaagttaaggtaaagaaaataaagtacaaagtaacttaacaaagtagtttttatgtgtgagttctattggaatctgtggctttttaggttttacaagtttcaatgtgggttttgggatgatcgagggtaacgttaatattgaaagagctgatttatgttatgtgtatccttaaattgtgtctgtatatgtatatatatatatataatattatatgtattattgtataggtggattggacaccagagttgcacagaaggttcgtacaggcagtggagcagcttggagtggataaggcagtgccttcacggattttagaactcatgggaattgattgtctcactcgacataacatagccagccaccttcaggtaattaaaacccaattaattaattagttaataacaataatattattaatttattaggattcagtttcttattattaattattatttgattattttcattttacttctcaaagaatgtagaatagtttagtactttaatatactcttttgtatatgcattttataatctttagagaactataacttctttttttaatatttaaaaaattcgtcacagactattctagatttttttttcacaacactgtttaaagacgaaagaataaacaaatcaatacttatatgttacatcgatcgtatgaaacgtgaggaaaacgcccaaaaaatagaagtgtctcactgtatcggtatatatataataataatactgaaaccgtaaattaatcttatcttctaataattattaacacctcatatgcagttttcgagatttccttttatcaaaattccaaaaattaatgttaaatagtttaaacgtctcgtcaaagaagcagtagcaaaataccaaatcattacctaagacgggtagcttcttctacttaacatatatatgtgtattttatatattatatatataattctagctgaagaaaagccttgataaataaatgggtatcttttatacgtacaaagatcattaaattaggagttactgtatgtatacagtagcaattaataatatacagatgatgaccatgtgatttggtggtgtgatgtttggtacacagaaatatcgttcgcatcggaaacatttgctggcacgtgaggccgaggcagcaagctggagccagaggaggcaaatgtttggggcagcgcctggtggtggaggcggtgcagtcgccggaaagagagacgtcagcccttgggcggttgcacccaccatggggttcccacaacaagcagtagtaccacaaccaccaccagtacccatgcacccacacttcagacccttacacgtgtggggtcatccaaccgttgaccaatctctaatgcacgtgtggccgcctaaacacttacctcattccccttctcatcatcctcctcctcctccgccagcctggcaaccagcagtccccactcctccaccactacacgacccttcttactggcactctcacccccaccgagtaattaactaactatacattcaaaatctcactctcattttcagccaatatttttattattattttacctaattattatttgtaattgtaggttccgagtgcattaaccccaggaacgccttgctttccacaaccaatggctacgccggtaaatatatatatatactttcgttactgtcaactttccttttggtttgtttttgggcacctttcatagtgtccttatcttcacgagcatatatatcgttctggtttcgtttgagaaattataatatatactgttatgtgataataatgcagagatttagcacaccagctgtcccaggtatcccaccaggccatgccatgtataaagtagatgccggcattggtaatctcacccctggacaatcaggcccgcaccctcttttcgactttcatccggtcagtctcaatataat

SEQ ID NO: 185439 - DNA, 2791 bp, Cannabis indica
aaataacactatctaatatgtctaaaaatagtactaaaataattgatagttaacactgttggaacataatgaaacacatttttggacacaatctagttttctttttttgacttgtaaggcatgcatagcactacgagataaataagagatgagttacatacaagaagctaaaagaatgagtattcctatccaactttagatatgactagtttccattttctacaattactaattataattaaatcagtgaaaaaaaattacttcaaaactaagccatatacaataatttaataaatgtgcttgcaaaaagttagttactaagaatttaaactcatttatatatacattttttgttatttgagaaaaagatagtgttattatatatgagagacaatgtgaatgatatcttgatatctttactaaatcaattctaaaactcgaaacatcatggttaaacttctataatgtaaaaaattaaaaaataacaacattttttgagcaataccttaaaaattcatacaaattagctagtaagttcaacagtaatataacaaatacaatataaaattataaatttcagaacaaataagaaaaatgtcccataatctggccagggccggcccaagggtggggcaaccggggcctcggccctaggcctcgtaagcccaaaattaaaaaaaattacatgttatacatataataagaaaacacattagttttacaaagtattatcttgttagcatattaaaggtagcacaaatggttagactacttttatacaagtaagagatctttttttttttaatttaaaatataaagacaaagaagaatgtatatgctaaattatttgttaacgtaaagtgtaaacttatatttatttatatatatatctatcaatataatattgaagatagcataaaatcttccattgtaaatttattaaacatttataaagttatcttataaatttaaattgatagttaattttattttatttatttaattcatagcatatatatatattgagataatatgtacatagatattattataattttcaactagttctattgtaaacgaattatttaaatagcagtaacaatttataaaaaaaaacacagacggtgaagaaatatttatttgtgtaaacgacttagaaatttaaattattagtgtcaaatttttatttaaaattacacatttgataggtttttatataatttttacaaattatatgccttttttattttattttattttaaaaaaagagtataagataattacttatcccatgttattctaaatttttttttcttataaatatatattttttcaatttatgccatcagattattttttttttaaaaaaagaatatatatttttttatagtacttcgccaaaaaaaaaaaataatcataagaataaaaactacctaaattttatctaatatttagttttagaatataaaaaaaaaaaacatttaacaatacacttaaaaacatacattttttttttatagatttttcactttttttttttttttgggtaaaaaaattttgtttttgtgtatcagcaacataaaagcaatgttgttttagaaacaacgaaaaattaacattttatatttttgtaaaaaaaattaaaattcgtacaaacataaaaaaaaatgttaatccgaaataatataaacattttgtcatttttaattaatgaaataattcatataaaaaaaggcctattattttaatttcgccataggcctctcaaaagcttgagacggccctgaatctggccaaaaagactagcaacttaatgaatttaagttagccaacatactggatgattgggatattaatatacacctgcagaaaattgactatcactttaattttcttaatggacacttctatagtctaaattacagtagcacatggaaaagcaaaacatcttctaaaatgagtaaacaaatattagatttaattagaacaaagcaaaactcaaaacagggagaagaaaggaagctttccccttttccttttagattcatcacaacattaaatctttcaaacgcattaaattttcataatctaaatgatagatttctaccaatagcattcatataatttatatttggcaaaacatatccagttaccaatggagagaagcacttcacggtactactaattttgaccacccattcaaaatgtgataaagatgtattttgtatgttaagcaaaatgatgaaaagctatcatatataatatgacattaactaatattgaagcacttccacataaatttatacacaaacaagtaacacaaccacaagattagctcaacaatttgatgccagaagttaacttttaatttaccattaatgaattccaaaagtaacaggatttagttcttccccactcactgtatcttgaatcacatagtcttatcttccttctaatttttaaagcttagctatacaaacaaatgtctacaagaagatatacatacttcaaggaaaaaaattttcgagattaaggaaacaaaatactcttagattttattaggacaacgcaaaatccaaaataagaaggataaagaaaactttttttttaaagataaagatacatagaacaaaataggttaaatattaattaattatataatctttttatatatagctttgctggaggaggagcggttggtcacgaggaggcattgtcgtcgttgggctagttgtggtggtcgtcgggcaaaggcgagcaagattaagtggagaaagagagagagagagag

SEQ ID NO: 185440 - DNA, 3082 bp, Cannabis indica
tttgttgaatcttagggaaatgaaatacaatcacaatttgttttggttttcctttggcctgaagatttgaatgtggtaagtaaaaggcattgaaaaatagtgttaaagttaaagttgtaatatttgacatgattaccaccaagataaaaaataaataaagtacaaggagttggttgaatagaatgctttataaatttattgtcatttgaataaacaccattcaagtggagaacagcctagattatattgtgttctgagatgaagtctaacccaccacatatgtcctttattattattcccttgtctacttgtttcttcactctacccaatccaagacccagaatgatcaactcagtcaatcttgtacattgacatgaaaaatgcaacaacaaaaactttaccatataatataataacataacatatgcacacacaacagttaatcagaattctcttttttgaaaatctcacaattttttttacaagaatccaatgataagaaagagacagaagaagaaaaaaagtcacttgttttcttttctctttaattattgaggttgtactgtcctaattactacctccaaatagctaaatgacagtagccaactttcatagtactagatagaatgaaaggacaaaagcattgaaaattcaagacctctgatttttttcatcatctgattctcattagaatgaagaacaaacacccaaaaccatagttaagataacacaaaatgagatggaaaggaaagccaaagaggggtattgtatgtattgatataaatatatagaattatatagaatgggctggcatgtatgccagtcacaagacagagaattatatgttaaaaggaaaattatttgatgatattagtgaaaaataaaaaataaaaagagaggttatgctctctctaacatatgaaagaacatggggggagcttttagttttctccagttgtatagtagtgatcagctcatctgtattcagcacaaaaagccgtttgttcaattaagtgttgacaatgacaaaaagtgaaaatgactttttatatattctttttatgaatttgcttaacaacccttttgttttcttatgttgatttttatttctcccttctttaaattgcatttccattctgtccagcataaaaaaagaaaataaaaatccagtctttataggccatattattagttcattcacatatatatacatcattcttttacttcctctcttctttctcttcacttcacctatacaaaacacacacacatatataaatatatatagatatatacataagagaatgagttcagaaggttgtagcagcagtgaatccgggtggacaatgtacatagactctccaatgcaggaagatgaaggtgattgcagcactagttataataataataatgaaggtgagaagaagaagtttcttactaaataccgccacaccgatgctgaggatgaagatggcgttcgcagtgatgattcaatggcttctgatgcttcttctggtcatacacatcattacaacaacaatgttaaatcacaccatagtaaagaggcttctaggctcaagcaggataagaagacattttctactactaacaagaaaggtaaaaaagagaaaacagttagtgaaaaaagtagaagaaaatgaacatcatttaattcatgttcaaaggcttcatagttttgtattatgtgcaccccacccatcttccttcttctcagattcaaccctagaagaattgatggaaatggaaatatggaaatacattgtgaaaacttttcagttttcattgtaattgaatggaattctttttcttctttagtggttatattgatcaataattgtcattttttacagcctaagagattagatcttgtttctttttttgacttttcccactattttgaacaattaaaataatgtcattgtccatataacatgaacaaaaacaagtgatatttacataatggggtcaatttcagtcaaacttaaatgggtgataagtagatcaattagaggtagatggtgataagtaattttgataagataaataatctaagataagggaaaaaaaagtcttttcatttaaaatattggataccaaattatgtgttgtggaatgtttggtgtgtatataataaggtaagaaaaaacagggtgtaatgtgtatgttgtgctggaaagaataaagaagaagctagaaagacaaaatgccaacctattagaagtgaggaaaggcatttgtgacttgtataacctcatccttcaatttaggtgattcaatatggtaacagctaggcaagtactatgtatattggttgtatctcaagtgtaagaatcttatagcacatttggaattaatatataaaattaaaaagatagaagatgtaggtggtggtggtaggcttgctctttggaagaaaagacaaaaaggaatatcataaaattgtagataaagattcagctttgtataattgagaatattatctctaattttaatacaagaagattcaggttatgttctctgcacccatggtccatggatatgcaaatagtacagaaagatagtgcaatatttcaggtttgtcttatctttcaagtaaaaaatattcaacataatatcatttttaagttactaaacccctttttgtttttaaattagtgaagaatttggatgtaattgaagtccaacctaggtcaatttagaagacaacaattgggcttggacaaattcaccctttttgaaaacgaatgtaactgcaagtcaatgcaaggctaggtgggttgacttacactgttacacacacaaaagaaaaaaaaatgaaattggaaatagtaccacattgaatttgttttattttttacttttgtcctttatgcttataaatgcacattttgttattggttttccattgaaatttaatgtgtaagagtgcatttgtttgcacttaataatggaacaaatttaatttggttggatcacaataatagaagagattcatgttttttaacacctgaattatttatttttagaataataattcacttaattttttatttcttttttt

SEQ ID NO: 185441 - DNA, 3709 bp, Cannabis indica
tcatgtgattattaaaatataatgtatatattcttacaagcttgtatataattaaaattttatacatctatcctcctctgtctggcgtatcctattccctgctgctatagttaaacatctatcctcctctgtctcagaccacagacccatcatcctcgataccaacggcggagtcatgtgcaaagggcgtttattcaagtatgaaaacatgtgggctcgggaccctcgatgtttctgggttgtcaaggaagcttggaagaaaagattacattccaacccaatgatcaatttccaccgtaagaccaagaatactggtcgaaagctgaagcaatggaacaaaacccaattcaaagacgtaaaacagcaaatcgacaaagcaactcgcgagctcaaggatttggagaccaagtttcctgaccatacatccctcattgacaccgcaaagaagaacttaactgaagcgctactcagagatgaaatccattggcgccaaaaatcccgagttcaatggctctccgagggagacatgtgctccaagttcttcatggcatctaccattgtcagaagaagtagaaactatattcaatgtctcaggaacccgaatgatggtggatggataagggaccaatctgaaattgctaattgcttcataaactactataaagaccttttctcgaagcaagtccctgcccggatgccttgtcttaatgaagtattccctacacaagatctcaatgatgcggacaacctgttcttcaactccatacccaaccccgaagaaatcactgcagcgatctcagcaatgggaaaggataaggccccggggccggacgggcttcccccgagtttttactcgcatcattggaatacggttagggaggatgtttttgaaatggtgatccatttcttcacacacttggaactgccaggatacattaatgatacctcccttgtcctaattccgaagaacgaagctccaacttccaccaaagattatcgaccaatcgctctttgtaaagtctcctacaagatcatatcgaaaatccttgcctcgagacttcgccacattattccaagaattgtagcccccaaccaagcggctttcatcagaggcagaaacattgctgaaaactccatgattgctagagaaatagtccattcaatgaagaagagaaaaggtaaccgaggttgtatgataatcaagttagatttagagaaagcctatgacaaaatggactgggacttcattatgctcgttctctcaaatatgggattcaccaatccattcctcggatggatccgagcctgcatttcggtgcatgaaattaaggtccttcttaatggttccatagctggcaaagtcaaaccggaacgaggtctccgacaaggagatcctctctccccgtctctgttcagctgaaacacttacccgcctcctgttggacaaagaaaagaaaggcttaattaaaggaataaaggtgggtagacaaggaacgactatccatcaccttatgttttccgatgacattatgctttttgggcaagcttctatcaaggaagctaaagccttcaaggagtgcttggccacttattgtgaatggtctggacaatcgatcaacctgcacaagtcttcggttcacttctcttgcggagtccctcgggggcgcatccaaaccatcacagaaatcttgggcatgaagcaaatgactgacaaaacaacttacttaggattgcctttgttcaatacttcaagaagaacaagtaattataaccacttggtggatcgggttctacagcgaattaagggttggaaggccaagcttctgtctagcgcaggtagagcttgcctcatcaaatcagtaggctccactctatccaattacgttgcatcctcagatgttatcccatccaccacggcaaacaaaattgacaaagcccttcgagatttctggtggggcgataccgaagaaaagcgagtccttcattgtgttgcttgggagaccctttgcaaaccaaaatctcacggaggtctcggcttcagaaccacggaggctactaccaagcctttctatgaaatgggcttggaaggcattgtcggacgattcaagcctttggaagctcgtcatggatgctaaatacatcaagagccacagcttccttgacgttcagcccaaaggttctgattctgtgctttggaaggcaatccttaatgcccgatctcaacttaacgaaggtatgtgtcgaaaaattggaaatggcaaatctacatctatttggtttcatccttgggtccacttgggcacgctccaacctcaaccgagactcgacgcaacccatggcatcagcttagtgagcaattttatccaaaacggcacttggaaggaggaccttgtccatcattggttccagcctgaagatgctagaaggactttgaatatcacccttccaaaccaccctactgaagactcttggatttggatccccggaagcaatggcaaattcacaatccgttcagcttatcgaatcataaagaacctacaccaaggaggcaccaccaatgaaaaatggcggattgtttgggggactaagatgcatccgagactgaaaatgctttggtggaaaatcctttcaaactgtctgctcactcgaggtaaattacaactcttcgctggtatcaatgatcctaattgtccattgtgttctttagtagtggaagactcgctacacatcttttggaattgtcatttggcccgatcgatgtggtttggctgctgttggggaattaggacttgctcttttaatttctcaagttgggaagagtggataagctggtttaaaattagtgataacagaccaaaagacaccagcctccatgctttcctcgaaggggctgcaataatctttgagaagatatggttcgaaagaaatcaggtggtccatcatcgacaccgcactcccacaaagatcatccttcagctaatcgacaaacgtctccaagaggcgcttcaaacaccgatttgtggcgttggttcgatgctgcaatggatgcctcctcctgagggctggtgcatctgcaacaccgacgtagcaattggcaagtcccagtcggttggggcagcaatcttcagcaaccataaaggggagatcacaagcattcactcaacccgaattcaacacattgagcctctagccggggaaattgctactctttgctggggggctgatcgagccataaacctaggccacaagaacattatcttccagagtgattcggctgaagcagtcaccgcaatttcgaaagaaaacaaggatctggataagcttcaccacaatgtcaaagacattgtctctaagttcattgaattttctgcaaattttgacctttgggaggtcagctggatccccaggatccacaacagtgtggcccataatgcggctcaaagggctctgcactcccaactgttagggagttttgaggcgcccaattttttcggtttccctccaagttcaatgggggatggctgagttagttttctctgttttttagttttccttttggctttccttttgtttcttttctttgttgctgcctgtatttgcagacttgctcctttagtttcctgtttgctggttgtttgcatcctttaggtgcgatgttccgtgtgtttgttgtttctttgttgtccctttggctgtttttaggcctctt

SEQ ID NO: 185442 - DNA, 10084 bp, Cannabis indica
ataatatttcaatattttaaatttcaaccaaataaaaaataaaaattaattcatttctattccgtttcattacctccaataatatgccgcgacttgacataaaaaaaaaataatgtgttatgtagaaagaaagtaccccatttacataaatatgacattttatactcaaggatttgagaatgagttacttttccaatttaaacttgggaattttcaacccctgtacaaatttcccaaaagtgggaggacgagcttagggtgggtttaatacatcttttcttattttttggggggatttaatcaacttaaatgttacaaaattttaataaaacaattattaactttcaaataatgggaggatatggtaacataattatgataaaaagatgtcttgggactccataggagaagaccaatactgcaagagtgattccacagtcagcctccgagttgtgctaagcattgatatgaagaatcgacacccatcgattttgtactcttcaagcggatttctgtgcccaaaactccttacattcacctgtcattttcaccaactacattcattgctaaatgaatctattaagtaaagaacaaaaaataatgagcagatgaataccgctgaattcagtctgttcatgtttatcagatgatccctccaaaaacaatctagtgtcttcacaagaactgctttctgtaatcaaaagcaataatccacaaccatgtatgggcaactgagccaaatataataggagttcttgaagaaagggttttaattgttcattttattttacctcaacttctgctatataagcatcatcataaccagattcttgtacaacatccaaatatgaggcaatgagaaaatcaccgagatacttgcggaggatattgctggtagcgcggtacctaccattcctatatttgacagaaaatgagtcaagtaattgactttattgaaatttaataatattgacgagcacaaaactttactcacgtggttaaatcatcagagcatatggataaccatcgtttcaatgaggaagtcttcttgtgtattcctctaaagacattcggaggtgttggtaactctggaagatgagtttcattacagcctattgaactcagttccttcaattgttcgagggatttcaataatgtttccgtggtgattcctgtgaaagaatctgcaaaggtatcatttcagaattcttgtgtaatgtaactgaaatccttgggacaagaacgaaaattattcccaatgtgctcaccatccaagcgcttccccccaactatagtgaactcttttaagagcttgtccaaactccagcttcttgggtgctatcaaaatcagtagacaaatgatcaaactaacttctcatcatagagaaaatattggtaagaaaataccatatggtaaccatactacctttagcggatcaacatttgcaaagacaatttcgtctaccactgcttgcatatacctataaaaaaaccttcttgagtgcatatacaaaacagcataagaagtaacaattgaatatttgacggatacaaaatctatatagtattataccaatcaacacaatccacacaaactaaaaataataaagcacgaagcaaataaggtaacaatcatcttactaatgttcctataccatttctctagccaatgcaatataccctgttcttgatcaattcctcttcctaatgttctttccttatctctttctctcggtttctttctcttctcattgacgtacactcacaacttcacaagcattacacatgaaaaaacaattaaccttgtgatatccccatgtgaatcgtttgcatgacaataatttcatgtaaaaggacagcaaaataataataataattttaaatcaaaatcaaaatttcctttcagttataaatgtgaaccaacaaaagctgctctaactctaagaatttgaggtaccaaggtaaactactactattattattatttggaaacgacaaactagcaaggataggtgatgcgacaaagttcacgtatcctcttgcacatattgtttagagttcatgcaatttcaaacaagtaaaaatgcagttttttttttgtctggtaaaaaacaatgcagcatttttttttccttgatttatgaagctgtaacattggtgtctaaaattggctaggagtgaaatgaagttgtgaaaatgtaaagaggcacttactggaatatgtgttgggaacaactggcattatcaccagttaaaattgactgcctaagctcataaacatgcttctctctacctgaaaaaaaaagaaatgaaaacaatcaactaaatgcagatacttttatgttttgtaagaatcccagtttactctcaaaaacatacctctaatacttcatcaaactcaaccaagctctttcttatgttaaagaagtatttctccgcattaatttgtagtgccaatagctacccaaatcaacaaatgtaagaaaaaaaatgaaaagccacttcattaaagtaagaaaaacaaaaaaggacatccaactgacatttacctgatttactattgcatcaccttcgataggaatatcctcatcgtttgtaattcttgaaataagcctaacagcccactcagtgtcaaagttaaacttctgaaacatctcatcctgcaagctgttaacaaaaatggagtaaaaattttggtaaactacaatacaaataataattacatgaataaaagtactaaaattgtcttagacgtattatgagtgactatttatatatatacacaaatataaatagagagagggagagagagatgagtgttgctaatatatactgtaaatatctgccagatatagaatctgagcaataaaagatatattgaggaaactccactaattatccctaaacatcagatgtttggtctggtgctagagtaaaatatatttgacattacctcaccataaatcttgttgaaccaggatcaccttgtcgccctgctctgccacggagctataaaacagaagacttcgtaaaaaaaaataatctacaaaatccaactccaaaatatttcgtggaagtacagtcatgtggtgagaatgaatagcaatgtcagatgacaaatgtatttactgtttaaaatgatcataagatacttgcataaactgcagttcctttttttttttcacgagggcagtctcttatcgttgacgatgctgtggttttattttcatggcataaacttttgttttatattttacattcatatggataatcagactatacttataagataaaaactggctatgtgaaagaaccacagctagaaatagagtaatagtgccagggatcaaccaaaatactctattttctattaagcaagagtggaaaggagaagaggcataggtagaaaaattttaaaaattaaaaaattaaaatttactgtattatctatagaataaaattttgtagctacagagatgggtaacccatagtggtagattcattttgtgccaacaccaagtaagactttcctattacagccaacattttagacattacaagtataaattgtgtagtataagcaaataaaaacaaaacgaaaagaaagagttctaaagaaatagatatgatgaatttcatattaggtagatgcttaaaaaggtgaagagaaaaaaaatacacaagtacagataacaaaaaaaattaatagatccaactccatctaaattctttattcctggagaaacatcttttatgcccaagtaatcttaacaagcatggtaaaaatgatgacttattctagcaatattcatttattttaaactaaatgcaaattgccaaacctggttatctattcttcgggactcatgcaaagaagtgccaattacatgaaggcccccaagccttttcacttcagacccttcatgcaaacagtggacctcacagtctatcaaaactgacgagtaagcaagtgctatagtagggccaagaggataagtctcagactgttcattgactaacttctccagctcttccaaactatgtgactgactcatttccacagattctgatatcatagattttgcctcctcatacgtccagctcttaccttcacttttgcatacatatttagctgaaaaattcatatgttatgttacaaattgtcacaatcatatacaagactggcaatgcctatattacacaacaaacaatgtacaaataaaatactagtaatgagctttactatatatagaaaattgttggttagtgattgtttttaattatatatgcttttaaatgatgatgtatagtgtagttacagggacctcccacacttttttaggatattccaattgatatagaataccaaatcagaattcaaatagctctacgcgtgtttatttcaatatttatttgcttatgcaacagatgtttcaatcctgattttgacatccaaaattcttcaaaatttatgggagatcctccgtaactatattgtaaatcattacaacttatccaccacacacatatatattcgtagacaagatgaagaggaggaggataacaaacccatgagtgctgtcttagccaacaaagctagtgatgatggtccaacctttatcttcagcaagacctacattagaaggttaattagaaacaaaagctacttgttaggagtgtggaattattttttttataacaaactgcttattaagttagaaacccaaagtatcaccttttggttaactgcatctcgatcaacttcattatcagaggcttcctttgcaataaatgaaagcaagctatcctcaataatctctcttgcaagcatctatttttgttacagccaaaaaaaaatggagtaagtcccatcctcatagctttagaataaagacattagattttaagaagagaaatatatatacatatatgaatattgacattactaactgtgaccaactaccagacataattcaaagataacacttcttttcgtggtacattcattaaatgagcaagcatcatacccttggatttcctcccaggattatgtcagtgcctctaccagccatatttgtagaaatagtgatggcgtattttcgtcctgcttgggcaacaatttcagcctccattgcagcatactttttttttttttctaaaagagagattagaataacacttgtgcaaagaaaatctatatatcatttcaaataatccaacataaagtctattaaatctcttagatctatatacctttgacctagcatttaggacattgtagggaatattgtgttccttcagtagatcagacaagtattcagaattctcaacactacatcatgaagaataattataatgttaattagagtaaaaattaacaatggcattgactaacttaacatgtgtatatattataaaagttgcacagtcactgtctaaaaatttgattggtaacatgcataatgcatttctttcatttcccataaatccattgaacattcatagcgagctcaagttggtaacctttgggaagtatggagctgatggtgttattcaccagtaaatattcaatgttatccacgaaattccattttgcgtggcttaaacatatacatgtcaatattccttttattatcatttaaaataaaagaattttcattgagtaaattatgcatttttatacgaccatatagtgacatattgtgcgtctacacattgaaacaagatggagtatgaaattatgcatttaaaatatcatgtgtagcacatacatgacatactcgaatatatgtaccagaatgctataataaaacagcatatgctaggactaatctcaccatatcttggtccacaatccacagacagagtaaatgacatttaccttgtagtaccaactagaacaggacgaccctgtccaaacatgtattcaacttcttgacgaacatagtcccatttccctcgagcagtctacatcattgcaaaactcaacatgtaaatcaagctgactgtagtctgtaaagacatgcttgaagattaagtatcaaataaaaaacataatgcatttaaagatagctcacggcaaaagcttggataggtaaatcttttcgaatgtttgccagatttgtgggtacttcgataacaggaatgtgaaacatcttcaggaattctttctcctaaaaaacagcatgggacatcagaaagggagtgcattctacataacgacagaagagttgaatgaagtattagtgtataagtaaacatccttacttcagtttttgcagtcccggtcatcccggaaagctttggatagagcttgaatagtgattgatatgttatttgtgccacaacaactgaatcagcctaagatatgccatatattagagcattgaatcagataaatctattccaacaaacaaattacaagaatggaaatttttgtgtaaaattttgtgagacctgaattttgagaccttctttagcctctactgcctgatgaatcccatcagaccatcttcttttctcttcaactctgcctgtcaactgcaaattttacgcaaatttaaattttcattacaataagtaacttttaaaaaactcataatttaaaatatatatatatatatatatatataaatatatatatatatgatcaagtcacaaactgttacttctacatatcttgattctcaagtgtcactgcagacttatggaccctttctcttttcaaaaaaaagtctaataagccaacataaaaagcaaattcacagtcaagcaaaatgttagtacctctggcaaagctcagagtaaaaactcggccttctgtgttttgcagataagcttattcagattgtactcaactttcattattgcttttattttgggaaaatgcagcacagttaactaaaattattcaacgaagctcatagttctatacttctagaacttttcatttccttttagaggccagaccactaatgataaatctactaaagaatataaatgttctggtctagatccaaactttttattaggtcagtaaaagccaaaaacatgtttttgacaaaacatttctcaagaacatgaagataaacaagagttacacttccacaatggttaaaattgtagtaaataaaggaagctgttaatataccattaagatatggaaaaattggtcctacctcattgattatgagagcttgcccatttttgacaatgtattgaacatcctgccggtagaattctttagccttcagtgcattcattacaaatctacaaatttcaaacatcactaccagacaaaaactgaaatgaaagcagcggaaaatgctcattggctatgacaagagtacacaagcattcaaaccaatatatggcttcattagacacataaacaaatcaacaaatccagaacatagagaaatgaaaacaacaaaaatcaaaatgtatgtgatgcttcttcacctggcccaaggatcattttcatcccaaaggtcatgtgtgtcgagagccatttcagcaagctctattccttcctcggtcaactccactgaattatctttgagttccacattgtaatgctgtttcaattattgtacaagggaaaaagacacttcaccattttaactaatttacataaaagtatattaaaaatacacaaataaaaatacaataaaaaaaagtcttactgagtaaaaaagcaaaatagattggacttacaaggccttttataagcaactgggccactttagcagcaactggatagcgcgcagcatctttactagcctacgaaagaaacaaaagaataccctaccgtcaaatgtactcctaacgtcctacctagatttacaattgtttaacaaatcatttatttcacagaagtaactagtaatatttacagcctcgtaaattacctcaccacttattaatagaggattccttccatcatcaataaggactgaatcaacttcatccactattgcaaaatgaaatggctttggcctgtttattcacaatatgttgctaattccacaaagaagcaataatatgaaactttagaagatgatgaaattaaacataccatctcattacaactttttcaatgcttgcagcaaggttgtctcgtagataatcaaaaccaagttcctgaaataattcagaatgacagatttattagaagaagaaatgaggaaataaaccagcagaatatttgaaacaatacctgcaacaaacactaaatcagaagatgaaattagaactaaatgacatactgaattgttggtgtatgttatgtcgcaattatagtttgatctcctctgttcaggtgtcattcccctctatattgcaaaaaagacataaacaagtttaagcatgtgtggtactggtatctaaacagcatttcaaaccttcttcccttgcatatgcttttaaaaatagaaaaaacaaaaataaatgagtacttgaaaaaaaaaattacaatgcaagtgggtggttaaaagtttaaaaaaaccacacaattatacaatacaataaagtacaaccaaaaatctcaatctctcaagctcaaccaatctgagaaggaaacatctttgaattccttagttccgggaacccaaatagcagcactcatttaaactttatcctaatatttcttccacactcttctccatttcttctttagttgcataaaaattatgttgggctcatttcaaaactcaaagctaacttctggacagaacaacttgaaaaaattaacgtacagtaattacctgaataaggcccaccgaaagacctaagaagcgatgaacacggcccatccactcagcatctctttgagcaagataatcatttacagttaccactataaacaataagtaaaagcaagaccaattaaattttgcattcaccaaaaaaacaaaactttaaatgaaacaaatcataccatgaacaccttcaccagtaagagcattaagatacgctgctaaagtcgaaaccaatgtctttccctctccagttttcatctcagcaatggaaccgtcatgaagcaccgccccgccaatgatctggagctcggattcacattaaatcattagcactaacaagatcacgaaactacagtaatcatgatttcacttataataatcttgtgcatgaggaagagaaagagaagaagacctggacgtcaaaatgtcgcattccaagctttctcctagcagcttcacgaacaacagcaaatgcttctggaaagaacaatgtttgaacaaacaaccatatcattatcaaaagctttggtaaactaacataacattgacaaataacaaagaagtattagatagtagaaagcttccaaaccggcttgaatatctgccacagtttgaccctctcgtagtctttgccggaactcaacagttttagcagtaagctataaacgaaaaaaaaaaacaaatcttcaaaaagttaactctgacagagagctcagataaatgggaagcattaaaaacaacgaacctgttcatcggtgagtctctgaatttgcggctcaagggcattaacagatttcacaaggcggtaataatcccgaacaacccaatagtttaaactcgtaacgtcactccaagtcttcgtaagagaccccaaattctcctgtgccaaaatcaacaccagaaatgacgacaaaccccacacaagcataacgtcgaacaggtggcgatggcgatcaagggaggacataccttgagagacgcgacaacgggagtggatgcagaagcagttaggaaacgaagccgtctccggggaaaggaagatggaagaaatagggggttggagtagaagagtgggcgttgagggggcagtagtagtagctttgggttcgagttttggagggcagacattgatgacatagccatggagtgagcagtttgttggttagggtcgtgtgtgtggtttagtcgaccaattaaggtcaagtcaggctcttctcttcttcttcttctgctctggtactgagttaaacttcagtggagtcttcgcggtcatccatgttgttgtaacgttgagtgagcttgtttttcaattttcttcttttttt

SEQ ID NO: 185443 - DNA, 963 bp, Cannabis indica
aagaagcaagttactctcattatagttttttttttttacttttcttgagtattatggcttcattctcatcttgcaatggaagagattttattcaatttgagaacaaacacaaaggaatgatctttgttactaaagttcaaactttttcaaaagtcaaggctccaattggcccaaggcccaaggtatactacattctcaattctttttccctaattattcaagcaagacaatcattttatgaaaaattgaactaaactcatgcagcaaggttagaatccaatacaacagtaacaattacaacattgtagcagtactgctggcaatggataatagcttttttactatacaagagtgataaacacttgtgcacaatttagttcgagaagaaatacaaaatcccaagttattcaaaaaatttggtaaacaccctgaataatattttacacaaaaatccattacctttcacaagatcaattctacaaatgtgactgattcaaagtttttattgtgtggtagtgtaattattataaaaaatatttgtttttactgaaattttccattactcttattaaatttatataactttatgaaggtttaattattataaaaattataatgggatttttttgttattttgatatataattataaaatttatttttaagaatgttaaaatttgaaatgtaatttttgtcttttaataggagctagattaacaaataattttataatcctaactagccaaccaaattagaagacacaaatttagaaacagtaaacatatccacttaatacttgacaactcagcttcaataattctaatgaattatacaagcaagattaatattattaaggcctaacaaagagatagttagatttagatattcaacaaatactgttttggtctccaaattaagagtgttgttcaattacaagcattacagtggaatcttcatttaaaaa

SEQ ID NO: 185444 - DNA, 2187 bp, Cannabis indica
atatatatatatatcttaatacttaccatattattttccaagatggtgcaaacatcttgtgacctccataatcgatcgtagttttccaaacgattattatgatcagagccacgaataattgaccgacccatttctcgcaacaaatcatgcatactgtattcctcaaattctttgaatctaattatcaaacaattgtcaacaagagcttcgagagcactatcacaaggacaatcataacaagcattcaacacttctttcacatcatcttcgtcgttgttgcattgaaagaaacacgctatatcaagaaatatactctgttgtttagggtctagcccatcaaaacttatttttaatttacttgtaactttttgatcagcatcttcttttatattgcttaacaaactttgccatatttgtttgcttttcgaaaataaatgagaacccaaaactttgagagccagtggaaggccttgagcatatttcgaaagctctttgtaactttcttcaggtgattttcttttgaaggcatgcaaacaaaagagttcaagagcatcctcctcttttagtcccttcaagttgtatatcatccactcatcattgccaatatattccgaagcacttgatgatttctacttgttataataagtctactttcagagtttagccaggaatgactatgttcaagtaaacaattatattggtccaaatcatccacatcatcaagaactatgagcaactttttatggcgcagcctttcctttaaggaaaccaaatctttacatttttcgtttgataattgacgaaaaaatttaagttccagatttgatccattcttttggtattcttctcgaacattttgaaaaaaataatgactattgtattgatgacataattgattgaagacaatttgagctagggtggtcttacccaggccacccatgccacaaatgcctaccatgcgagaatttgacaatagtttgtggagatctgcaattgagttgtcaattccaacaatgccatgctttaaattatgatgagatgaagatgtggatcttaatttttctcgtatagagtcgaaaatcttatgaatcgcctcagcttcattactacatatatataatataaaaaacaacattataatagtattgcataaacatctaaaaaaaatataatgaaatgacatgacttttcattagatatatatatacaaattaggtattatagtaacaatgtatgttgcattaaaagttgttttatagagttcttactccttaattattaatttacataatagaaattaaaaataatctaatataattcaattatatcttttaaatatataaaatttaatttaattttaaatttatttctattatatataaagtatataaaaagtgtggctatgtagatgaatttttaaagatattttttttggtttctactttgactttaacagaatatcttattgataactttaacagaatgttcatgtgattcgatattttgtactaggggcgtgcgagctctccctttcctctcccatggtgagaaaagggttggccgaaagccagccaattcaaaccaagtgagcaaagaagtcgaagtggacctccctttgatccaagaaaagaatgtcgaaccagaagctacagaagaatttcatgattcttgcgagaacttggtgatcaggaatgaacctgaaggaatcgaagttgagtacgctgagcttgagatcgtgaaaccagttaattgggctaaggaagttgaacatgaaaatttccaaaccaatgctagggaactatggagtaaatttaagacgaaccaggtaccttctccttcgtctaaacttacttacacaaaacagattatagttggtgatcaacgtgtggccaaaattgatctagaggaggctgaggtagaggcttcattttggaaaaatggcattgtttgtattgttttaggtgctaacccccctttcaaggtgtttgagggatttattaagagaatttggggtaatttgggcattgagaaggttgtgcgaatacgctctgggtatactctagttaactttcatgatgaagctacccgtgatctcattttagaggcgggagtaattcatttcgataggaaaccggtggtgctacggccatggacaacaaatctcgattcgataaggatggtcaattc

SEQ ID NO: 185445 - DNA, 4105 bp, Cannabis indica
acgctgataacaaaaactaaccatgatttccaggaataacaaaacactgaggcccattgtactccttcaatccagacacaccgggaggaacctcaggcttatttacagcaatgtgtacttctttataccatggaggaggctggagagcatactcaaaaggacaaaataagcgcctttcatatgtgaatgctgatggatttggatatctgtatatggtggccagtaaatattatgatttattaatcaataaacatgcgaaaagacaatacaaaaataacacgcatgtttatgcttattatattactgttagcaatgaacagtaaattgcacaaaaattggtcaagctctcattaataactatatgaaaagctggaaaagattaagaggaaactgtttgtagcaaaaaacataattcttatagaaggcatgatgcattaaagaaagctccagagtgattggtccatagacatgccaaacaaaactccattgaggcattcaaaaagaaaacaacaacaaaatccaggagggagagggagggggaggatcagaagttacagtaagagcagacagaaatagaatcaatgaagtgtagtttgattcataaattgaaaattatgtacacggctataaataatacttcaaaaattcatactattcattagaaaagcaatgtctactcacgcaagatctcctccaataagaagtaagtcgccacgtggtaggttgagcgctgaatcacctctattgatattaatagaaggctgagcaagtaaacgagcaactgaataagatgagtttccaccatcaccagtatcagccatgaaatcaaaccataagtcatccttctcgccaaattgatcgtataagagatccccttgttgacttccatcattgaccctactcattgctgcctaatggtgcaattttttattagaaaatcacttgttgccattaactatattattcaattgtttattaacaagatacatgaaaaagttatagcgggaaagaactatcttttgaaagttaaagcaaaaagaaaatagaagttgttatgcaagtaagcccatactgtagtaagttctaggatcctaacaatacaacgccctttaaagtaaatgtcgcagcccactccggtcctctcctaggaccgacatcactcatgaccttgttgtaggtacttcaccaaggtcgtcacttccaaggtgtcaatccgacaagaagatgttgttggctttgataccagcaactaggtagaactcactcgaaaaatattaattgtgcgcaagtgcctaagtggaaatacactatcaggtacccctagcctacacttgtcaatgtgggatcctgacatttatcttaagaaattaactctgaaattataacataccaaggacatgatgaaaagagatggattgtatacatatcaattcttctgtataactattttggatgtctgatgtatccccaacaaaatcatttaaagaacaatctgttaagattgtttgtctgatgcaactgtgccagagttttcttttaaatgttataattttttatattaaaaaccgtaaacatggaagttcctagagcataacaatttaattaaatcacaataataatttaggtaaaaaagagaaaggtaaatcatacttgcatcattcgcatatcaaaacggccaacaaagacagttactgatacaagaagatcaaaaacagtcttgaacaaatcagctgatgttctgcaacatatagtaattggtaagttggaataataagctatacaaccatttgtagacaaaagggaaagaaaaaagaatgaaggtaaagattataccctgaataccagggaaccatatctagaaaaccaggcttcagttgcttcttctttaacttctcatactcttgaactgacaaagggtgagtaagagcccacctttcaatttatcataggcagagaaagaaaagcaaaactcagataacagtatttttgtataataataaagatttctttaaaaccaccaactcaaattgaaatcatgctacaaactaccactcaccctgtggatctttccaccacataattggcaatgtaaaggccaataaatgtagcccatagtgagtaaataggagagattccatctgatgaaccatcacatgagccattgcacgctaactaagatgtcaaaaagaaacaataaatataaaataaagacatgaactgtacattaacaaagaaagaatctatcagcttcaggtagtagtacctcgccataaataacccatttggacaaaaggggatagtctttagcagacccaactggagcaaaccaagatgagcaaacttggtctttcagttcattcattcgaagaaattttgccagccatgtgtttctctcttcttttttccagaaagaaaaccaattcgagttcttgtgctcaaggcgtctctctcttacaatagcactgttaccacagtggctataaaatacacagcatgccatgctaagtacctacatgtccaaaaaggaatgaaaacaatcatcagaattcagaagcaaatgccaaaagaatctggagatttaagagattgtgtttcgaacttacagcacagttttgaagtatagtcaagattgcaggccttcttccagcaacacgcgaaactagaccaatgtaccaaagcccaagaaatatgatgtgaaatactagaagaaatagaatagaagagacataaatagtcaaaaacaatgatagattcattctcatgtcaactcccattgactgaaaactaggaagatgatacagagcagctactaaaatccacgctatgtacctgcaaaaagaataattttctcagaattacgaacacctattatcttttctagctcccatcaaccaaacctcttataaacatggaagccagtattatatgtgtcagaataaagtatgaaagcaacggaatagaatgtggaagaaacacttaccatctactaaaatttgaataactcggcttgatagtcttcccaataaatggagacgaaaagaaatagaaaaaaccaagcaaacaagaatacatagaccaccattttacattcttgtccaatttttctacaagggtatgaatgttgtcggatgaaataaaaaataggcaacccacaacaactgcaattacggcatggcgtgagtgctcgtgggggtaaggatatctatgagttaaaatcgttctaaccctatccattctgagggaatccaatataccaactgattgtttattagagctcatcaacaaacttggcacaattcaggttctccgggcagtccaacaattccagagtcctgttattgaacttaaataagttactgcagtaccatgttataaacaacagaactatattaactataaaataaaacgaattgggataagtcacatgtattccccaagaaattttaatacattatgtcagaacaagaaagcctcaacttgaattttaacatctaacatagatttatcaattatgaaccgaaagagatatttaactattcacccttccgtcccgaaaatacaatttctatcaagcagtaaaatcatactacgactcgaacgaacaaatcagaaccccgcattgttattaagtaacatgataaccataatcataaccactctatgaagatgttcaactaattataacaaaagattaccaaatcgaactaatttcgactcagttgcataattgtgtgtggcacaattatttcaaagaccagcggaaccaaaaaaaattcgaacagaaaccaacacacacacacacattactcaaatataatataattaaaaaaaaaaattgggggtacggtatataagaaagagacacaatcattactttcttttcttttcttttcttgttttccttttttgtttctattcacaactaaatttcaaccacacagaccccctataataacactcaattaagtgataatgaaaggacataagagcacaaatccaaaactacccgtagagagctaggttgtatcttcaacttccaaaaactaagaaagaaaaagagaaagtcgaataggcagaagcatttgcagaagaaaaaaaaaaaaac

SEQ ID NO: 185446 - DNA, 2618 bp, Cannabis indica
ctattatagctaaattatacatccgagtcccatttttacacttttcttaaatttttctcattttttgagaggtaggaggtgtttacctcctcttctcttgtgttgtgagtgctctaacttggtcaaagagattcaaatccgttcttctttcatcgtctctctgaaaaccatcgattctgaccaatacaatggaagtcgccggcgagcccattagagttcagagcattgcccaagctggtctaacccaagttcctctccaatacgttcaaccgccacagcaccgacctatacattcatcttcatctccgccgatcacaattccagttatcgacttattcggctcggacccggcccaaagagacttggtccgggccgctattgggcgggcctgcaacgactggggagccttccacgtcatcggccatggaatctctaccgatttgctccggcgcgtgaagcgcgtcggactcaccttcttcaacgactgccccgttgccgataaggtccggtacgcgtgcgatccaacctcctcggccacggaggggtatggaagccgaatgttggagcgagacgacaccgttttggactggagggactactttgatcaccacacacttcccctatctcgacggaacccttcccgttggcctcactttccagccgattaccggtcgacgatggcagagtacagcgatcgaacggggtcattggcgagcgagctgcttgagttgatttcggagagcctaggacttccgtcgaggtgtattgaagacgcagtgggagaattctaccagaatattacgattagctattacccgccgtgtcctcagccggagctgactttgggtttgcaagagcattcagatatgggggcgattactttgctggttcaagatgaggttggtgggcttgaggttctaaaagatggacaatgggttaaggtgcagcctttggatgatgatgccattctcgttcttttggctgaccaaactgaggtattttctgctttatatgagctgttttatgcctgttcttaatgtgattattgctaatgaattcttgagtgttgttcctggtatcaaatggatttaatctgttgaggagaaagaagaaaaaggagtgtagtttcaagtttgtttgaatctttttgatgatgataccaatacttttccttgcctaaactgtcaaacttgttaatttaaggtcctcaattaagtttatttaggaagagccttattggatgaatgtgtacaagcatatattcaaaactagataattccccattatggtttgtgcatggcgatttaaccgtattagttttttcagtttgttattgttgcaatcttgtatctagtatttgctatcttacgaaaggtttactgattcaatactctagcaaccaatctatgcttttgattcccgggttggttatggttgctcttatagttcaggccctcccttttggggtttatgggaactggaacttgtctaatataaagctttgatattataaagatttaaaccatagggtagtaatgtgaaatctttctctacatccttaggatctttgtagtagttttttttttatggaagtctttttatatatctttggtcctaaacataggtcaattcttgttattcgagcatttaaacaattttcttcttttcttaatgtaaccaattatattttagatactgatgtcagattgtattgcccgcagataatcaccaatggaaagtacaaaagtgctcaacatagggccattacaaatgcccatcgagcacgattgtcagttgctacattccatgatccagccaaagcagtaaagatatcccctgcttctcaacttctcagcaagtcttctcctcctaggtttcggggtgttgtttatggcgattatgtgtcatcatggtatacaaagggccctgaaggaaaacgaaacatcgatgctcttcttcttgaatcttgatttttggatttgaagtagcctcaatcccttcttttgccccttacattttttagtctttttactacgttctgtgcatgatcaaacctagaaaatgaaataaaagtttctcccatgttcataatcatcaatttgcaataaaaaatgtcttcttgttatcctatttcaagttcaaagataaaagtttattttctttcatcaaatacacttgcataatagtttgaaatgtgtctcctgtctcccttgcaattgtactagctcatctaaattgacacctgaaatgttttagattgcaagttgtggaatgtatgtactggatttggttgcagcataatggagaggcctagaatgttgtttcctgtctcccccggtctggtatttcattggccatttctgaaatcatcactgcatgagagggtacgtttgttcttggacctgtagtagaaattaacatgcgcttagggaaattgtaaacacctgagatggaagacttggaaaatgattcgacagaaatgtatttttgttggtttctaggacctaaagacgattattctcagcatagcctgttaagctatgaggatgaggacgatggacttctgtttcttttaatcttatcatccataatatcctagctgattgattttggtcctg

SEQ ID NO: 185447 - DNA, 1536 bp, Cannabis indica
acataacgttaatattttagacaaaaccagacggaaggaggacttttcattgtttatcatagatcgggggggatttttgctaatcaaaaaagttcggggggtatgaatctacacacgtaatagttgagggggcaaaaaagcattttgtcctaaatttgactagaaaactaccctattaaagtgaagccatttaggacccaccttaacatcaccaaccaatgcctaaacaacaattgttgcaatatgccgcactcatttcgaaatgtaagaacaatacacaacaaacaaaaatctttcatgttataccaacaacaacatatattttgtatataatgttcattagaaccaaataaaaataatggtttatttggtagttcaagaagaagagggcagaaccacataaaaagaaaataaaaaggaccactacccatgtggtaaaatgatggtagagattacaaatttgcatatttgtaaatatatatacatatacatgtataagtgatgttatattgtatgttgtttttatcttcttcttttcttaatgtagcgtaatgatattttacaattaattaatagcataaaggttttgagttcaagccaccacctctcctttttttctcatttctctctttgtttttatctctcttattaccgagaggttcgatcctttttttttataaatattcctagtaaattgtgtcatagtagagaattgtgaatcaaattggtgatcattagtattagtatgttcagagctataaatgtacatacatttattgtaacatttaaataaattaaaaaaaaatggtaatgatgaataatgtggcaatgttgttgtatgtggggtttgatatgaacaagcctagtaatagagaagccaattaaatgggaagaagtgttgtattgtaatatataagctatggttgggggacctatctttggctttggtgcctttgttttgtttttctactttctagtgtgaaatgcacgagggaaatgggacctttaatttggctctttgcttgtatttatcttaaccctacttccttcctacaacacccacaaccttctaacttatattgctatttaattttaagtgattggtgaaagtgctctcttttatagtatctctttgtaaaattgttttttttagcaaaatggtttttcttgttcagaatccacaatgtgagaatttccaacacatattaaagggtttgtgagtgtctctaaaatattattttgtaaaaaaattactaaatgaaaactattgtataagaaaggaagaatgtattttaccaaacacagctctataataactcatatgtcgacatagatattgaaatatctatcaaaagatctttctaaaatataaatatgttaaaggaaagtagatcccaccataattcaataataaatctttaattacgaaaacaaagctctagctgtattttaccaaacacctctataatttgtatttcaaaattgatgattagtgtgcttatttgcgtaaagataagcagggccggccctgacttt

SEQ ID NO: 185448 - DNA, 2546 bp, Cannabis indica
tttttttttttcaaaaaggaaatcaaaattaaaaaagaaaaaggagagtaacattaatattaatagtaataataataatgataataaaagccatattaaaactccaaattcacatgtgtccaaattttcaaaagagagataatcagatgggacagaccacacgcttactcggtacagccatgagtcgactcgttctcggcgcagtgagtccaaacgtgtcactcatatcgagttcactcggtttcataccatcaggtaattcccacgtgaaacaatggagaaggtgtcccaccgccaattcaagcgcgtaaagcccaagttgcataccggggcaagacctccgacccgacccgaatggaataaactcaaaattactccctttaaaatcagcaacaccttccttcataaaccgacccggtttaaacgaatcggggtcgacccacgagctcttatcacgacctatagcccatgcgttgatcatcacgcgcgatttcttcggcacgtaatagcccgccacttcagcatcctccgccgtctcgtggagaaggagaggaatcggtgggtggagtctaagggtctctttcagagcacatttcaacagagttagtttctcgaaatctgactcttccaatctccggtcaagtccgactacgtcagcgatttcttgctgaactttcttgagttcttctggggttttcattagctcagacatagcccattcaatcgcagaagcaaccgtttcagtaccaccaaacataacatcctgtaaaaaagatagtaataataataataaaaatcgaatctttataacaaagagaaaataaaaatcgaatctttattatatatatgaagtttaccataatgattgctttgatgttgtctctagtgagtctaatagcgttttgaagatcatcagaagattcattaacagtagcttcatcactataaaaagctaacaaatcatcaaccatatcagattcagaatcatcaacaacaccattggttttagctcttttgtcaatgtgttgatcgatgattctatcgatgaatccatctaatgctttacgagctttaggtagtcttgtattaagaccttgtggatcaacccaagtaagccaaggaatgaaatcagcaatattaaaagccccaaatagtttagaaaactcttgaagaatcctaataaactcatcttgattctcttgttcactcgaaccaaaagctgccctgtaagtaatatccatagttaatttaaaaaccaactcaccaacattaacagttgtaccaacatttttagccacagttcgaatagtcttatcaacttcatctctaacagattcccatgactctgctcttttacggctaaaaagcttcataacacagagctttctcatctgtctccaaaagggtccgtagtgagcaaaagccatgtcagcacggtcgtatgtgaggtagctaatggctatggtggccggtcgatttgaaaagatgttatcttgaacttgaagaacttgacgagctgtttcaggggatgagattgccaccatgtgaagataacccattttcatgtggaaaacgcctccgtatttctcggctaatttcgctaatccacggtgagttaattggtccatcattgacatgtttccgattattggtaacccttttggtcccggcggaaatggaagtcgccgtcgccggaatcggaaaattaatcccagtaacaaaacagggacaattataagtaacatgtttattggtgtaatggcttctgataaagattccatttttatacttatttttgtatatatatgattggattggtagaaagagagtgagagagaaaaagttttaaggggggcaacaagaaaggttgctgatttgtttgagttgattataagagtttatataagagtttgtttagactgtattggtcttaattggtttatatttacaagtttatccaattaaatttggacataatttttttttttgaaaaataaaaaataatgttattgtattgactgtatttatataataagagtttccttttattgttattatttgatatgtataaagtatgaatttggaaagcaattatgttgatgagattcagtgtaatcatgtttaaaatctaaattttatataaatatattatatttatagcatgttgtatatatttcgagtgttttaaatataaaatctcatgtgacttttgtaaagttgctagatatatggatctgcaattaatgtggaatacttgccttttttatattgatccatgcaatatatttgtttgtttgatatatttatacattaaattttcagtatttgtgagataaaaaaaaaaattatgttaaaatagtgtgttcggttaaatttttataacattgaaatacaatttgctcttaatttttgttttgacaaatccagctatattagtaaattaatttatttgatgggattttgcactacttaaaattaaataaccaaatcaatcctttcaaaaagataactaaataaaaaaaatgatcttgtgacagtcagtagtc

SEQ ID NO: 185449 - DNA, 2220 bp, Cannabis indica
tggggtgtgaatggaaatgactgagagcgatcccagttacctttgtaggtctttcaagaagagtgttgcaccctgcgcacaagaagaaatatcttagaatgagtagaatgttggaaaaagaaagctagctctcaatagtgctcaccggttggattatgtttccacctccagtatgacatccaatgcaagcgttgcgaaacaacgtagctcctctttgtacatcaatcgtttgtcctagtgaatctgcacaacaaaagcagctaaagaccaagtaaaacataaatctattttgctgtaggaaaaaaaaaagactagtgatatgtcagttgtgtttagggcaatctataatcagaaatgccaaacaatcattatcctagagagcaatacataattatcacggtagcttatattgtcatagaagaaagcagatgaattatcgatagggcacagctcaaaatttacttgtaaaaaatatgttatggttgccagtatgtgagactattgtcaatgagctatcctctctgctgatgatttacatagaaaaagtattcatacataagaaaactaaccaaaaacaaagacaaaaatgttaggaatgaaaggaaccagacaagtgttagcatgttatgaaacctcacaatcctagaccaaaaatgattgcttggggagaaaatttaacagaaccatgataggggttaccagcaacactaaaagtatcgaaggctctaaacatagcataccagtgttaaagagtctacatcgataatgtgtgtaaactaaataccataaataacatcatatcataggctactcatctcaatcaattaattttgagatagaacccttacaccttaccatatagtcacctaatcctaatttattttacttcggttaaactaatagattttattttggagtttttaaaggtggtggtcaaaattgatattagacaaaataaatgggtagaaaattgtataacccaaaactcattatattcttgtaaaaaaaaaaaaaagaatttgtatctcttagaaggtgggctttgataaagaaaggaaaatctagaagaaaaatcctgatggtgattaacgacaactacactcaagtagaacagtgctagaaatggcaagattgacctggattaaccaccaatgattgttaagttatcactaaaaaatgttaaaccagtggcagtgacatacaattggcatgaaaacattttaagttgttttcttctgtccatgtaacattctatgtaggactacatatataaattacaaagctgaagatagcagccataaggttttttttttctttcttttaaagtgtgctagtcataaaatctggataaatttcttcaaaagatagattaaattagccctttcagatatgaatacgagcaaaaagcgtacagttgtatacattaaaaaaaaagagtcggttacggtacctggcgcattaaccattggagagaaagctaggaaagcagccattaaaggtggagctaaactcttgagaaacttaactttatcatgacatttaggaacggaaactggatttggctcctttcccacattaaaattcgaagaaattcaaattatagtccaagagagatgaagtgatggagagaggaatagagagataccttggggagacagcagaggcccttaagagaattggacgtgacgtgcagaagctgcatcactctttcccttcccactctcaaactggaaacgataagacctgacggggggctataaagtataaagggcctctgttgtcttcccagggatatatgtgaaatttataaatttaattatattatataattttattacattatataattaataaattaaatataaattaataattatataataaattttcttataaaactatatattaaattaataattaataatattatacatgtaaaatataacaataatatttatacataatatcacattttgttatagtttttattttcttaaaactacatttctaaagaaaaatttcatttaatatacttaaaaaaatcaatttcaaaaaatactctcttaaatattttatataatactattctattaactttctactttacccagaatatctttactatttattttttttctaaaacctacaagaacctaaaaaaatccaatctctctctacagccccaacagcaggcccccataccttctagcccccttcgcc

SEQ ID NO: 185450 - DNA, 1172 bp, Cannabis indica
tttttttttttttttttgattgcaacgtttggataaatggtatctcctgttactcataacccagggattttaggttgaccccatgcacactctttttcaacgggattagaatttttgctatgtgcaggcaatatataggtctactttaataaatattatcataatttatttaattttgtggaagttttttttttttactattttgtagtataattatcaaaataaaagggaaatatttagtttttttttaatgtatttttttgtttgaactccctcctcagtgagtccgtccctgccctttttcccacccttccctcagccatcaataaccctatcttaaccttatgtaaaattggcttataaattgactacttaaggacctgcaaaatttgagaagttatgtgcgagggaggatatccctcctaaaaaaaatagctgcagtcagatagagctttagaaagtagttgttgaaaacacctacttgatatgatttgttatgattctatgtacgggctgtaaccaaaatgtaatgttttatagcagcctcggcgaagatcacagagactacatcttctattggggagactgttctgtcatattgatcaggttccgaggaactcgacacttgaaagtagaaataggcatatgctgatcttaaaatcttcatgacagcatgagccacatcgtgaaactgtatttcatagactgattttgacaaccggccaagcagtagtgtacgttgctcacgatggtctgattatagtcttctgtattttaaaagtagtgtgtggggtctcctagcccttttacaagactgggttggctccataaatgtattaatattaagtttacgagctcagtacttctatagattatgaaaaagctagttactagatatccaaatttcattttttcataaatttaaaatttaatttttttaaaaaaaataaaaaaaataaagtgtgagaaaatatctaaaaacttacaagaaagtaatatcacaacgtaaatccactccaaaataataataaaaaaaagataataatataatcaattttatgtcaattataaattaactataaataaatgataaaataattaaaaaacaatatcaactagtttattgcatttttgtatataaaaagtttaaacaagagatatttatccgattt

SEQ ID NO: 185451 - DNA, 999 bp, Cannabis indica
agagcttgagcaatagacttgaggagaatcctttcctaccctcgaaagtcatttccaattccaactctccaccatctttttgattttctccttcacaaaacccaaatgagtcattttatttcttcccatagtgctaggcaagccatgatatttactatcttcatccgccacttgcatgcctaacacttcttgaacccagcgccaattatatttagaggtattagtgctagaaaaatagagaagattttgcaacattcaccttctgactcgagattctttcaaaaataggcaatagttccagaacagtattggcttctctatcatttgctttgtagtaaagataactatcatctgcaaacaacatataagaaatactcggcccctcctagcaattttacacccatgtaaccatgttcttatttaatattttttgatcaaactagatagaaattcgacaaaaataataaaaagatatgtagatataggatcaccttcaatctatcttatcataagccttactcatagttagttatagtgccataaaaccatctcgcccccactgttttcttttaagataatgcgacacctctaagcataccaaaatgttatctgttattaatcacctctaattaaaggcactttgaccctcagagataacaagatcaagaaaaactttaatacggttagccaaaacccttgtgataacattacaaagtgagattggccttatatcccccatccaagcaggatattgtttcttagggataagagaacttgatttgtagcattgagattacctgacataacaccccaaagaaaaatagtcccaaaaagtttagaccacatcacctcccataacaacctaaaatttctaatagaaagtcggagtcatcccattaggtccctgagatttgtctggatgcatctaaaacagagttgtcttaacctcacccagcgtgacaagcttcaacaactcaacgttattcattgaaatgatag

SEQ ID NO: 185452 - DNA, 6896 bp, Cannabis indica
ttctctctctctctctctctctctctctctctctatctttgatcttcttcttccttgtggttcgtccactctgtcttcttcctttgttttcatggtgcaagtaaatccataagcagagctagcggctctagctgcaatcttccatcccgtgttcttttctgacaaactttctgtcaaactcgacagcaacaactacctcctctggcggccacaagtgatttatgccatttgtggtcataatcttcaagaatatatttcagatcagctccctccaacaaagtttctctccgattaagatcatcagttggatattgttaatcctctatttactcaatgtgaacaatagggtcaactcctgtattcgtggctcctctcttcgacgacagaaggagtccttactcgagtcgttataagtcaaacctcagctcaagtatggaacactctttaggtatacttctccacgatcaagcgtctgctaaaattgatcaattcactaatcaattgcggaatatcaagaaaggagcattgtccatcaatgactactttttgtgtatcaagattgttgtgaatcgtcttaattcagtaggtcatcgtgtcaaggaatatattgtagcaattttcaagggtctaccaattgagtacgacacctttgttatctttgtgaactcaagaaatcaaccatacacagttggtgaaattgagtcacttcttctctctcaagaacatcgtatgacaatcatcgtcatgatcttgactcttctaatgttgccatgaatcgaaaccatcgtagtaggccttcttaccctgctcctaccgattccaaaatttacctcaatatacctcctgattttgggcatggtcgatctatttggaatccctatgccatttctcctcgtggtggttctttctcatcaccacctccttctgctgttggtagaagcacaaatcaaaatccttcaatgcctgctactttaaatagcactagttctcacccaatttgtcaattgtggtcaaaacctgaccatcttgctgcacgctgttattagcattttaatatggaatttccaggcattggagctgctaacatggatcatctcacaataaatatagccacttctgaaactgttagtgacccctctcggtatcctgatttaggtgcaaccaatcactacactgctgatgaatcaatcttcactcaaaaagaaccgtattatggttatgagaagatccatatggaagatggtgctagtctctctattcaaaatgttaataagaaaaccttccaaacacctttcacttcacaaactttacatcttgatcatttgcttcatgtcctaaatatcactaaaattttgattaatgtttctcaattctcgaatgataataatgcctgctttgaattctatcctaaccattgtcttgttaaggatcaacattcgaaagaagttgtcatggaaggccatcttgatcgtggtctttgtgtcattccctcctctcaattgcagtctgttcaatccaatgctactcagtcaccaaacaagtccccctttcaataatattcaagcttcctcttgtaatgtcaattccatgttttccctttggtatagcagattagctcatcctgcggctaaaactgtgagacatatgccaatttgtaatatacctcgcaataataaaactactcacgatttttttgaagcttgctgtaaaggaaaaatacataaatttcttttttctttgtctacaagtgtgtacactaaaccacttgaatagatgacactgacctttggggtccttcccctactctatcttcaaatggtttcagtcactacatacacttcattgattcctattctagatacacttgtgttttttttactcacatctaagtttgaagcacttaagacctttattaattttaaaacccaggtggaaaaagaatttgaaacatcaatcaaagctgtccaatctgactatggggagagtatcaatcatttgaaaaatacttagtgtcttatggcatttagcatagactatcttgtcccacaactcatcagcaaaatggagttgctgagaaaaacataggcacttagttgaaacagccctcactattcttgcacatgcatctttacccttatctttttgggatgaaggggttaaaactgctgcctatacccctcacctatcataggaaatcaaacacctgtgcaaatattatttcacaaggatcccaataatagtcaattaagggtctttggctatgcttgttacccaaatataagaccttacaataaaaacaaacttgagtttaaatcaaccaagtgcacatttttaggttatagtcttcaacacaaaggatacaaatatttgtctcctactgggagaatctatatttcaagggatgtgctctttaatgaacactcatttccctttgatgatttagtttcttagatagcaaatactgattccacttctcattatgacactatcatctttgtcattcctaccgtgtcccatcctaatccactcaccaataaccctactcataatactcaaccatccacatcctcatcatccaacactcctcaatctgtgacaactactaataatggtaactcccttcttcctgttcaatcaccagtgattaacaatgcacctactgcttctccaatgtccgtaacaattgttgataatgtccaacctattggccatgatgaatcaccttcatattcctcaaattccccaactatgcccactgttaccatacatgtcaatgctcataataaggtaactgtgccaaatctggcatatctaaggccataattcttttagacacttcaacacctacctcttacaaagtagcaatgcaaaatggcaaatggctgaatgctatgaattctgaaatggtagctctagtaagaaacaacacttgagtccttgtaccccttcctaaaagtcgaactcatattggttgtaagtggttattcaaagaaaaatataatttagatggtagcattgataaacataaagccagactggtagctcaaggaatcttgtagaaatatggatttgattataatgacactttcagtcctgtggtgaagcctcaaaccattacgattatactcacaattactgtcactcataattggtgcattagatatctggatgtaaataatgctttccttaatggagagcttcataagaggtttttatgaagtaacctcatggatttgtagacaaggattctcctcacctagtttgcaagctcaacaaagttatctattatcctttagtcactgatgcgcaaagtcaaatgctcctcaaactatatactaaagaagaagtgaatctggcattattttctattcttgacttgaaagtgtcaggccctgacagtttcaatagaaaattctttaaagtttcttgggatataataggtggggatgtaactttggaaatattatcctttcttcactctggagaaatattgcgagagataaattctacaactttgacccttgtgccgaaagtgaaatgtccagattcagtggttgattttggacccatagcttgatgcaatgttctttacaaaacagccataaagacggtgtcctcacgattaagacaagtactaacacacctcatttctaaaaatcaagggggcttcattcatggaagattcaattgtacataacataatggtgtgccaagatattttcaaacattatgcgaggaagacttgtaagctttgttgtttgatcaagatggatttaaagaaagcgtatgatattgtcgattggaaatttctaatggagatgatgaaagatctcagatttcttgctcagtttatcaagctgattgagttatgcatttctactctcaagttctccttcttaaatggaactcttcatgggtatttctcatcaaaaagagggctaagactaggggacctcatgtctcctctcttagttgtcttgggaatggagaatttgtcccgaactgtagcaagagctacttgcaaagaaaatttcagatttaactacaggtgtgaaaatttgagattaacttacatttgttttgctgatgacttactgatgttttgtcacgaagatgtgaaatccatttatttattgcttcgaagatgttttaaaaggttttcaattacctctagcctccaagaaaacacaaaaaagggctatttatttccatggaatggctgagaaaaatgtacaatagattcttgatacttctgggttcattcaaagtaagctacctttcaagtattcaggagtttccatctgttctaaaaggattctatccactgaatgtgaaattttgattgagaagatggtagcaagaattacagtatggagtttaaggcatttatcatatgcaggtcgagcagttttagtgaactatgtacttatggcaattcactcatattgggcccaagttatgattttaccaaagaaattgcttaagtccattgataaaatatgtagagcatttctttggattgatttagaagactagcaaaaacaaggtcttatagcatggaaccttatttgtaagccaaaaaaaaagttgggttgggcttctaaaacattgaagaatggaatattagtgttattggaaaacatgtgtgtatcctagctcaaagaaagggcaatatgtgggtgaaataggtaggtctatatgaaaaaggagaattgatgggaatacaagcttaaagatatctacacaaaaagtcaacttgaatcactcaagtacttagttaaagaagtctgcaacaggttgtttgggcagcttgaagtgaaaatatggtatgcacacaagatttgggcaatgaaaagtataccaaaccacaagtacatggtgacatgaattgactgagaactggagataggcgtcacaaacaagacattttgaataccataaattgatatatatgtggccttgaaccagagatacatgaccatctctttttcagatgtgggtttagtcaaaagtgttgagaaaatgcttcattgggcaagccttggatctaaccaatacaggtttaagggcctattgaactggattagatactgtacatttattcacaaatggttttaaataaatagataaaaaaaaataagatacaattattaggctagctaaagtggtcataaaggctattagagctgagtgtgtgggggtcataagatcgaatcccagatgtgtaagatagttcagtagatgaaaataatgctcatagagcaaaatcatctaaaataggctaaccaagctgttaaaaaagcgaccaagacaacctatcaatgactatcattcaaatctttcaataaaaattatataaaaaaagaaatcaatcctattatttgttatcgagttaatggacaatagcaaaagatctactattgaaggtactcaaacagtactagggaaaaaaattctttttgttgctaagttgatttgccgtagatttattttcaactataataacataattatttttgcgcgtatgattttcaatagaattttacttgaatttaacttgaagaatgattgtgcactaaagctaaatttttattttggtacaatgcagtaatactttctggattgaaatttatattgggaaccccatttgttgtcgcctttttaatctataaatggcgaatacgtcatttatcattatatgatactattgaagagtttctagaaaatcagaataatttcactcctataagatactcttttaaagagataaaaaagatgacccaaaatttcaaaattaaattaggtcaaggaggctatggttctgttttccagggaaagttgcgtagtggtcgtattgtagccattaagatactgagtaaatccaaaggaaatggtcaagacttcattaatgaaatcgctacaattggaagaattcaccatgttaatgtagttcatttggttggattttgtgtccattcctcacaccatgctattgtatatgatttcatgcccaatggatctttggaaaaatatattttctctcaagaaggaattacatccttaagttgcaagcaaatttttgaaatttcacttggtgttgcacgtggaattgaatatatgcatcaaggatgctacatgcaaattttacactttgatatcaaacctcacaatattcttttggatgcaaattttatccccaaagtttctgattttggattagcaagattatgtccgttggataataatattgcgtctttaactgcagcaagaggaacattaggatacatagctccagagctattttacaaaaatattggaagagtttctaataaagctgatgtgtacagttttggaatgttattgatggaaatggctagtagaagaaaaaactataaatcaattgcaggaagtaatagccaagtttactttgcttcatgggtgcatgatcaattaagtgaaggaaaaaatataaaagtggagataacagatatagatgagacaaattcaataattacaaagaagatgattatagtagcattatggtgtatacaattaaaaccgagtgatcgacctacaatgaataaagtcatagaaatgcttgaaggagaaattgattgtatacaaatgcctcccaagccatccctatatctacaagaggatttgcctattgagaaggttgaggaaacatcatgttcaatgcgctcaacaatatcatcattaacactatagagataagtttggtcctaaatttaaacaattgatcacatttacagtttttgtacttaatttttattttaagtatacttacaattatttttttttttcataattatgtataataagttaatcattgtatgacaaagttaggtagtgtacgattgttgatgtataatagt

SEQ ID NO: 185453 - DNA, 7498 bp, Cannabis indica
ttgcatgataatgttgtgccagccatctgacttaagctatattcatattataaatttgttgcagggacctttatgctgagtacattctgcatactctgaggcggtagaaagagactacttttttgaccatttgaataagtctggtgtatccatcgttgtgaaaactatgatgtcttgtgtttcatttttgcaatttgaatagtgggaagaaccccttttggtatcaggcatggaagaatgaattggccgtgtatgcttcttaattgtatgcataagattgggtagttgcttttctcccaatcctttttaacaattgtagaaacccccaccctacccaattctcttatcaactcaattcaccccattgtggtctttgtgagtttttgtgattcaataaaagcctgtcttttcttttccttctgtacgctttttaattcttcatttttctttttgacattaaaaagaagaagataatttattaaatgaatgaggtataaggctctagtattaataaatttaatacatacgtacaaaggacacttgatttgtcacctaaaggcacctaagaccacttataaatcatttttatccgttttaaatatagtaaactctatcttatgagcaatgatactggtgactcatccgactgtaaaaattaaggatgggaacaccaaaattctttttcgatcatgagtacaacttatttaaaagctccaaaaggagcactgcagcagagtccttggccttcttgacgctgggcatgggttctccgacacattcatcggtccatcccttgtcggtggtattcactcgtacagcaaaagtaaaccttttggcatgtgcagggccaccttcatttacgcacctaaatacagaacagaaatagcatggtcggaaatacatacaacatgtttgctttatatatgttagtagatgttgaattcattcttctcttaccgataaaatggcattggccaatttctacgcagacatatgtcgtttaaggtttgtcgggtaaacgtttgggcaccattcttcttcttaccattctcatcttctttctcctttgcttctgccgattccttctcttttaaagcaactagtgcattccttgctgctagtttctgtgccatctttttttgtgcattctgtgcaattccgacctggataccatcgacgaagacttctactgtagccaaattgccatttcgagttgctttgtattccaaaccttcagcttgttgttggcatctttcttgcagctcacgcacgggatgcattggaagtgtctctggagtaaccattgggtccaacagaggttcaaacacctattaagatagatgtccaaaaaaatttagctccacaattacaagcacaaaaaaaaaaatgaaagagtgagggaatgttccttcagaaactgaccttccaaactacagcagtttgacgtccagcgtcaaggaaaatagcaccagcaatggattcaacaatgtcaccaagaacttttggagctttgcagtctcccaaaccaaaggagttgaaacctggccttgagaactcaacttgaacttcctttacaaaatctcgaatctgtaaacacaccagaaagtattggttttaaatttaacagcatatagcattccatgggatatctttccagtgtaaaaacattaatcagtgaagaagaatattttagataacctgtttttcaagggcactggaaccatgtcgaagatgcacatgaagattacgccttacggctacacgagcaaaattttcattatttacagcagcagctcgcaaatcagtcaatcgcccagggggtagattcgtgtacgtaaagaacaaatgctttgtaatgagatgatctaagactgcatcaccaacaaattcaagacgctgatagcaggatacccctgaagatggccgagatgcatgagtaatagcctctaccaacagtccccgatctctaaatttaatgtttaaagctccctctaacgcatcaaagttgacattcctaagcacagtttctggaatgttcgacggctttcctgggcagtcaatctgatcagggtcaaactctacctcaatcccaatccatttcatcaggtggttagcagcatactttccaccttgtacataatataccccaattaatgcttcgacgacgtctgcaagggtcttgctagaaaggactctatatgaactagagtcgccctcaagctccccatcttccattacatcatcttcgagttcatcccaaggttgattcttctcatgtgtattcttattacttgatctaccttgatcaaacagagatgattctccatcttttgtatcctcatcaaaaacgggcagcacaccaggagcagcccatcgggacggagaaaagctatctgcttggatatatgattgaagtcctttactcaaagcatactggtataagacaaagttacttaccatttgttgcctcatccgagtaagctgaccctcatgtttttgggggtatttaagaaaaagaaatcggctaacaacccattttaagtaagcatcaccaagaagctctgctctctcatagcaaaatgtctcctgacatgaagcagctgtcaaagcttccaagatctgcagacagataaaagaggtgtctattcatcaatttacagttcaaaacaatttaaaattagttccttatatccacaaaaggaaaagaaaaaaagagcacctttgaagcaggaacaggatagtttatcatgtgcttaagttgaactgccagaagcatactttcaacccttctcattatggagggcaatctctgtgcaccacgaaccagtgaaccaggcagtgggtgcaataaacacagctcaggagggagaaaaacatagtatgttttgtctacactctcatctgactcacctacaccaacaaaattggtccatttgcttaagaatttataagaacgtggagtaaaatcagttcgaaagtagaaatggcaaaaccgtaccttcagcatgttcaaatcgaggagacagaagattcttacagtaggaaacaccgcgtcctctaataagaggttgttgcttatacatcaactcaactccatacctatataaagaggaacccaatagccaaccaaatgcacacacttctgttgtgcgagaagaaagaaaaagcttaaaatctgtaggtatccacagctattgtcactgaaaaatgtctggaacaaatctatgtccatacatttttcacttgacagtagcagagacttaagaagtaactctacagaataacattagcttttccttttcttcagacacaacatataagtgcattgtggctatccagcccataaattagaatcaatatattccaagaccagaaaagaaaggagaaatacattctgcttaagccaaatatttagaaatggtaaaggaactaaaaaggccaaatgatttgacgatgtgtagtgtctacatacttttgcttgtaataatgagcatatgaactgtactccaacgggcctagatagccttctttccttgggaaagagttctctgcagtcatatcataacatattgaatccacataaaacctcttcccagagtgagcagctgttacaattctccctatcaaatcttctgcactagtcgaagtatcagccatgattagttttcctttgggagaaggatctacatgtctttgcatttcaactgcaccccgatcggggaccaatcctgaagccttcacaacatcaaattgtgcaacagctcctctgatgccatatgtgggatgagatttctgcccaaaagccataccatgacgcagtttcccaaatccatattcccttctgtctccacctagtgtacgctcatttgtgccaaggtacacatctggccgagctctctgaaggggatttccccaagcatcagtaccaattattttctcaacttgatcccaatctatttctttaataggatctacagatttatcgctaaccacagggacaaacaaatacgcctttgcaggatcccaaggagtggtggaaggttcaacatccacatccagtacaatgctcattaatcttacatgaaaactcttaagggatgccaactgtttaaaatagaaattttcattcaagcatcagttgttgaaaatctaaaagtaaaaaagcttgtgtgattaatcagactatagtaggctaataaaatatttaacctgactttgcgtgatatctattgagcccctgaagacaagtgatgcctttgtagtcatggttcgtgcgataaatagatccatcgacatcgataacacctattagcacaagattatggttaaagaaagtgacaatgaatattaccacacctgaagtgcaaaatgaaacaaaatacctctgcatccagctcattgccgaaaagcaatgcgaaatctgaaacccgagtcaagaatggatcttttgaatagcctgcgtttacacatttcacatcatacataaatagatgcaattttgggttgttgcaaacttcctttccagataagatccattctccctgtaaagaaaaaaaagaaagtcaaagcagcactattaaaactgtttccatttccatctcaatagaattaactacaaaagacattaagctcagaaagtcaaatatcaattctcaatctcacaacttcttataaattggaaaagtgccttagttgtgaagttttattttaaatagttaggctaagaagtttagtcaagtatatttcattaaataagctaccgatataaagtcaaaagcaagacacaagaaagctctacaaaattttggttaaatcttatgtagcttagaaactatgcaaccaattcccaaaacttgatgaactcctagctttgttcttatactcaaaaattataaataaaacaatatgattctaaatgaacaagcaagaggggcttaccatgagaacatcagctacaccttctggataaaactctctatgcctagccgtcccagaaagtggatccccttcatgactctggtcagccttttctttttcttctccacttcccttgtctggcaacagcatgtcagtaaaggctcccatctcatgaagcttcttgcaagcagcaagacaaacagcctgcagaagaaagaagaaataaaatgaacattctagaatgctttaagatgaaaactaaaatgaatttcatcagatgacgcttacctgttgtgctaggcgcattgaactgcatataggtccctcaagtgtctcaaatggtgcattacaaggaagttgaagtttgcatgaatattcagtgggacctcccggcttttcatgcctaaccataacaaactcaggacgaagtattgaatacctggaaaacaaatgagaccacaacagagatttcaccaaaaattaaacactgttgccactatctcatttcaatgaaattgatacaaccacaactagggtagaatctctatttccttgagtgtgtcccatgggtcatatcagaaaattaaaatcttagactgaaagaagtacctgtcactgggaagctgagagcagtaaaagtggatgagtcccacagcagagtttaagctcacaacagcaccagttgactccacctggtacattgcatctggtgttgtatctatagaaattagcctcgaagtatccttcaaatgacttaaatcagttctctcaatagcttctttccttaaggtctcctcactgttcctggcgttccttaagaatgcttcatgtgatagatttcccctgaagaaaatgtatatatttcagagatttaaaaataagttctgttcgtcaacgttatttgcaaaatcataatcatgtcattaccaaagctatgatactattttttttcctaggatttttttatatatttgaagggttagaagtggatgatgaaaaggcggggacaattgccatactaaaagatcacaggaaagaacaactttacttgaaaaataaaagcaagtcatgtccaaaactgtgatactattagtgatggggttttacattaatgggttagaggaaaaatcagaagccaagtggcaagcagtctgcccagggatacttgctagggggtaaagaccttaaacaagaagagggctaaccttctgagtttcaatgaataggacctcgagttactttcagtcttttggagatgaagccttaagaggggcacagccccatgtttcaacttcttacaaataggaggcttccaattaagttttagattccttgctaacatttctaatctttattttgcagttagtacattccaatcctctcatataatttacacttttattttttcattttagatttaaatttcagttaaatttacttctttttaatcatagttctgctattgcattcagtcatttaaatatttctgccctaatttataataatcctaacctaatatttcatgctctttatttaaactaataaaactgggatcaaaagctaaagttcttaaagatatattaatttggaactgtctttaagagataggggtgccacaagcctagaatatcaatcgaattttccaggaacgctattcattcccgtaaaataaggtacctctcggacatcaatatataatctgacccaggctttctagcacgacccctggactgaatatatgccaatacagtttttgcaaggtcgaagcgaataactacattgcattgccgaatatcaagaccttcctcagcaacgctagttgccactaacaatgtgacctgcaaaacataagaaaaagaactttctcagatcacctagtaaataagtttaccccaaaggctcaagtcaacaatagaagttgaacatacacgaccatctcgaaatttagcaattgtgtcttgcatttggcaagatcgcatttcctgactattgttatgaccaatcaagctagcactcctaacaaaacccagagatggaagctctgcgaaaacctgcatgcttgaagaacatgacaagtaaggagtcgagaatataaaacctaatcaagaagaaatacataaacaataagcattatagtgtaaacaaacctttggaagaaccaaagcagagacgacacgctccacaaagatgatagcacggaaatcatcagtatgctgataacttagaagtactttaataagtgactgcacttttggtgtcacttttccgtcagctactgcagctcctataatcacatcaacatgctccccaccagacacagctaagcaatacaagaagagcagttaacaacaaattccaacttataacaaaattaagcacaataaagactgatgagttatatctagatgtgaaatttaataattcacaacattttattccatgaaaaagtaataaagaaaataaatgataattcctacaagaacagttcctttttttcctcttgcaactaacaaaacagagaatttacaaaatgttagaggatgcacacaccctcgaacctatgaagaaccagatattctgt

SEQ ID NO: 185454 - DNA, 2046 bp, Cannabis indica
ttttattaatggctttgtgtaattaacttaagtgattgtttttggggtaactatatattggtttgaggttaggtatgaatgctttcatgttcttagtgagacaaaatgattagtttttcaattgagagattgagtttacgagaatgagaacctcacatgttgatagtgacagtttcgtcgaatgaatttactttggaagatcttaagtttaaggattttagacatgttcatgttattggtagtctttggaaagctgttggaaaacttgtcactgttttttaaggtttgctagttagttaccagtcttttttggggttgaaatttgagagtaattatatgtacagggaggtcttcatcaagtttcatggttccagtttcttccccatgaatcagattggatctctatacccgataaaaggttagaatacaatcaaagtaaagatttttactccactgatgattatactctggaaacatttctaagtgtagaattatttgatgagcagtttgaaagtggagcagaaagatgctgctacgatgcttgtgctttcatcacatctgcagttgcagaaggaaggatttctcagcacttggaccaattcctttgttggaccctgggatccatctcagggtttgcacaatcctggtgagatagcgaggcatcggtggtattactgtttgtgagctagtattctttgataagataagatgatatactggatagtatttggttatgtaacttaatttcataaaaattcacagatgagaaaatcaagttgtggctttttcttcctggacatcattcttctgtcattgagtctgctcaagctgctgtatctcgactaagaggtagcactcattctttcagtttttgttgttcttcttgcgagttgtgtaatgaacatctgagaataaggcttttttctggcccttgttattatattttttcgaagatatgtaggcagtatattcattttgtgctttgaaatgattgatttatttgttttatttatatcgaggtagttgttaaatctggggtttggttggctcctggagactctgaagaggttgccactgctctttcacaggctttaaggaattgtatagaaaggttagcaggttacaaataaacctttattttggatcgtatgaaatatgatcatgatttgatggtttttttttctcatattgacagagcactttatggactctcctatatgaggtacggagatgtgttctcaaagttccgtccatctcaaagcgaagaaacattcaggtatgtttataattggacattgatcactcttgtttcatataaaactcctctgtttattttcttataacacaatgaaaaatcaaacttgtattttgtatctaaaagataattggtttaatttgtttgaaactattattgcttaataaaatgttatttcttattattatcactaatccgtcagtgtgtttttgtagaagagggcagcatacggttgaattcatctttgctgcaacggaagagggaatttttgtgcacgctattatatcctcaaagtacttgaatttcacaccttgtatgtttccttggaatgaatttttctgtcgatgttaacatatatttttcttcatttgattctaggcatgtccgtgctctttcaagtggtgacatagagagagtgtcgaagcaatcttctaataattctagttacaaacttccaggttggtttacctctttaaagggatgagaaaattaaggtttttctggtgtctctccccccctttcccttccccgctgaaagaaagaaataaaaaaaaaatgctccctttcttgttctacttctacatgagcatttttattgacttatttttgtaacctcaatttatatttgcagtgattgtttctcctcatggaatacgtggcagacttactggatgttgttctgatgatcttgtaaaacagttatacttagggtatgctttacccatttaatcggaatatcacgagctgattgactattgatctgaaaataacccctacgtcattttttgttg

SEQ ID NO: 185455 - DNA, 1175 bp, Cannabis indica
tatataaatatttatatatgtgtgtgaaaatgtgtcttgtgtattgtgtatcatgcacacacataattaaagccactaaagtggacgatatccaatcaagatttagatacgaacgtaagcacttcgtttcagatgacgtaactagttttattcgtatatacatcgtggaagtatgagagtagtatatctatatatatatatatatatttatactatagtaatttttatatttatacaagactagttgtaataacgcggaactaggtttgaagattcttggtctccttccatggcttcatctctgactttcttttcatgcatgtccctcttttcactctctaaatttaattcaataatttttagacagaagactactagcaccaaatattaatcctatagatatagattttaatacttttgtatgtatatatttagtgattgttaaggcagacgtggtcagccatatagatctctctcctattcctacgaccaaagaccagtcttcatgaagaaattccaccaatgattttctcagtcaaactttcaacacatctatatttcttttctctgattcaaatatatacaagctagctactcctcattccaccatgttctcaaaatcccataccaatattttttccccactctctcctaatcaaggtaactgaaatcgatcgatatggatcggaataagaagatgatgggagagtgggagcaaaagagtttgttgaatgagttgttaagagggaaagaactggcaggacaactccaactcaccatagccacgtcaccaccaccaccatcatcatcatcatcgtcaacttcttcttcttatgaaagtcgtcagaatttggtacaaaatatcttggtttctttcgaaaaggcactctcaatgctcaactggcctggtggtagtagtggtactagtaatcaatctctactaccagctgtaccagtaatgattgggatgtctgaatccccaccttctcttactggaagtccatttagtgacgactctgatcgtgaccaggacaacaaagattacattggctctagaaagaggtatatatgtttagattaataataaatatgcaccaaaacattatataatatatatatgtgaattaaaattaacagaaagagtttgccaagtgtaagtgtttggagcttttctt

SEQ ID NO: 185456 - DNA, 1006 bp, Cannabis indica
gtttgggggaggttgaacacccccagacacagttttataacatggattgcaatccaagaaaggctaaaaacaaaagacgagttacttcggatggtaatctcaggagatgatcagtgtgtattttgctgtcaagtcaaagaaacatgttcccatctattctgaaacatgttcccatctattctttgattgcttagttgttgcgggttgtttaaaggcagtaaaagattggttgcaatggcatgctactgctaccactttgcccaggttaataaggtggatagaaagagctaaaatgagcaaatttaggaagcaagtccttgctgcctccattgcttatttggtgtacagtctgggagtgcccaaaatgctaaagtttgggaagatgatcagatggatacagagcggctaacacaacaagttaagcttactgttaagcagcgtatttcaatttgctggccaaagcgagtgaaagaaagagacaaagagtggttccaaagttcgtaaagattgtaaataaataacatgtgataattgtatagtttatttttggcccttgacgggtgcaattagcttgtaaaaagcaatacaacttctctgattcattcaaaagaaaaatatttttgcatcctattttactatgttgggtaggaagggatagagctgaataaagagcaaggagagttgacgaatgatatagaatagaaagaaggcaaaatagagtagcattttttgtttggtgaaatgaatggagtggtgaatgcatagatcaaaatatttatttacaaaattattatattttcttgtaagtaatttttaataatatattaaaagggcatagttaaaatctctaacaattgaagatggcggataaatccttccattaacggaaggattttaaatttagaaattttgaaggatttgcactccatacaactatcccttcccttttaatcttttttgccaaacaagcagatttgttatcttcttcactaagatttcgaatagc

SEQ ID NO: 185457 - DNA, 3520 bp, Cannabis indica
aaaaataaaaaaacccctaatttttatatctctctaatcattagagatggtcttatattgagtaaaaaaaaaacaagaatttatattgtattatttattacattttttattatttaataatacaatttgtattgaaaaataagtcttgatgcacattatgagtactcttctctactccaccctctaaaatatatcacaaaaattttattttttttagaataattaatatttttgtcccctaaatttttgacattatctgaccctaccctctaaaatatacacctagttaaaaatttatctaaaatataatagttatataattatgtctcttctattagattttttttttttaccgttaaaaattagcatttttaccccctaatataaattttgacaaatgcaaaatttcacccaaaaaccttaattttaaaaattataatgttctattaattctaaaaaattaataaatattatttaaaaacttgataaaaatattaataaattaaaaagtattaagtttacttaaaaaatctaaattattatatttgggccctattatcaataaataagcattatgattataatttttcaattttggaaattttattaaactttaaggtggcatttggttggaggtaaaaaaataaaatggaatatggaaaggaaacaatttttatttcatttctttgtttggttgcattttaaagtattagaatgtcattctaatggattgctcttttcaccattttggtggaatgactattccattttaaaatagaaagaaagatcattccaatgtaacatgagaaaatatttaatgatcattttatcaattttttttatacattttaaattttatccattccatttctattcctattcctattccttttcccattcctatttttatattttcattccacccaaccaaaacgccacctaagtgtattatatatgtcatatgtaaaaaatattattattatgatttttgctcagtaataatgaaaatgtaacgaaatgatcgttagagtcacatgagttagtttaaaaccttttatttagaggaaaaattataagtaataattagaacattgggatttgacggggttatggtattggaccattttattcctaaacaattagcttatttaagctttaagcgtagaggcattattggaagttttgcctaagattaggctttgtcctttagtgaaattatagtgcattccttatgttgtgttgatctaaatattatatgtaatttaattatttatggataagctagaattaacaaaaaaaaaggttaaacgctctctctctctcttagtttctctcttggcccttcttgaacccaaaggaaccaagggttttccctttgattttcagtcatcttaattgggaaaaatcaaaagaaatcagtagtgattggaagaattagcaaaggtaaacactaaaattttgttccttgtgttttttttttgaagaaaggttgttagtttgttcatgcaattttagaatttggttttgtccaaacctaagtggtttggtgattggttcttaaactttgttgagttgtttagagttggtttgatgtgtttttaaggtttgattgttgagctgagcaagtttgagttcaagaactcaaacttgactcaacaatggtaattttgggaattttgagttatatacttgtgtttaatgcttgaattgtgcttattaggccctaattagatgttctggagagtgtcttaagatttacgagatttggggttattttgaaacttattgtttttctgcagcaaaatacggcaggtcgttttgagaaaacgatctaccgtttagactggtagattgcctagaaaaatagtctgtttttcctgacagtttttctaaagtctcgtttttttgtgatttctctatatttagggcattttcatgctagaaaaatttttcgttttgagtttaggttctcgagaaggttttaccaagttgtttacctaattacataattgtgatatatggcctctgtttagcgcgtgaatttctattcaagttgatcgacacaattgaatcaggaaacgagattaaattagtatacaatgtgtatatatacgtatatgtgtatgtatgtaaattgcatgttgtattatgtaatttgtatactaccaacactagtacggttgcggtatggagtgcattggtacagtatatgatgtttaaagggtacgacacactattaccaacactagtacgggacgagtacgtagtgcatgtggtactcagtggtattcggggtatggtttagccctactaatactagtgcaggacaagtacttagtgcatgtggtacaggggtcgtacttttattaagaacattcgtgatgcatctgaagccttataaataggtatatgggcacctagatataagtcagtattatgttatatgttttgtgtttttcttactgagtctgttgactcacagatattgtttgtggaagaccatatactcaaaatctcctcttgaatctaatatcatgaaatatccctaaatggtattgtgaacaaagaatcgcgccctagcaccagtttgagggcattggggcgctctttggaaagtgaaattagttaatctgtaaaggcactagtggtgtaccgctaccaaggggcggtagggcacccggaagagatgaaaaatactttttttagactgctctgatgcgttgtagcaattacaagtaaggatgcaattatgtgaagaaagcttaattctagacactaatataattaaatctcttttttacaaacaaatttaagatttgcaatctcaagtaagatcgatatagttaattagtacttttcttttaattaattcttcttagcagtttatgtaaaatatttaagagctttttcatttatatatttttattagtcttctttaaaaaaaataaataaataaagtagtgtaaattagttagattcatgaatctacaagagtatatgtatattacaattaaatattgagtggttaattctataaatatggttgccagatataaagagagcattagttaaaaaaaattagctcaactgttaattaatttaatcagcattattaacatattattatttaattattaaatttagaatatatattattattaattctagaagaaggaaaatgctatacagctaatttgtataaatgtgtgaaactatagctatagctatagtagcttattacattatatatagtgcaatattataaaaattatatattagtcttaattagtggccaacacaaaataaattcataattttacaaagaatgatgtttaacaatttttttttttaaaaaaaaattaataataattgaaagaggcattatatatatctttatatattaaaagtgtctatctaacggcatttcttggtttaacagaatatactttaaaaataaaagaatattctgttaaatttaacaatgttagtaggtttgatcctcccgttaactttcaaaaaa

SEQ ID NO: 185458 - DNA, 1470 bp, Cannabis indica
agaatcatagaatggagacaaaatttgtattttaaaattcaaacaaaatgtgacaatacatttaaatgaaacactggaaagagacaaaagggaaaaagtaaacgatgcatcatctgtccctcctccccaactttcacactatgtattacaaagatgaaatgattcaaagggtgtggtgcattacaagagaaagctaagaatctcaaaagaaaaagaagaaagaaaatgctgcttcacaaaagcttttaaaaaaagaaaatgaaactgccaattgtaaaggtatctaaacaaaaaacagaaccctgacataacaaaaaggaaaggattaaaagagcaaccaatacctgcatataccgaacgacagtgctagtgtagtccacggccctcctctgtgtaagttttctcatcctttttgcggcaaagccatcagcatgagctgcaaccaacagtttttgttttttttttataacagataaggaaaatatttttcaaaaataatgaaaaatgcttgtaatttacagtcgcttaatacaaacttattgtagttgaatgactgctaaagttattaacttattgcaaaaattgttgaagaatttgttttaccaataaatagtttccatcacagtcagttttacaattgactcctgcctcatatggagttcaaacttcaaaaaattaacatgtcctccgagtaccatccttatgaaggaacgaattacaatcatagtcacaatcaatggaccaaggattcaagaggtttaacaaaaacaatttccaaccagttttgcctataaatttctacaattgcttacaaaaagaaaaacactttatttataatctctgtatgttgctcaatttttgctttcgattaacactctacttctaagttaccataaaaaaaaaggaaaattaaagaggaataccgtcataagaaggcatgggaggaccaggggtagaaggatggtgatactcaggaggagcgagattagtagaagaagcagaaggctgacgcatcattgggtttggaggccccctgttaaaatctccaccaccaccatgttgttgttgttgctgttgctgctgctgctgaggatcgccatacatcattatcgcctagaaaaacgaaaccctaacggcaaccctaagtaagtgaggacaagggcgaagacaaagtcacagagtcagtcacagtcacaggatgtttgtaaaaccctattatactagaaatatagcctaaggagtaaggagtaatatattaaaatgcaaaatcaaaaggagaagcaaccacccattctcttatgatctatcaacaattttggaaattagattgatgattatttggtttgttttctaattctaattctaatatgatctatcatatagcaacactttacataaaattgattttgaaaattagatcacattgtatgtgtagcaagactattctaatagaacaacatttatagttgt

SEQ ID NO: 185459 - DNA, 8723 bp, Cannabis indica
gtttttccaagaatgtatctttttgacaatgtatgatattatgattattttcaatgaagttgtttattgactacaaaagaagcatatactgctgattttagtattggtttttttctttagtgtttatttttcttgtataccaagtaagagtacaaaaccaacaccaagcaaagcaaatgccatcattgactgtataaataaataaaggcattgcaatcttgtagagtacataaatcttatttgtgcagatatgtcagagaaaagcaaggatgattttgacttagaattggatgagatggaattgattgcagcagctgcaggctactattactataacaccttaacaactcaaccttgtcctagtttatcaccaacccgaggctgtggattcatgactgaagttctaaatggtcctgaagatctttgtagggagatgtttcgaatggacaaacatgtctttcaaaacctctgcaacgttcttcgccaaaaatccatgttaagagacactgctggtgttatgattgaggaacagctcggaattttcttgaacattataggccataatgagcgcaaccgagttattcaagagcggtttcaacactcaggcgaaactataagtcgtcattttaacaatgtattaaaggcagtcaaatcactgtcccgggaggttttacaaccaccaccagtcaacactccttcagaaattattgttaacaatagatttttcccttatttccaggttttgattctatcagtttggttcatatcttatgttgctgttgtatagtaagtcatctttgagtcaagctttatcttacacaggattgcattggagttattgatggaatgcacatccctgccaatgtcccagccaaggatcaatcccgatttcgcaacagaaaaggttttctttctcagaatgtattggctgcatgcacatttgatctgcagttcatcttcatttatcctggttgggaaggctcagctgctgacgcccgtgtattgagggccgttcttgatgatcccgaccaaaactttcctcaagttccacaaggtttaagcatattataacacaccactttatctgctttgattactttagaacataatatattttgcacaaaagtgaggttaaaagacagttatttacatgtatttaggcaaatattacctggttgacatgggatactcaaacatggaaggcttcatcgccccatacgagggagtccggtgtcaccttcatgaattcagaggtgctaatcagttgcctagaaatgcaaaggagctattcaatcacagacattcatgtctaaggaatgccattcacaagtcatttcatgtgttgaagactcggtttccaattctcaaactcgccccacaatacgcctttcacattcaacgggacatagttatagctgcttgtgctttacacaacttcatccgccgagaggaacaagataaggattggttgttctccagtgtggaaggtataaaagtggatgtgatgcctgatattcttgatgaacaggctgaaattcaattggtttcttcgatacaagaacaagtcgcattctcagtaagagattcaattgctgcagctatgtgggaggactacattaataattgggatgaatggtgatccaatccaatgcctctttcaccattttcactttgtagctttccaatttgttttgttctgaagaagagactaaatgaaaatcaattggaggggttttggcttttgttagaaacaaatattttaactttgattcatttacaaatgattcagaattcagatcatgggatctttttttcttttgtcaaaattcacttggttggaaatcttacaatatttaatttgctctttatacatttttgacaaccatcttcttcatcgatgtttgaggtgttagaataacatttagcttaaatttatagaaaatgaacttgcatacaacaattacatcaaattctaaataaataattaataaataaaaagaagggggtgttttattctatccgtacatcaaatcttagtgggtacaagaaattacatcaaggaaaagagtagatacggatatggtgaagaaagctaattcatagaaagaaaatgcacccgagcaagtgtgtattcctttccggcaatccaaacaccagtttgcgaccactgaacgtcttcccagtcgagattctcttccaatacctgaaacaccatagccacaccgtacggtgtcatttcattttcattcgatgaataacgttacaaacgcaaaatgtatagctacgaacaatgtatttatacctccacatattcgaggggcagtggaatcccgactgaacgcattactttctgtggaagaggcttcttacatcgagaccatcggaatgtatcaatgacaatgttttcaacatcatttctttcaccatttgcagaatgtgaatggtgattaagggacttctctgaatcgggttcatgtgactgagatgactgcgttgctctcaccatcttctctccagtgaaacatagctcatacctaaatacaacacatagtaaagaggataagaaactaactgttcctgttcttacatgattttaactcatgtcgggataagaattattacctgcgtgaatgtgtctccaagtacaatacttctcccttcttcaaacgcgcagatgtataaagtggttttttcagacccttgtctgcaactatgcttatactgtacttgatcctatagaaacaaaatgcatcgtttcggattagatataattggaattggaatccttggtgagatgagttgagttatgtgttatgacttcacatatagtcaaacatagattcttatatacagtacagataatcaaaacgagactggcttaccaaggctcattgcagaggttgtattgtattgtaacttctcgcacaaatctctgttgtcgcaatgcattctaaagaatgaaatattgtgagccaataaatacagaaaaatataggtgattgagcgagtatgacaaggtaaaactcacacagcacaaatatttgcaaaataatcgcagataacaaaatttcgctctatactgaattaaaatgagaagaccctaacttatttgtatatggcctcatattatatacattgttcagaccctgctaatctactgtagcaaaaacaaatgaagatacagctaatccacccaactccacaacttttcagaaacatgcagaaataatccttaaggctgagattaagaaacagattagactgttggttagttgagtggtaggcttagtcagttagaattccattgagctattgtaatcagagtgagaaacaaaagacaaggcaaagaagaatttatggaaagacagacatgtttcagcatatttaaaacccaaaattgagtataagatgtcaagtaataccgaagctgcagcccttgtagtcatcgtccgctctacagccacgggagcaagggtcggctccacagtagatgtatgtgtaagacaaggctcaagatcaatggttccaccacctttctgaaaagtttaaaggtaagaagatacatcaagattataacccagtggtaccatgaaaaatctgtaatcagtaatttaagcatcttttagagtgttagaaagaacccatgataaatggaacagaatatataaaaatctcagcaatcactaacttgtcaaaagacattaaagaaataaaaaactgactatcaacttttagcaccttcacaatgcaacacctttcaacacggtagctacaaccaattgctgctccccacgcacgagaacgaacgttgtttctcagggtagatacataacctaataagtgctagaattagagtaaacaaagagtgtatacacaagtatgtaaccaaaatggcaatagcataaagtggaaagaagaaaaaaggtgtttagtaactacaaaatgcaatttttcatcccacaattccccaagcatgtgcatgatgatgaccataaactattggatagacaaaagaaagaattctgttaaatctattaattggagcttccttgttaagtgattataattgtgagtgaaagaccccagattataatgtgtgtagtaccacatataccaccctatactaatggacaagaaaacaaaaggtttgaaacacaaaacaaaagaatagaagtaggtggaaacaaaccaaatagaagctaaagtagcaaaaatgaaaaatatttggatcattggcaaagggctacaagtaatgagaagttaatgtgcataaaaatcaagtacagatgaatcctacttacaatcttgaggaggtagcaccctgatagtggcacgcaactcctgtatagcagaaggcggaggagaagctgtggggcggcagtaaccagtatgcatgagaactgtaatgcgtaattgtgatattagtactagacagttttctcataccaccagggtcttagacaacattaatataaaattaatttcaactatcacactgacataccggccacaagatctgagtcatctgtgtatatgtccgtcccccaaagctggccccctctaacctgcacataatggcatttttaaaaaatcatatatagataaccaaaatttgcaacatcagtaaaaaaattcctcatcacaaagcagatcatacttggcgatttgtggcagtaacatgctcagctggtatccgtatttcaagtgtaggtccactacttgaactttccccattcttttcagtttgtgatgcttcatactccttccacaaccttatcaattcttgcatacattcaccgactttatagaccacggaggaaacctcagtttttcctgtaactgcaagcaacttaagaggcatgtaaagaaaactaacacctaaaacacaaaatgtgatagaattaggtgtccaagtatgcaaattaataaaagccaatgtcgtatttgcaatacctcatcaggtataactataagtataacctcacagtagaaagcagctttttactaggattcaacaaccagattataatatcatcacaatcctaaaagcctaaaactgatttgaaaattggtgataattaatgatgatcgaaaatttaatatttttattaaattttgggtgccactgtgtatatttctaagtacaagttgtgttcagatttacccattttcaccgtctacaatcagccttcagaatctgaagtctagtacctctaaagaactaaccatgttatttattcactatataacctttgcatttccaaaaacatacacacagacattgcagaggtaaatcagggatttcaccagggcatcacttcctctgaaattatggcaaacttaaaaagctccacataatgtaaatgattatgacaactcaccttgagatctgccaccaaagaaaacaatgaaaaagagaacatcaaaaacaagtaccaaaaaaaaaggaagaaaagctgtacaataaacagcataaagatatatacttttgatttcgtttaacctttgaaaaagaaacaatgtaccaaagcttctatttcctggtccaccttatcataacctttatccatatccagttcttttcaataaaaaaaaaagagtctaatccccaatatccctgatataaatgcagtgataactatgcaattataatgtgttcttgatgttgtattccaaatcgaatgcttatgaactatttttcacaaatagcagcaataccatttatgtttccttaaagacaagaagctataaggaacaagcatgatatagaaaccagactacgaggctatatcttaactaaaaattgataggtttaagtatgcttagcagaaaatcctgtagtctatttcccattccagtaaacaaataaaacttaatcagtgaacttatcacatgtgcaaatgaaaaaataaataaaatatggaaaaggaaagaaagtaccacatacccttcatgatcttgagtacgattcctaaaacggggctcacggtttgtcacttgagggctaacccgagaccgttgcattcttttacgctgttgcactccataattattataaacttctctttcccgttcaacagtcccttcagcatctgcacatccatcatctgattctttttcaaatatcctgctgcgtttttcaggtctgtctccatctccatcaccatctcgttctttctttctgtctctagattctttttctgcagttttccagctctcagattctttatgtttcttttctgacaataaattatccggctctggcagtcggttggatcctccatccccgacatctttgtcattactctctttgtctgctccaggccacaagtctctcttaatagggtccttttccctttcttttactctttccttatctttggtagggtccttcctctcccacttctctgcatatctttcctcctttgccaagtcttttacatcattactcgtattagctacttgcatagtactcctacgatcaatcctttccctctctttatccccccaatcccggtacttgacattcatatccttccttttcctatccttatccttcaatttgtcatcaaatttgttctctccaacagcctcatggggttctacatgatccttctcctcggcagtggaaaaatcctttccaaactcagagggatccgtatccgcaagtgagtggggatcagaaaatctttttcctacgtagccgcgaaacacccctgaatctttccgattcaagtgaactgcagagacagaataagcatccttgtctgtctttgcttcactcttaacatcctccctatcatgtttcatctctttactctcatgccttaaatccttggggtcaagcttgcccctttctctctccctgtcctcagagggcagataaggattaggaatgggagtaggagtgggagtgggagcagcaggagtgggagtaggattgagactggaaatggtaatggggtttgggttaggattgggtttaggactgagactagaaccaagactgggatttggatttggattgggatttggattgggattgggattggggttggggttggggttgtctacatgggcttgagtttcagataaatatcgaaaaagggcagaaggtctcctctcaagatctcgaggatgagtatgaggtctaatattgagagggatttcataggtagtgggatgatgatatgcagtaacagtggaagaatcttcatgggaatatttagtattattagtattagcagtaacagtcgaagtttcttcgtgagatcttttaggtgcgccgctcatactatataatctttttattgtaaaaacaacaataaatgaataaaaatgttccgaaaattccaaaacagagcatgcatttgatgttgctcacaaccaaaccctaaacaaacaacaaaaatgcattcgtattcataatcatcataatcatattcaaattcaaattcatattcatacagttacagctcatcctaattaaaacaaggaaaaccctaaagaaaaatgcatagaaataaagagagaaagaaggttactttagttgcagaacaaagaaactggaatttgatgatgatgatgattatgtttgcagaatcaaaatcaaaatcaaatgtataaatctctgatttggtgaattgaattgagtttgttgtttttggtttacacactcagtctctctctctctctctctaatcttttatatgacttgtctaattctttccttaaaaactaaaataagagttttttttttatatatttatatcctaaaaagaaaaaagaaaaaaagcaaagcccaacaaaggcccattatggacattcctttccttaaacgacaacaaaaatataatctaatctcttccaatatactacactagtttaaccttttaacttttaagggtatgccagtgtcttttttctataaagggataattgggacaaatattactcattttgtaatactaaaaaaacatattatggttctacatggattagctcgctatgtttttcgggtgaatagagaactagtatagtttaatgaaatttttcttttattggagtttcttaatacttagagtttctaagttattcatggtacaaaaaaaatgttagaatattaaataaattaaaaattcaagacaaaaatataatgatttgcagattttaaatgtatttagggtaataattagtttttacaagcataatgtaattatgtagtagtttaattttatgcagtttcttttatatatttcataaatatgaattttagttttatttaaaagatcatctgaattattttttaataaagaatatgcgagaaatgagaacattaaatgctaatttttcattccatgtttattgtttaatactaagttaaatcatgattcatgagtcgctataataaaattgtaatctatatgttgttaatagttaatatcaatgataaagatttcgaacaaatttccttaaccaaaaatccacatacagaaatttagttaagactaataattaaaaatcgaaaattctacttagtaaaaaccaataataaaagctaaagatactgattaaaaaccgaaatttcacgtagaaaaagaaaaaaattaagtacacttaatagtaatatatacatgaatataaaaaaaattaataaatgaagcaaaagtttcaaatttttaactattggaacttaccttttgttaaaaatggtagatatatta

SEQ ID NO: 185460 - DNA, 2252 bp, Cannabis indica
ttttttaaatttaaaaaattaaaaaacgtaacgttagttagtaattactactactaccaaaaactaaaattaatttttaaattttaattacccaaccctttaactttaattaataattactactactactacacgtacgtacaaactaaaattaattatttattatacaactaatagtaagtaaaaaaaaaaaaaaaaaagtaaataatatatttacatttttaaaaaaaaataaatatattatttttcaaaaataaataaatatagagatataatacctgaagaaatgcgatgcttgaggttggaggaggtggatttctgagatttgagatctaaggttgaatcggaagtatcaggaaggtgacgatcgagacgaagaagactacgatttttataattattagctccaatgagtgtacggacgaatgaggcttccatggagttcaaatactcaaggtgtttctcatccgtccatgtctggttcccggaatccatttttcagatcacgtacgatgccgacggccaaacctcctcaatctgatcgatcttttatatatattattctctatcaatgtctgcccagcttttcaaaatttcaaccgatattgtatatagaagaattgtaaagtgtgatatttaataatatggttatggcggaagaaggggtcttatttgggtgcatctactcgccgtgttaggtcggtacacaaacacaagtatctgggctttattccaattaaagcaagtattttctagtttctactcgaaaataactaataataataataacaataataattcttttttttgaaagatattttctttgaaaatgttgatattttttctggtaaactattataatactatgtctgtctttatcattaccacatgacgcgatattatttttttatttaattattatagcttaatattgaataacaataactaataataatatctttttaattgattattgtaatatatatttttaaaacacgaactttttcttaattgcctcttttttttcttccttgtattactaatcaattgattattaagtaacgaaattgcattatacatggtcaaaattggactttttccaaaatgaaatcttaaaaacgtgattatgttagggaggtggggtgggcataataacaggtggaccctaatatgaaaatatcttgggaactttattatagctacggaaattgctttagaaaaaactcttaagatattttgtgagccagccgagccgagccgagccgagccgagtaataaagaatcctcttaaaagattatcgaaaacgaagatacaaggtgttttcttaccaaaaaaaacaagttgttttaatttaaactttattttttcttttaaacatatatatttatccgcaatgtagggttgagattgattttaattacgatgaaattttaatagtttttttcctttactttttgatttgttattattatttaattaatgagatatgttttaactatgctttagtatgtttcgttaaacttcaacatgatggacaaaggaatagaatatcctataataaataataatactattcattttagttactttttccatggcacgaattagttctcttttcccgattgattatatatggaattatattccacatccaaattaattataccaaaaatatcatgcataaagtcattccaaaccccattattttatttgggacatgatttctttaatttataatgtttttcttacatttgttactatactcattttcttattgacatatatttactatataaaaatatatgtgctttttaagtgatacatatttgttttataaaagcaacttactcaaattaaattatacaatttttttcttctagaattaaataggccctatcataattaatatacattgttaattacatatgtaattgaaaaaaaatattttatattttatttatatattattgagagttgtatacttttttatatattagtaaaaagttacgtgcaaggcacgtatactaaattttatgctaggtatcttctactttatttaaaagtgatacaattaataattgacttactgcttggaaaatggagattgggacatcccaaaactacatgatttatttgacaaagaaacggtgtccgcaattgccaaagggggaaagccctctggacaaggaaatgatagatgggtgtggacgttggagaagagtggtcgatttacaagcaaatctgcttatct

SEQ ID NO: 185461 - DNA, 4102 bp, Cannabis indica
ttttttctaattttatccgtacagattctgttattattttaaataagacacatataaagtccaaattctagattattgggtctagatagaaatatatagtatcaattactttcaaatgttcttttaataaattcaaaacagagtctacctaacgaaactggaaaaaaaaatgcagttttacaaacattgagtttataccgcttacaaacctcaaacattgggtttatgccgctatttaccccaaataataattataatttctacataccaaaatggaaaaagatgcaccaaaaaagttcctaaaaccagtgcattctttgttaaggatttaactatagaattattgctgcaaaaactactataacaaaaacaaagaaactctacaaaggaccttggcagcaagtaccacaacaaacctatttcaaacacattattattttacatgcattattgctacatattccatagtcataagaagaatgatcaaatctgcaaaatgggatactctttattttttgctgaaactattaagaattcttgaaattcaaagtataattgcttctgtttctctgcagtggagacacagattcagtggttccagtcactgccactaggttctctctcagtcatcttaacctcaccacaaaaactaggtggtatccatggtatacaggaggacaggtactcaaaatattatacacaaacatattatgagatattgttatttctaaaaaattgtgaagctaaatatttattatgctaacttcataggttggaggatggacagaggtttacaagggactaacttttgcaacagtcagaggagctggccatgaggttccactctttcaaccgaaacgagctttcgttctcttcaaatcgtttttggcagggaaagaattgcctaaatcttgacagtggaagagtttcaacaagaagggttcataggtttgaaagagatgaccataaaaatgaagcaacttatagatatagggaccattcattcaagttcagtaatgatattctcatgtaattcgattctgtcttgtatattctggtaaattgggaatgcaagacagaaatttaaactaaaaattattcaatgcaagacattttccaatcaccaaataaatctatgattcacttattaaatcacaacgataaataaaaatctaatcagtcaaaatgaacaaccaggagaggatgaagacattgacacattttccctgttcacatccactatagtgtgttctttctaagtggttcaaagtagtgaaacaaatatgcaacattcatttattagtattgagaccagagatatataagttcaaaaacctctccttctgttcaaagagtaaattaaacaatgcttaacttatcgcccttacagagttagcacttatgtctggtttgagtacaaaattgacattttatattagacaagtaaaaggggggaaataattacttcagcgcatcatttacattgaggccttgaggcattcctaaactctgcgcaagatcactcattctctccttcatagcctaaagaataaaagaaataagtgaatattttcgtacctgaaaataaaaaatgctgtgaaaattctctcgtagtgacactaaagaaatcttaccaagacacttttctggtgtgcatctttgtatgcctcggtgactagaagagaaagtttctgcattacaaagatgattaaataaaatacttccttaaaaatatcaggtcagtgtgtcaagctagtggtgaggtggtgattttgagtcactattaacatgcccgtatgatgataagacatactgcttatgaaaatgacttgaatgactaatacaagtgccaagacatccattaaacacaatgacatgcaatttcatcttgattaaagcaaaacaacaaggtcaagtatactgagaacactcacttctggtcctaactccattgcagcttcggtgatctctgtgcgcacaggttgctggttcccagatagtgttacctaaatggcatcagcaatcagttaaaaactttcttaaaactttaaaataaggaaaaatgcacataaatgtctgatgaaaacttataaaatagtatgcttctgcagcattatgataacccccgacagtagagagagtgaaagtcatgattttgcactggaggaaaaatcaggctcttcaattccttaatgcccaaatttcaataccacagttctaaatctttgattttaccatacaaattgaaaatgacacaaccatttattaaataatatcagattgcagtataaggtggtaagaagatgacatttctagtaccaaaaacaactagaataaaagtaagagagcaatacctttattagttcgccttcacagtaaccatcaaactctgctctgcaacacaagaagaaaaatggcaaaacttagcaatatagctaggcatgtaaaaaagctagagagcaagattgcaatgaatttgttaatgccatacgcagcaagttctttctgcactcgtactgcttcaacttggacaaccatttgtgccttcttcacagtctcataaagattctgcatgtttccaaaaattcctgcctaaagtagattagcataaacttagtgttagtctcatttaacagtttcgaggggtgcaagaaccaacaattctttaaacatggacaattatagcgataaacatggtgggtgttcgcccaatctcatcctacaaatgatgcataataccctaaagacatgcagtcaaaaaatatttattcgtccgcatataaatgcttaaaatgtggctactatattgcattgattttcatggtgtacagaaaattaaattaaaaaatttgtagcaagctcatagaccacttctcaagaagccaatataaaccacactcattggctggttacaaatgttcatgtatcaaaaaggtaaactacaagtgaatatataaataagtaatgcgtttgcacagagaaaataacttagtcgactatatcaaaaatggttgtagttttttcatgaaaaagctcaaagcatgccaaaatcacaattcttccatcttgatacaatataagaagctactttaaaatagtagataaattgagattaactatgttaacctttgcaggggcttcttcacccttatcattattgtccttctttcctccaaatagaccataaacacaaagagacctacggttttgcttaaaacttcgatatccagaccaagaaatctgcttaccaactacatttgcagttgaatttacattacctgaaaagcaagaacgagaagaacaattcaaacaaaaaagttggcatacaacttatatattccacttccacagacctagtagtcaaacagctaaagcataattccaagttctaattaaaaaaacattgaaaattagtaaataatggcctttgcaatatgatatttctcccactatttcattgaaaattagaaaatactaaaaaaaacctgaaaagtagacttatgaatgcatagtaaataaaatgagtttaggtatttgaacaaaatatgcatagatatagtaaagtgaaatatcttctaacaagtaagcatggcataatttgcttcaataatggtttttccttatggattgacattgaaacagtaataaaaaatacttcaattaagttcaaaatcccatttcagggagtgatataaattttcaaccccaacaatagtttaccttcaaagcaaaggttttccacacatacatgaccctaaaacctactcaaacaaactaacacacaaaaaaaaaaatgaaacttgaaaaggccgaattctaaaagctaaataacaaacataaaaacccaataagtcaattacttcatcaatagcataaacatggagaaaaagttcatatcatatggagatgaaaagaaatcaaaaagacccatcctttttcaaccttttcaaattaggcaaacggacattaaagagggaaagagttcttacacagtgacattgaaatggagccatttcttctccactcagtgactggtgggtttgataggggaatcgtcgaagccattttcagagttcggattgagaagagagagagagagaga

SEQ ID NO: 185462 - DNA, 3763 bp, Cannabis indica
gatctttatttttgcacttattaacttaatttatgactttttagcaccaaaaaaaaaaacccttaaatcatgaactttttctaaagtaattaaaaaggccaaaaataatttttaggtttgcttgtttatcattttccatatcgaatttcatcacgtaattttatatccatgcttattaatatgcgcatgtatctatcttcagcttgattatatatatatatgtacatatatatatatatatatatattagtatttaattgcatgttttaaatatttgtaaaagctatacccataaatatatatagaactaaatagtagaaggaaattaataagtttggtctatagtagctagtgaaactgggtaaaattgagatgaatccaaagttccaactttgtatgttttggttttaaaatctcaagtatactctaagtatactctaagtgtgctataatgataaaacaaatatatatatataaaaataaatattatgtatttattagttagtttttttttttttttttttttttgcaaagatattttatttttagtttgaggttatcaagtagtaggtgctatatggtcaacaaagaattttgttctcttttatttattttattgattattatttggtaaacttctttgtgaacacgcatttgtaggtggagctcatttcacttgaaagtgaaacaaaatctaccaatatgccacttagcaaataccaccagtctccaataattaaaattaaaatcaataaataaataaaacgtttattatttttctttgtagataaaaacacatttctcttcttttctttcttatgatgcaacacctacaattaacaatataaaaattaccatttattattatttaatttatatctaatttacttacacattatttgatcaataacaattaaatattccattttctttttcaagttctcagtagaccatatatatatatagtctcttcctcacagagaaattaaattccattttttttttccaacgttcttatttaatcatattatatttattgtccttcatttgtcctcgtaatataatattcatttccttttctatttttaaacaatcaaaaaaaatcaataacccaaaatatatatcttttagtacgaattttgaactacatagaaaaaattatatttctttccaaaactttcacttttgtgtgtcaatttttaatgattgtttatatattaaattatatactctacagattttgataattattaaattatgtccttcaaattttaatgtgtaccgaataatgctctctaaaattttatccatattagacttttactaaaattgaataaaagttgtcaaatccaataatatcaacagtttagagaaattttttaagaagtataatttagtatatgttaaagttcaaaaaataaaaattctaattaatttttgcaaaattcaaaaaaaaaaaccagttaacttgtaagtggatttttttttttaattatacgtacttactgtatcacataatggtacatattgatataaaaacacttaaaacaaataaatataaaaccttattcttccaacaaaaaaaatgtggcaatatgtttaaactttatattcctgctcacaaatattaaatttactgtggtgggactaataatgtacttttagaaagttcatgagtttgagtgataaaaataattgaaaaataaataataaaaattatataaaaatgagatgagatgaaaagttgatgtgttggactaaactaggtttgagacaaacagtagtgatgttttatgatctgtttggttactatcagaagatgacatgaaaggcctctctcaaccattaactattttgtttgctaagcattcatccaaatgtgggttttcattattttcttcaatttcatcaattattatttttaatgttattattcaattcatctaattaattgtacattaccaaccttatactctattattataattaatatacacacatctaactacacccatgaaccaactcaatatagtgggaaaaattaaaaaacaaccaaacaaatataagatgatcaccaatgggatgaccgttagttgctttaattctttgatgtttgactcttcatcaactatatattaaaaaatatatatgtatatatataatcctttctagaatgttataactagtttatttatataaattaatataaataataaccatgcattatatttacatgcaccaaaaacaagcaaaattaaaaagatgtttattattaataataatggtaaaaaggtacttctaatttgaatgtattctatcttcatgtactacgtatatatattctatataatcaataacaacatatgattttgatagaaattatgttaaaaattgtaaggattatttaaaattgaagacacttttttatatagatatagactttgtgttttcactttaattacatttcaatatgtgcaaaactccttgtttaaataatgattacatatataataaagggaaattatatataaacaaaataataaaaacaaataaataccctttttaaggctactattgtctaataattgagttgacaccacaaaaacataatattacaaactaaaacttaatttgtaattaattgaaaaataataatcgtcatttgattgtaagtttaaacagaaaaccaaccaataataagctaaccactatttcaagataattattagttactaattagaaagaaaaaaatgagaataataataaggttgtaacccttttaagggtcttaattaacactaattaatacctattactttatttggttgatcaaaatgatgaaaaaataaaacaacagcaacaactttatgtaacatgtaagaaattaacaaaatcagagaattaaggaataaaattaaaatcttagttataagagaatatgtaattaatattaatagagtaaatcttatgtgtgtgtatatatatattatatatatatatatatatatccacctaaccgggcaaaaacgacgtggtatcaatggaggttgtcagtctttataagggtgagattgtcagtcatacatgaatgcaacaaggccagaagacaaagattttaactaagaaaaagagagaaaaagagtgaaaataattaataatggactcttccataattcgacttattcttgtgtttctggcttgcctttcttcagctttggttgaatgtagagtccgaaactacaaattcgatgtaagttctaacatatatataaattaagtttttttaaaaaaaagaaaaataatttattattagctattttatgacttgttataatttgattaatcaatcacaactctatgtttttggttatttcctcgaaaataaaaggattaatgaaagtagtgcttttaaataatattcatgttataaagttgaacttttacttctttttttttttaattttctttttgttaatttaatttatttcaaattacaaatacttcaacatcgattgtagccaataatgagtggtatttgatcagcttaaagaatttttagtagagttgaaatgattttttgaacgttgtagtacgtactatattataattatccaataactttttgcattgaaaaatcaataattgaatgatttttttttcctactacccaactatatatatatatatatttatatacactaatgtgatttacaatcacacacaaatatataaatacaacgaaaataattgtataataaaaacg

SEQ ID NO: 185463 - DNA, 2604 bp, Cannabis indica
aacgttctgctaacaagattgttcattgtattgcagattgttcattgtattgttcatgattcttatttataattcagatagtaaattttaatttggagaattgcttttattgaacttttttttatctattataatagttaattgtttattgagtaatgaattaccattcattttaaaattatatatattgtataattaatttttaatttttaacccttttttggtgataataactaccaatttattgatatagtatatcaaacttttttatatatatacatgatacatgtgttatgggtggagttgaccgagcccacaacctgccactcccacatggcatgtaggatatgtttataattataaccatgcatgtctgcatcatgagtgtgaatgcatgaacttaatctgcaaacaatctaacaatgcattgataatgcatgcagtcacgtcgatacatatatatatcccaaaaaaatacaaattaaaaaaaaacgtggtacattctagcttgcagtcaacacgcatcgcatactcgtccgtctctaatactcatctcattttctaaaacttaattacaagtcttttctacaaattaattattatccactgactgagggtaatatagaagaaaaaaataaaataggggaggaaaggaaattaataataatcatatataattttgtttttcatacataatataaatacatatgaaaacataacaaaaataggagagctacagtagtgagaagagaaaaatcatacagttttatatacaactatttttgaagaagataggcagtttggtcctgcttttgtggttcgagaattgatagcaactacaattcttgttcgcaaggggttgtgtatgtttctttggcagaacggagatcagtgaggctcttagttagttgaaaactaagagttattcgagagtagaggttgaattagatagtcttgctacgattcgaactattcgtagttcttttataatgctttatagatgctttatagtattagtttaatggttttttttttttttgaaatggttttagtttaatggtttaagattgtaaatatttattgtgttctttaactaatgttgttttatatattttttaaatgttatgctaattgacttgcctatttttttatgagacaatctcaatgttatattggtcataaaaagagaagggatattccttgtgaactttatgccatcattttgagtgattagctattaaatgaagatgaatttcattataaaaaattaaaataaatcaattatctaatgcagggagtaaataaaaaataaacatacattcttaatactttagatcaaattgacaaaaataccttagataaaatataaaagctaataatactaaattgataatcaaaataaaaataaattaaaaaatatatacaaaactacgggaaatatatattttataggaattattttagaaatacccacaaacagccaaaagtatatgtttttaaggaattttaatttttttttttatatttgtaaggattttttttttcagtttgttgtttatacgttgtgaaaatttaccataacgatgcgacaacatcaatataatgttacaataatacaaaactgtaaaaaatgtaaataaaataaaataaaagttcattaaatgtaaatgaaaattatttttagatctattttgtaaatttccatctccaactcgtgattacaaaaaaactaaataaaattccacatatatatgtaaaaaaattagaaaaattcataataaaacagaatttcaactgcctgaattgggtccaatatgcttaggcccagatcaatattgggaggtgggcccatgaaaattttgtggagctcgaagcccagctacccaagcccaaaaacggacgtgcaatagatgaattatgaaggtgaatcatgatcgtgcgtcgtacgactgagcgcatagtcctcttcttttctttttctcccatttgtctcttcgttgcatcacatcccattctcaccaaaaagtttatccaattttttttcttcgcttccaccgttctacactcaccaaattatctctcaattgtcccaagattgaaaaatccaggtactctttctcaattttacatgatcaatatattcatctgatacatgaatacgagtctgtcactgttcgttaatcggtctgtttggtcgcttggaaaacctcacatagataaaatttacataacggaatactcaattatggattttgattttagactctgcagttgttcgtgttgatattctgggagtttcgtgattaaattagatttttttatttttttttcctttaacaaaaaagaagaagaaatttaatttgctatagttaaatctaagttaccagaaaaaaaaaaaacaagaaaatatcgataagaaatttttatgaatattaattgtgacatatttatattatgtatatatattagaatgtttttgtttaataatattaaaatatttctaatattggtacaaaattatttaaattgattttgctttatttcattaagtgttcgccgactgtatattatcacaaattaaaatgtgataagagtaaatattct

SEQ ID NO: 185464 - DNA, 5022 bp, Cannabis indica
tctctctatcttctactaagcatgaattgaaaccaagctctttggttagtgctctgcttttccttcccctgcaaaaaaaaaacgctttctttttccattttctcagtcgctgctatggactgaccaatcacgttctcgatcttctttgtcaattccctagtttcgattttcttccgttttcatgggtcgtttttgaacctgaattctgaacaagctttagtaacgctaaagtgggtagtcaataataactttcaatcccaatttcgaaaaaaacaacaacgaaacaatatgattcacgcaaaatcagactcggacgtcacgagtctggacccttcgtcgccgagatcaccaaaacgaccggtttactacgttcagagcccatcgagggactcccacgatggagataaatcgtcttcgatgcaagcaacgccggcctttaacagtccaatggagagtccttcacatccttcttacggtcgccactcgaggacttcctcggctagtcgattttccgggaacttccggtcgtcttctggccgaaaagttagccggaagagaaacgagaaaggttggccggagtgtgatgtgattgaggaagaaggaaactacgatgagttttatggggacaaaggagtggccagacggtgtcagattctgattgctttgcttggctttattctcatattctctgttttttgcttaattttatggggagctgccaggccttataaggctcggatctctctcaaggtaataagctttattaaaatattattactatgaattgggttataatagcccatgcctttatttaatggtgtatttgaagttcaccttttggtctcggatctttgattataataaacttcatagtacatacaaataagtcaaaagggtggtgtgtgtgtgtgtgagaaagattgagtatttttttaacaacttttttaattgcagtcattgactgtgcataatttctactttggggagggatcagacatgactggagtcccaacaaagttgctgacaatgaactgttcagtaagaatgagtgtgtataatcctgctacatttttcggcattcatgtgacctcctctcctataatccttatgtattcggagattgcagttgctaaaggccaggtaattcataacactacttttctcctctaactaactaaactcctatattttcaacgaaaaagcaaactacttatttcaaacacaactactttccttgaaactcctgagtggttgtcttattggatgtaacttatggttatggattgtatttgtagttgaagaagtattaccagccaaggaagagccaccggaccgtgtctgtgaatcttcaaggaataaaggtgcctctatatggcgcaggaggtagcttagcagtctcagacaacgacagcgaagttccgatgactctggtgttcgaagtacgatcaaagggtcatgtggtgggaaagttggtaaagtcatcgcaccgaagacgcataacttgttctcttaatattgactctcataaatcgaagccaatcaagtttaagcatgattcttgtatgtttgagtgaattacatctatagcagcagttctcaatggaggactaagtagctgtttcttcttactagagttatgtgctccccctcatagtagttgaaattgttttgaggtaaaattcattgatatttattgatactagagagagagagagagttgttcttcttttttggtcatctgtaatgagaagatttttgtctcaatctttgtagtaataagttaatacagtctccataattaaagtcatggttaaaacaaagacaaaatttaagcaagctaatggtcaagactcgaattgttatttatttgtgtaacttagaaagaaatgctttttaaatgcactttcaagggttgactttatatttcatcaagtagactttttcagttttcaaacaatggtaaaattacatgttataatgaaaataatcactgagctgctggagcaatctcctgcttatccacagcacaaccagtctccagaactgtgccaccaattctctttggaggccaatagcgaaatatcgatcttcctagtatattcttggctggtagaggacccctaaatcattacaatatttgttgaaaatcagaaagcgaagaaagaaacgcgaaacaaatttaagattcttccataatgtgacctcataaaggtatgagtttaagatgcattaccaaacgtgtgaatcatagctgttattgcggttgtcgcccatcacgaagactgaattttcgggtacacgctgtattgttaatacttcttggtcagtttgttccaaatcattatgtctatgtttcagaaatttctttgtggaaacagaaaaatagaataaatcaataaagaaatatgatacgcactacgggtgacatgttgtaagaaggtgactcaaggatgaacttctcatttctttctactccattaacgattagcttcccattacgaacctgaaaccagacagttccctacagttagattctagttaccgaaaactgtcaaagcaaatatattggaagagaaaagtgaaagagacttaggtcaacatatatgcttaatgcatgaacatgcaaacaaaaatataatcaaacgggttaaagattctctgtaatggctcacatttttgtaccttttcatattttacacaattgacaaatacaacatgacattcatctaagctaaagaaaactatcatttaacgaaaacacaagcaatgctaacaagagatggagataagaattcatattctttagaccactgtacctacctctacaatatctccttccttagcaacaattcttttaatgaagacatcatcgtcagtgtagcccacttcttgaagagcaggcggacttttgaatatcacaatatcattagcacatggctttctgaaatagtaagagacctgaagaaaatcacataaatgattgttagacaatgattcaaaactgcgtgttttacattgaaaacaaaagaaagcaattttttcaaaagtttcagttacattattttcaagcaattgtatcaaatagagaatcacttctgtttaaaaaattttaaaatgctcacaacagtcctatatcttcattttatacttgaggaaggagcagtgacttgagtgacgaattggaatttgcacttgttcacaaagccagattatagagccccaagggttggtctagtggtaaggaagaatgttggaaagtgctggtaggcattgttcccttccaaggttcaaatccccccctagactcaaaatcttggggtcactggaggtctctcatggtcgaactgccagggctaaaaattaaaattaataaataaagccagattataagaagatggatcaaataactctactaaatacttagctagtttggtgagattgtgtggtagttcagagggaaaacgaatatggaagctacaagttcagagataccgagttgtgaggctcatatgaatcttagttttttttttttttcagaaagctataagcctaactggggttcaattgttactttatcaagtagcccttagtcctagctggggttcgaatcccagatcccatgccacacacactcaccaaaccacacaatttctgacttatagtccacctaaggcacagcttttcaacaagtagttggctatagggaagtcaaatactcaataggtgtggcaaaaggcaaaggataatatatttttacggttttattctcgcttggtgcatctcaagcgaaatcagagacgaagaatcatttcttcattcagtttcccctctcaacttaagtattggtaaagcttcaaggcagtgcattgacttgtttatagataaaatcaaatggcagtatgttggtccttaaatctagaaagatgtaaatggacctttgaaaaattagaggattgtcccgaatccttatggaataggtggcattgtgctcctataatgccagccaaataatttaacaagcgcatgttttcgttaatcaccataaatcttatcctttaatttcataattgtcacaagaaaattataaatgacactgtatgaccaagagaaacaccatttcaaaaatcggatgcattacacacgtccaacaggaaaatcgtttgacttcattacaatcattacaacttaaatctttgtgaaccatataaacactttaactcacaatagattactgaaacaaagaactcattattcatattaacccccaattcccagaaaacagtgtaaatgaacagaaagaatttatgtacaaattaccttctctgcaattacatggtctccgacatcaaatgtaggatacatcgacaaggaaggaatgtacctcggttcagccacgaaagtcctgaaagcaatcgaaactgctatggcagcaaagaccgtctttgcatcatcggaagtaaaattgacccagtcagacaaacccccaccttttttctccagctgcccatcacccccacccccaccgtcgccgccacttcctcctcctcctccgccatcatcgacccctccactgtccactgccgactttgtttcgtcgccagagtccttgacagcattgcaacgaagaatatggaagtgggttcttggattgacgagctttaaaccaagaaaagcaggaggtttatatgtggaataaggtgaagttgaaagaggtgatgtgaaactagggtggaagaatgtgaggggttgggtgtgagttgaaatggagagtttgagagaagataaaggagaaatttgatgcagagagtgcatattctcttcttcttcctctcaaaaagtggaaattgagtggaattcaatcctcaaaatctaagcttgggtttgggggttatttgattaatttaattacactgcgcaacagagatggtatactcttcttcacccttctaaaaatacttcaatattaatcctttctcaaatttactaccatatctcatacattatttgatatattattttttt

SEQ ID NO: 185465 - DNA, 3189 bp, Cannabis indica
tctttgtgattaaactttaccacaggtttatagggagttttctattatttactttatctaatcgctttatcttcgctcactgtcgttggctaaaagcgaggtcaatacctcaaaagttgataataaaacctagaaattttcctgaggaaactctgaagctgtattttctcaaattcagcttcatattgtacttttggattatctagaaggcttcctttaagtcactaatgtgctccctagaagttttagattttacctacatatcgtccacataaactttcatatcttttcccaagacatctttacacattttgttcaccagacgctggtaggtagctttggcattgttaagcccaaatggcattatgaggtaacagtacaaaccttgtcaatttgtaagctagtgtgttcttgatcttccacatgcattttgattatattgtatccaaaatatgcgtctatgaagcttagaagttcatatccagtggtggcgtctatcatctggtctatctataaaagtgagaaaaaatcctttcgaaaagctttgtttaggtctatgaagtcaatacacattctccaagtcccatttggcttagggaccagacccagattggcatgccaaactggatatagagcttccctaaggaactctatagaagtctgcttcttaacttccgcctttacagctttggaacgtacaagatctagcagtctccactttggcctgactggattagcatcctggtatatgtttaaggcatgataaatcacatggggattgattttcatcatatctgcatggttccacgctaggatgtctttgttatgctttattgtggacacaacttgttcctttgttgttggaggcaaggtctaacccacttttattaattgtgtgggatttctctcgctgatgtacacttcctccacatccttcagtggttcaatcattctttctacccctacacatagattcaattcatcttcctctcagaatatcccctgtgctggctggacgggtactttggaatttggctcttccatttcttctcgcaccatgaaaattgatctaactaagatgttgtagcacttccattcactcttttgatcacctcttactgttccaatacttctgttgtcatatggaaacttcatgcacaggtacctgatggaagttaggaaaggtcatcctaaaatggcattgtaggttgttgaatagtccaccataacaagtgtgtaatacttaaaagcataagaagtattgcttctagctaggcccccattcagcgtatgtaggagttgaattttttctataggcagtagagaatctctattgaagccttgaagctagataaggcataaggtttgctttgactgacccaatggcttggaaataagctttaaacatgatgttgagcgaactcccagtatccacaaagattcgggatacttgtttgtgggtgacttgagcctcgatcaccaatgggtcattgtgagggaaacgtacatgtctagcatcttctcttataaaggtaattggcatatttaacatctgtgacatttgtgttggtatctgtaatagagcacacacttcccttcctactcaagctcattaagatacttttttttagcattcttggttctttcggcaatgtttgggcctccaaaaatagttttcacatgactgtccaccagaggtggagtggcacctaggggatatgggttccctggtctgggagcttatgcatttctaggtgcctagatgcttaggaccccctgaggggcttgtattcttggagcttattgggaaaccactccttgagccaaatttatggctccacattgttcaataattgccaactatccttgggctacccattgtcccagatagataatcagaatccttacccactcattgagatgggaattccttatcaaattctctatttcatcctttgaataatcacactcatttattgtatgcacgaaaaccatggtattcacaccttttgtttaggcctcttttgtttctacctcctttgtacattggaggcaggttcctgtaatgaaccatgttgtagttggcccggtagacattctcaatcgtgtaaactagattggtatattcaggatactaggcttcataccctttccttactttttttagagcttcactctgaatttgagttactctgcttctcttactctgggactggcttacgcctgactttgaaattttgtttgttggtttgtttgtgtctacccgagagtgacaatgcttttagcatgtgtcgctctaaaatcagagaaactagtctatagtgatgcataccctcaagcaactggtccataaaaagttggagttgtatattggattttgggaggtatgaaagatggaatcaagagttgcggtgcatatgcaaaaatattgacattaattgaaggtgtcgaagtcacgctaaaggcttgtgtgtaagcatcctccagattcataaaaccttagtcccttaacatgatgtttgacaaagtgttggacctttgtctttgcattttgctaaagaatagggatcctgtagaaatcccacactgtaggtcactaaattcatgtcatcattgacttttgtcttggcgactgcctccatcattcattagatataggtcttgaggctttcccagattgctgcttgatattggtcagtgatctgacatccatatcgaagtcctttacacttacgaattgcttctagaacataaactgtagatccttctagtttcaaatacagatggatagaaaccttttccaccattctttggcaaatttagaaaaagtcaaagagaaacacaaacatttcccatcatcactgacttgcgctacttgcattaatctattgtacttggattggtggtccttggggtccaccctgccctcatatagttctatttacgataatcaaaaattttttggcagttgagcctcaatgatttttttaacacatggttttagatcctcatctttcgagtcgtatatgtttccacactggtttcgggctagacggtccatgagttttgttagagcagctatttgatcctctagtcgtctgtgtgatcatctaggagttcacgtccacaaattctatatttgatgctgttacataaattgcctccgtgaggccttgctttctcaccctt

SEQ ID NO: 185466 - DNA, 3815 bp, Cannabis indica
cgttcttgttccattaactgttttctaatcattctagagttttcaatgcctctggcaactgaaagagcacaatgaaatcgatatatttacaaattgaaaacataaaagaaagaagaacctattgtgccaaaaaacataatatgcaattggcttgcaacagaattaagagactttacagacttcaattacagatattttaaaagttctactcactcgattgaaactcatattccaagtccgggtactgtgaagaataataagctggagcttcattcctatctgagtattttctgatgaaataaaaaattacaagtgattgagaagcaaagacattgtttcattctagaagagctttacaaatccctctgaaaaaaaggagctttacagataacaaaaagaaaaatatagtaatcttctgcaacaagcaatggaccagaaaatattgtatgttattggcaatggaaaaccacaaagcacattttggtatagtagagaaaacaatgattagaaacggcacctttcaacaagctttgatttttccctgtaaggcttaacgagaacccgagccccacagacaaaatgaggatttcctttagccaaaatcactctcactgtatctgcactagcaaaagttacaaatccaaacatccttctctgttggcagggaatccgtacatcttcaacaggcccaaaggaactaaagaaggaaataaaaacagttagttagcataataaaagagcagtggcaagttccatgcagtgaaattacaagcctctaccaaatcaattaactcaaagtaagcttacttgaagtagattgagacatcttcttcagtgaaagtgctctcagctggaaatgttagatatatctgccttgacccgctaacaattggacctggatcaatcttttcattccggtgatccatgtacatagcagagtcttcagccaaaattaaggcatgttgtccatgaggcctgctaatcatggacaagagtgaaatattttagcactcatataatagtcagctataaaaagtactaaagccgaagacaaagatttttacctgtcaataagccgaatattgttcttcaatcgagccagaagctttgttaaactatacccaacttttccatgcctctggctctctgtgaggtagccatcagcctgtagatatttcccatatttctcatagtacatcgctggtagagaagcaatcgaaacaggaatccctcttcttgacttaagaagctctattatttctaactccaacttctcaagtgtgccaggtgagaaaagatggtcgtcattagcataatcataggcctgagaaaagctttcaggaatcactttcccatgagaatatctacagctacttccatgtttacaaaatcccttgatataataatgacaagtcttaactggaatctcagaaagaccagaaagactcctacttgttctaccattcaagcctccaattccaacatctggatagtaattgtccatacctaatcctgatactcgagaatttatttgctccatctaatcctctaaactcaaacactggtagtttttcatgttccaagggtgagtcacagaattccatttgtaaaatctcagagttctaattcttaacaagctgtggatcccaataaggagatggtatttgaaaatttgaaaacaatttaggccttgaaatagcagtagaagagaatggagagaaacctgaagttgggtttatggaaggtgacataggatttgagactgacttagaagctaatagttggagttcagttttagcctttgatatgatttgatgaacaaaatgttctggagcagaagccaaccatagaaactgctggtcatcatagtcgtttaaaagaaggtatcctataatctttgtaacattttctggttccagttcctgaattctattgtatagtatctttgtagactctggaaaatccatcatttatacaaggactgcaaacaatgaaaaaagaagaaatgagagaatttagtgactcaattttgaaagacaacagttgcagactcaaaacaaataaagccaacaggttctctttctcttctgccccaaaacagaaaaacatcatgaaaataaattaaataaataataataaaaacagcactaacaaacaatctagccataataacaaatctgtgatgaataagttcctattgcagattcacagcctacaaatctgacataaaaatatttgaaactcaacaagtaataacagaacataaggttgaaatacagaaggaatggaaataaaatactaaaccactctcaacatagaaatagaaataaattaacctcaaagtcttcattaggccagaaactacatctaagaaacataggagatttggcaaacaactgtagaaagtaaataggtttttggacaagttttagtaggtttgacctagagcaataaccaaaaagaaaaaaaaaacatacccagtaccaaaacaatcagtcacagtttgagtgaagaaactgtcagagtagagagattaattctgactcctgagtttcaaacaccataactaatttttaattatacacattttctgtgtacaactttctctatccaatagatatctctaaactagactgacaatgccaaacatatctcgaaaaaaatagtgaataatataccttagtactcactgctctctcatgaagttttttctttatcattatttatatataaatttaaatttaacctgataattatgccaataatatttaattcgtttcccaattatagctcaatgttgtaactgaatttacgtgaaagcccctattcaaaattttaaaaaggaaaagaatcccacgaaaatagactgacctattttacatatatatctttcgggaaacctatataaatttaataatgttactaataataacatatgcttaaattttttttttgcttaacttaaaacaaatattcggaaataccaatgtgacaaaattttgaactccaactacagatgtcggcaaaataaactccttgagtggcctatctcaattctagaccgtggatcattcttgagattcacattaaaaaaaaaattgagttccaagatgtggtcaaattgcatttgcagggattacagttacatagccgcatagaccaaaaaaaaaaaaaaaaaaaacttgaaagattgaaatgaaaatgaaaataaaaataaaaaacaaccatagctcaatcaatatattttgatcattaaccatgatgacaaggcaacttgcaccactgggtcccattgacgccttgttgatggttgtggggttcgccctatttttagtctgtataatcggtttgtggtgcacacatatcagatcatctaccataaatatatagggaaatttgattttttatgcttatatttagttaaaaaaaaatttctaagcaaataataactaatatttgtaggatatgacaatttttatgatattcctaaaatatctcccatttatatcacccctatttacaccgaaagtttattccctgatttctcagtttactggatttagactgacatgataatcagcgataggtattcttacacatgggataagtgttatgtcctttctagggcattggcaaagattaccagtatcggatgtatggagtatacatcggaatggaccgatattgaactttttatttcttaaaatttaccgtaatatctattcaattcagtattacctgttgattctagatcaaatgatcttaatcctgatatggttaggttcgatctcaaaagtattatacatgttctttga

SEQ ID NO: 185467 - DNA, 1556 bp, Cannabis indica
gatttcgtcggattcgggtaaggtacgtatggttttacatagggttattagtggagtgctaaccttcattaattacacttctatgatttggatatagacagctagatcaatactaaattataaaatttgtgcatataaatcttactgtatacagaatctcatttcaattattaattattgactacgtacaaaacatctttatacatatataatgtatatattaatttttcattgtgtgtaggtattggatcatgatcatgaacataatatagtggtggttgaatttaaacaaacatgtacgtataataacacctactaatataccattatttagctgaaacctgagcccagtagtcaataactaaaataagttatctagagaccttaattttatactaggtgggtttgtatatacatggcaataataagaccacttcgccatgggtcatcatcaaggttgagaccactaccacgaaagttccatctcatactaataatgatacttgtctctatttttgtggttactattatattgactcacggccagaaaatctcatactttttccgtccgatgtgggaccatccaccaccaccattcattcacataccacattactacgcagaaaatgtttcaatggaccacctctgtcacctccacggctggtccctcctaccaaaaccccgccgcatattcgacgccatcatcttcagcaacgagctagacttgctcgaaatccggtacggcgagctcttaccatacgtaacaaaattcctaatcctcgagtccaaaacaacattcaccggcatcccaaaacctcttttcttctctttaaaccggtctcgtttcgcctttgcgaaaaagaagattgtccatgatgtgttctctggagaaattgcaaccccgggttcaaacaaggacccctttgatttagagagaaagcaacgaatagcaatggactctttagttagtaaatcagggatttcttatggtgatatcattataatgtcggatactgatgaaatcccaagtgctaacactcttaaaattctccaatggtgtgatggtgtgccaccaattatgcatcttgaattgaagaattacatgtattcttttgagtttcctgttgactacagtagctggcgagccacggctcacatctatgctggcccttatatcagcagctatcgccattctcgccaaacagattacatattttcggatgcagggtggcattgcagcttctgctttcggttcattacagattttgggtttaaaatgactggttatagccatgcagaccgtgtgagacgtaagaagttcttggaccaaaagagaattcaaaaacttatttgtgaaggtgatgatctttttgacatgttgccagaagagtatagctttaaggaattgataaccaaaatgggatcaattccccggtcgagttctgctgttcatcttcctacgtttttgattaaaaatgctgataagtttaggtttcttctacctggaggctgtttgagagagcctaattaaattacacatttttatagatttttgc

SEQ ID NO: 185468 - DNA, 3500 bp, Cannabis indica
aatttctaactttttcatataatgtactttctattgtatagcaatttggcattagtgtagtgataataaaactgcatgtattcattcaaatcttgattttttttttctctggtaattgattgttcaattttctttatatacatctttgttatataattaagatatgagattttattgtaacaaagagaaataagttatttatataatattctgcttggtcttggtgatgattcttggaaaaaatctatacgtatgagtcgagttaattctgctctgatgtacaaaagtctttttttatatatatatatatgtaggaaatatgccgcttcatttgcctcttgctggtatatcgcctataaagaattatccaaacttctttttggaatcaatatctcctggactaactaatattttgtcacctaatcaacaacctaatgatgtctccctatgaattttcgaaacatgatgcatcaattctgggttaataatctgcaatcgccacatgtgaatattccttcggatacaggaccccaaaaatcagaagagggtacttttctaactattttcatcttctattctttgtaataaaattttattaattcttgggtcttgctctgggatagaagatagttcatagtagttatgaactctgaaagagggataaattattttttgattagttactataaatgtttgttcaaattaaggttataatatctatgcacgtattaataattttggttgttgtggtgtcaggaattgtggggagttcttctcggcatactatcatcgttacagaaggagaagtaggcattgtgatctttcagtaaatttaataaataagaacataaaaatagaccataatagtacttataagggttcctttaattttatctgatttcttatttggtcatatgcatgtatgtgtaggacattataggaaggataagatcattttcggcagagatggaagtggcgccaagtagtgtgttggttatggcagcacttggtggtgttaataatcccattttgaagctctacacaggctcaatcttagtatatgaggtataattttgatcgtcatatgtttcatctttgtacatgtactatttatatattatacttgattgtttatacaattttttcttgtgttggattgtcttgtagggagcatacctgatatttaaattttgtaacactattagtaaggatggctcaagtgagaattttgagctttctattttcaatcattctttggatggcctggccaatactgatggagttattactggagaagttaatggaaatctcattgctgcagggacaacctacgtccatgtaatggtgacgagaggagcttaattagtaccagtcactcattcttttctaggcttttacattcttcttttattatataaacattagtataactctactgtgtgcacgtatgatcacgaattcactaatacaactttgttttttagcttaaatcttaactggaattttgaacatgaaacataagctagaaattcaaatcttttatactatattcgttgacacaagattaatgattcatatatggactactgttttgttagctgggggatcatttatgtaatgtaccccatcacttcattcgatgaaattgtacattcaaataatctaatccttcatttcaatatgttttacgggaccaattaaaaaggatgtttagaccattctaaccacagtcgttttaatgcataaagagccaaatagcagctccctctctattttccaaaaaatgggtctctgttaatgagtcaatagtatcttatagtgttttaataaggttaaaatatttatattgagattatctatataatacagaatactattctaaagggctagttctcaaaacatacgctcttaatttgtcctttgttttatttatccatgatgagaatggttgacaggaactagtatagttgaggtaatttattaaaaattgacagagtagttaatgaagaaaaaatcttgaaaatctatccatatagatgtagacctttttaattgaaaattcatcattattttaatcaaagctaaagagaatagaattataagaacgttatatgtagcaactgacatagggattgcattgctaaaatacgaaagtaggctcaaacttggtatatataatcaacataaatttattccttttatcaccaacggcacatatctaaggagccacgaacttatttggtagaaagactctaaacatgtcatatattgaaataaagaaaagacggtcatatttcaaagtagtaatttatctctatatatagacactcgtaaatcaactttcaccaatccaacccaaaagaaagagaaaaaaaaaatagagagggatgaagaaccaatttagctctaagacccttttcctcattttccttcttgtgatcacacagtggttaaccattgaggccaaaacttgcaatcctagtggcaaaataaaagggaaaacgcctcctcctggacaatgcaacccggaaaatgactctgattgctgcaaacaaggcaagtcttacactacctacaactgttcaccaagggtcactggccacaccaaagcagttttgacactaaacagctttgagaaaggtggagatggcggtgcgccctcggaatgcgaccacaagtaccactcggatagcactccagtggtggccttatccacaggatggttcagtaatatgcagaggtgtttacaaaacataaccatatatggaaatgggaggagtgtgaatgcaatggttgtggatgagtgtgactcaacggctggatgtgattctgatcatgattatcagcctccatgtcctaataacattgtggatgcctccaaagctgtttggaaggccttaagagttccagaaggtgattggggtgaacttgacatttattggtctcaagcttgagtttcgttcgttataatattatcattgtgatgtacatttactcatgtattctatttcagtgtgatgtgaggctgtgtattgtttgtttatcgttctttttttcatgtttgagtttaattaatgtaattacaccttggctgttatctattcaaacagaaaattagtttagccttcgtacttttaatttgtttgtcaaagatgttataaactaaaagagcctgagtgatgcatagaattcgtggttggtacttatttgaaattgactttgtaagactagtaaaatatctgtaatatgttatttttatgtaacaattaaagtgtaaaaggggaggggtcaatatgagtagacttaaatgaattgttagctactgtagattactaaatactttagtttagaacatgttttaatattgagctctcttacatattattatccaatttttcttccccttttaatgatgttgtttggcatttcatttaacattttatgtataggaaagtgatcgttatgaccgaagtatactatctgttagactttttatttgg

SEQ ID NO: 185469 - DNA, 4936 bp, Cannabis indica
tttgtgactaatacatttaggcatagatattttagtcacaatataataatgatgattgataattagtcacaacttttttaacttttagtctcaagttttattgtgactaaaagtaaaagattttatagggaccagcaactggtgttagaggtaagtggatggtgttaaagatcattttgaaagtcttagtagagtccatcatcttatggcacatacttaactatcggaatattcaagaagaatacaaggcgatttcttcttcccaaatgaaagtctacttgcatgtgagctatggaatagattaacaattcctaaatatagatttgttcttttggattgatgtgttggataggctgcatctaataactaagttgttcacgtataatatatttcaagatgaattaatttactgtgtggaaagtagaaaccattgagaaacaaaagaacatttagggtttttaaatttggaataaaaatttagtattttttgcacccttttaatgtttaatggctgcatttagttgaagatgttgttatatatatttttttttaattattataaacgatttagttaacttatttttgttgatctactcgatacacactatttacagaaatttagactttctaatattaatgactttctcattatttgtcatggattcgcctcattattccaattccctactttggttaattgtattagtgtgactcacacttctagattttgtaatatgagcgcacatgcttttgctagttagtgattggattctttaatattgacttgtaaagaagaatttgcctccctcttctaagtttgtttcctagtgttggtgcccgatgatgaaatgttttcccctagaaaacaaaaactcatacagccaattaattaaactgcaatcaatttatttatttatttataaattaatttgtttttatttataccatgggaaattgaactccttttatttccttcttacacacctaatctcatgagctagcaccaagtggcaactgcaattaatttattaatgttagtggtattttctttctttcttatctcttgacttgaacatgtattgaaattagctacatcaaagtattgaaatgctaaaagtttaattacaaccgacatatatataggaaatgatcatcacaattcacaagagagattatatatattatatttaaatagatatgctctcatgaattattactgttctagttctcgtaatttaatcaattatttgttagtctaacatgtatatgctcatgaattaatatagtgaataaatgtcctaaattcatgggtgatcatatcaccggtccttctataaaaatcttttcttttttttttttttgattaatcatcaactttattaatgacaatcatttcagattacatcaaaaaaaaaaaaaattaagagaaatgtcattattttcaataacacgaccagcaacaagatagaatactctagttagataataagtaacgctattcacttaccgtctaataaaaataatagaaacatcatgcaattcttctaataatatcttacaatcagtaataatactcctaaaataagataatattgagagcagacttcgaatcgattgcacaactaagatactatctctttcaatacttactccctaccatgctttcttcttgacccaactcaatgcttctcgcactcccatggcctctgccattgcgggcttcacttggcctgcacgatagcaagtaattgcctcaaccaacacaccagcagcattcctagccacacactcagaattgtaagtagcaggtcttgaaaatattgctacatcaatatttatcttcaagttggacacgatcaacttcttccattgatcacaaccatccttaattgtcaaaaaagctgcagtaagaaccaaattctaatcccgtgttcgaaaccactgatcgagagaatgttgagccaagatagacaccccaggatcatttgaatccttgttcgaccaaactagttcattcctagttttccaaatagctcagcatgtcattacaatgatctgtctttgttccccatcaggcaattgcaacatatgatcaagccaactagaaaaagaaccaacattcatactaaccaccccaattcctgtttgatcccaacaagctttggaaaaggaacacacgactaagtaatggaaaatggtttctctttctatctaacacaatggacacagatctgaaatgttaacctgttttgttcgcagttgaactttagttggaagacagttagctgttgcatgccacaacaagtccttgaccttaggtggcacacgtatcttccacaacttactccaaaatccctcactaaccacctgcatatttgcttctttgctttcttgtaggaacctatatgtacttttgatagaaaagtggcatgaagtttcccaacaccagtaccaaatatctttgtctcgacttgaagatagaggaatactaaggactaaattagcatcccgatcattaaataaatcacgaaccaagtcgatatcccaagctaacattccaagaaccattaaagcattgactttcttattaaccaaagcaagatgtttagagctaaccattggttattctcatctagcagccatgaatcaagcaaaatgttgatttttgaaccatctcctattctgcagtgatcaccttttcgaaccacatcttgagattcaagaatactacacacataaaactcaaattataacccaattttgcagtcaagaagccatcagaaggatagtaacgagctttaaaaatacgtcccacaagagattcaggtttacacaacaaacgccaaccttttttgcttaacaaacttatattaaagtctcttagactcctgaattccattcatcctttcgatttcattagtctttacgttatattaacaaaattgtcgcaaattacttaattgagaaggatttccttcctactatttactattattactacctaggtaataatatccctatgtacttaaaagtgacactgctaacgtcacaactcacaaaccatacttattaaatatcatatctctcttttctttttatgaacttaaaaacttattctttattttagaaatgttttgaaccaaagagaaaaatttagtttcatggatgaaaaagaagaagacttggatatggagaatgtttcatctaattaaaataaatttgttgattttgtttggatttgagttattaaagttgtggcaagctttaaagaagtgaacttttcacttttaaatggtacattatatataaagttttggtttttattattactaacttcatcattttattgattctataatttttcttgttttgttttagatttagtaaaagcagcaccataaatttctgatgatgatttggataaaaatgtaaaagaaatagttgctttaagaagcttagatatgaatagtcaaaggatcccaatttttctaatgaatccctttattattcttagatgaggattgccaccaaaacttacacatcacttgttgtatttctttacaaatattcacaattaacaaaaacacattcataagcaagtactgtttggatcagaagctccttactcgcttttgaaagaaatttcccttcccagctttgaattttctttctcgttttttctttaagaaatccaagcaaggtcgatttatttctgcctatgatatttggtaaccccaaataggtgttattttcctctgcctctctaatacccatagttgaacatatgcccacacgtacagcactttgtgtattagaactgaaaaaaataaatgacttatgcaaatttatttgctgactgatgccaactgaaaacaattcaataagtccatcacactattagcaccttcttctattatcttacaaaaaacataggtgtcatctgataaaaacatgtggagataaccggagcaccactagctaccatacaacccataatttttccaatcgctcatagtctttaatcagtgctaaaagtccatttgcatataagatgaaaagataaggtgataatagatcgccttgtcgtaagcctctatagggaataatcgagccaacctcttgtcctcccccaataattttgtatgagattgaagtaacacatcatcaccaacataatccaatgatcgctgaatcctatctttctcaagatagcttgcaaaaaacctcattctactctgccgtaagcattgctcatatccatatttattgccatgaagccatcttttcccaagctcttcctcttcaaatagtgcatgatctcaaagaaaattaagatattatcagtgattaaacgactaggtaagaatgcactttgggtctcaaaaataacattaggaaacaccaattttaacctattaaccacaaccttcaaaaaaaaatttgtaaatcacaatgcataaagcattcagactcaaatcactcatagtttcaggtcttgacttttttagaattagcacaatatgagtctcttgcaaaaatttagggaactcatcaaaagtaaaaaaaagtgttgaactaaccacaccacgtcatgaccaataacatcccataatttttgataaaatctaggattacactcgtccggacccggtgatttattggggtgcatttggaacaatgctctccgaacttcatcatcagtcaccggagctagcaaccccacattatgatccttagaaacacatgtttgaacacaatcaataactctatcccaattcgtatctgaggtagcaaacaaatctttgaaataagccttcataaccgctttcaagccattttcccagcctacccacaccccttcctcattttcaagctcaaaatctggttattcttttttgagtagtagcaccagcatgaaattacttagtattttaat

SEQ ID NO: 185470 - DNA, 1050 bp, Cannabis indica
tactcagcaatgcctgtggcaacatctacatcaactgtctgtttctcatcttcagatccggtactggttctgtctaatgatccacgagtccctggtgcagttgggacaattaaacgtgaagtggggaaccaccattcttctggtgagccaactgcagtaattgaagctgagcaaaatttaactactggtcaggagtttgagaacttagaaaccttgttcattttcttctttttttttatttttaaattattggttactatttttttttttgtaaatggccacttggcaggtttggagactggtaactcttctgtacaaaacaaggtctcaagcaagtcccaaggggtagtaaaaggtcagctcactgaaatttcacagctttcatctgcatcaactcatgttggttcttcaaatagccgtccatcttctaattacagtagccgttcacaaccagtaattggcactccaaagggtataatattcaaaatattcaaacatattcttttttgtttcttcattattggactatcaaagagtgagaacatatatcatgaattttggcatctcaagtaatttctgaggctgtcctgccctttttgaagcattgggaaattattttttccattttgatacattgttatgcactagcgtaatcaattaatgtaattttggtacttgagcatgcttcactactgggtcaatagtctatagcctaataaaagttggtatatgaggggtattttctgtctgtaggtaaatgaaatcaattacaacaatgaggaaaatttatactttcactttttagtttacatataaatctgtatagacaagattctcttgatttatcatgaattttgcataagatttaacatttattttgaacagtggcttctaataaggaatggaaaccaaaggctgttcaaggttctggagcatgtggtacatctgaggttctgaatgctaccgttgaagccacttccaggtcacagcctgtttcaaatgtccttgagtcagaagatgcagcttcaaatctgcagagaaagctggaag

SEQ ID NO: 185471 - DNA, 1714 bp, Cannabis indica
ttgtaagaaaaaaattatatataagaatagaatatacatttggtatattaagtttttaaatataatttctattagatttttaaattactattttctttatattaaaaatgttatttgtatatataattttttaaattttttataaatatgtgtgaattggattggatcggttacttttacatgccaatcaacatccaatccgcacaagtgcggattttgaattttctaatccaatttaatccgcacaagtgcagatatctacactttgcgggttggattggattggatcgactattttatgaacacccctaataatgacctactcccattttaattgtattaataataagataatgttgtgcagatcactaaggggtacaaagtgaattctagctgcatcactcaagatgtttacaaagaatatgtttcagagaagtgctcttggatgcgagataataatttcccctattcccttaccccttgtaaattcatttcacttatttataagagggatatttttacaattagctccgtaaaaagagtaattaggaagtaaatatccctatttctagggcgtagttacgatctgttgaaggtcctacaatctcaggcaaagcagtcggatctgtatctgtagaatatagttagatatatttatagaagttgcttgaggaagaaaacaggatttgtgtagctttgtccaaccatcctgatgtcatttatcctagccagcatgttgatgaccggccagatccttttcgagacttctcttttttgatgagattactcatgaagcaatcttagacgatacattgatcttctctcatctaacagtcatattgatagcccgactagatgcttcctggaaggaagtacacaattcatggatatcagccctgtgtggcacttgcccaacacactcctgcccaaaatttccatgttatgtcaagtgttggctagattaagccatgtgtagggccacatcagatatgcgaaatttaggataatatttgcccctaagttctcatgcgaatatctgtctggatgggcaattttgacatttgtacggatgctgacatgtacgtgagctccacgtgattcatactagcgactgttataaggaaagtttcaaatcatgctttataggggatcgtgctaacgactgtactcccccataaatttattttttgctcttcccactttcccataacaattttataagagatgtacttcctaattaatttttctttgggggaaactaactaaatatgagagccctatataaagccctctctttccctcaaacctttttactttcattttttactcccagaatttttctagagagaatcaacattatacataacaaatgtattaacagttgaacctgtcatatacattaaaaaaatacaattacaatttagaacaaaaatctcacagaaaagttatccaaaattttaaaaatgcaataatgctgtacaccatcgggctcagatcagaccaccatcgggaccatatcgaaccccgttaaaaataaagtcaaaaaaccatgttggacaaaaaatgggccaacaatcggacaccatcgggtccaatcggatcctatcggacccatctaacaaaaatgtcttgaacctaatttttggatccccatcggcctaaaatcagactagcatcgggcccagtatcgagcccatcggaccacactaaaaaa

SEQ ID NO: 185472 - DNA, 3074 bp, Cannabis indica
tttttttttttacatttttgtgtaattttttgagttttgtttcgcttgtttttttaactttatttttggttgaagtagtttatatgcttcacatcaaagaaaggactttttcatttatcaatttgttgcgatgtgtttgctatcaagtatcaactaaataggaagatcatactgggtaatgcatttggtttatataggttaagcattgagtacatcatcaagtctttttttttttagttgcatactggaaatgctgatgtttgcttataccatggctaattattcttttgaccttttacttttccatacttgccagctggtgaattcttcactaatcttttacataaactcctgatgacttttttctttttttcgtgcaggtgttggaagctattacatcaaagaaatgcctagagaaatttcatttagaatctctagaaattcttggagattcatttctcaaatatgctgttggtcaacagctttttagttcctatcgaaataaccatgagggccttctaagtattaagaaggacaacatagtttctaatgccgccctttgcaggcttggttgtgagcgcaaactaccggtacgtatctcctagatttttataaggcatatatatcaatactatgcatcttattatagccaaagttctttattttattttattttttaaaatattgaattgtacatgcaaggtagtcattgacaagaacaatttcatcctgttctaccatagctgaatatttagactgctgttagcatattatatcaatatgttcagtgaaagtttagaagtccttagagaagttgacacaaaattatttagacacatctgaaatgtaatcagttatgtctgcatctgcatagatcttatttatgctgaagatgtagatttttcttttctaatgttttgagcattttatttatttatttttctgaatgccattttcttctgcttctaaattttgtgtgctaaaaggtttcactgatttgaaagtgcaaatggattgtatttttgacttgctacaattgtcttctttatgcagggctttattcgtgatgagtgttttgctgttaataactggattatacctggaactaatactgaaacattacaagaggatacactatttaatggcaaaaaaatttatattggcggaagaagaaagatgaaaagtaaaagagttgcagatgttgttgaggcactaattggtgcattccttagtacaggcggggaaatttccgcattgcaatttatgaattggcttggtataaaggttgacatagtctttaaaccatttgtgagagatgtatttgtgcattcggagaaacttgttaatatcagatatttagagtcattactgaactacacttttcgtgatccttctttattggttgaagcgctaacccatggttcttacatgcttcctgcaattccaagatgttatcaggtaaaactaatgttcagcatcattatgacattctgttagaacttttttcatgatttattgtattttaacaagttgagaattgtttttctttcatgtagaggctggaatttctcggggatgctgttttagattatctcatcacagtgtatttgtacaacaaatatcctgggatttcaccaggattcttgactgacatgagatcggcttctgtgaacaacgattgctatgcacggtctgccattaaggccgaattacacaagcacattcttcattcctctcataaactgcacaaggacatatctgctactatagaaaattttcacaagctgtcttcagaatcaacatttgggtgggattcagagacatctttccccaaggtcagtcccagtcatgtattgccaactagttttctcatttgtttcagctcccacaaagcacctactgcttctgcttttgattttgtgtcaggtacttggagatgttatagaatctctagctggggcagtatatgtcgattctgaattcaacaaggaagctgtttttcagagcataaggcctctattggagcctctgataacacctgagactgtaaagatccatccagcaaaagaattgagcgaactttgccagcaaatgcattttgagatgaaaaaaccactcaaagtgcgggaaaatggtataacttcagtcacaatcgaggttgtagctaatggagttgcatacaaacattcttcatttgttccagacaagaggattgcaaagaaagttgcttgcaaagaggttctcaagtgcctaaaagaagacctcaagttgacatgacaagtttgaagcttaagctagcgtaatttgtttttggcgatctttgtcaagtgttagtgttgctatttatgctgtggaggtaaggtaacaaagtttcaagcttttgtatatgccgtatttataatgtaattcaagtcattttgtttatataacttgagcgacatgccgattttcaaaggagtaactgcatgttgtttagttggcttgaattaattaatacagaaaaattcttgctcgccttttctgttttgagagttgggactttagaactattattattattattattattattattattatgagtaaatccgtaaaacctccaaaacttttcattttatttttttagcagtaaaattctcaaaatttatattttgttagcaatttaatattttcatccattttgaatggtggtatgttagacggttcatatgtatatctacgtagatacaatgtagattagggttttttttttttttttttatttttttttatataaatatggaaaaaattaatgtaaacttattttttatataacataaataaataacataaaaatgtatatgagattaaagaataattaaagtttaaaatataaggaaataaaaaaatcaataaatttgataaaatttttaataaaaatttcttcagaagagttactggcgcctgaaaaattatcgaaaaagtcatcaatattggaaaaatcaccaggaaagtcgtcgaaaaactcaactgaaaaagtcaccataagtagatgtctcaaatatatataagaatagaataataactcaaactgg

SEQ ID NO: 185473 - DNA, 5513 bp, Cannabis indica
ttttaaataataatattatgagtactaatataaacgcgtaatgcgtatgagagtgtatacataagtagctcatagtgacaattaacagaatgacaccttagtagttcagtagtttagaagattttactgctaaaatttaaatttaaaaaattaaatacaagtgaaactataattaaaaagactttgctgcaaaaaaactcttaaattttttaaaacttctggaataactattaataaaacttctagaataactattaatacacaataagttaatcaaatttttgtcataaagcaagactaaaccaaaataattgtagctagttaatatgatgttctaattatttaccaacgcgtttagaagaatttaggtgcctcggtttgaatttaatgcacaactttttactgtacggatatctacaattattcattttactaatacactacatttaaaaaagaaaaaaaaatatgggtgtaagtatatgttgcggttgtgatcaaggaaactcccagttaaattatgtcaaaaaaacttgcatcgaaaaaaattatttttaaaagcaaaaatcatcagttaactgaccaaaaaaacactgtaaaaattgttctgattttagagcaaactgtaaaaattgttctgattttagagcaattttaagttgggattactaagccacttttttcttataactaaaatgcagtataaagtacttttcaaaacatcaaatatttaagattctgtccacatttccaaccggataacatattacgaaaaaaaaggaaaaatcattttatttttattgtatcactttttaatgattattcctcaatacaataatttgccacaataaaaggataaaaaagaaaagaaaagcataattaataataataaaaaagattcacctttaatttagagcaaaataaagaaaaacatgggtgaggtgggggcctaaattacaggaataagattacattgaaacgccggttaagtcaaagcactccaattcccatatttttctttcactctctttttaattataatcttattattaatattattattattaattaataattataattaatcccaataatcacgaaaacactatttacttatttactaatccctccatgttggacattacacaaatccacggctcccccagctgcctttctagactcttgcctatttttttttttctttatgaaaaaaatataatttattgaaaataaatatataaataaataataatatataccgtttctattatttttttttgagtgtttttagtttttgaagacgaagaagctgaagaagacgacgaccaccaccaccaccggaagaaaaagggaattactttggttgaattctgtaattaattctgtttccatttctcttttcttcttctttttttttggggtataaaaattgaaaataaaaaattgaatttggctatggaaccgccggaggatgcgaacctagggttggatgaggcggaagagattatcttgcggtgggattcaacggcgtcggaggaagccagggagaagatgatcttcgaagggaatcgagatgaggtcgatcgttacttgctcgccgtcgatcaaatccaacggtcaatttcttcggtttctatctccgatgaccaggctaaagtcaactctgctattcagatcgccatggctcgactcgaggatgagtttcgtaacatactgttgatccatactagccctattgagactgatacactcacggatccgagttcttcgattcactcctctgttggagccgccagtagtagtgttggtgttggtgatggtgatggtggtgttgattatgaggatgacggcgatgaagataaagatgatgatgagttgcttcggagaggggattccagtaacagtgttagttataggtctactagtagtatccgtgagatcgatctgataccttctgatgctgtgattgatcttcggagcatcgctgagcgtatgatatcggcgggatacttgcgtgagtgtattcaagtctatggaagcgtgaggaaatcgacagttgattcgagtttcaggaggcttggaatcgagaagcttagtatcggtgatattcagaggctggagtgggaccagctggagacgaagatcaggcgatggattagagccgccaaggtatgcatcaggatagtattcgcgagcgagaaaaagctctgtgaggaaatctttgacggtgttggtactgctattgatgatgcttgtttcatggagaccgtcaagggtccagcgattcagcttttcaacttcgcggaggctataagtatcagccgaagatcaccggagaagttgttcaagattctcgaccttcatgacgctttgatggacttgattcccgatattgatgttgtgtttgaatcgaaatcgtcagaatcgattcggatacaggcggccgagatattgtctaggctggcagaggcggcgagagggatattgtccgaattcgagaatgccgtgctccgagaaccgtcgagggtgccggtccccggtgggacaattcaccccttgacgaggtatgtaatgaattatataagtttgatatctgattataagcagacactgaatgagttaattgtgtcgaagccttcgactggttcacggtattcaggagatccaacaaccccagatatggagtttgcagagctggaagggaagacccctttggctctccatttgatttggattattgtgattctgcaattcaatttggatggcaagtccaagcattataaggatgcgtctttagtccatttgttcatgatgaacaatgttcattatattgttcagaaggtgaaagggtctccagaattaagggaaatgattggagatgattatttgaggaagttaacggggaagttcaggctttcagctactaattaccagagagcaacttgggtaagggtgttgtattgtttgagggatgaaggtctgcatgtgagtggtagtttctcttctggggtctcgaagagtgctttgagagagaggtttaaaacctttaatgctatgcttgaggatgttcataggactcaagcaacatggttaattccagattcgcaacttagggaggaactgcgaatatcaatctcagagaagttgatccctgcttacagatcgttcttgggacggtttagaaaccatatagagagtgggaagcatcctgaaaactacatcaagtactctgtcgaggatttggagaatgctgtcttggacttcttcgaggggtatcctatatctcagcacctgaggagaagatctcagtaaatgaagtgaagcgagttttgctatttagaagctagggaaacattcttttaattttttggagtgttaggggatgcggtgctggtcattctgggttttcctgagtaatcacatatcttgaatttcagagttcaattgtgcattggtttattgaatcaagagatcatgttattatgaagatcgggtgcaacaattctccagattggtcaagtcccacagcctgaatgcttctgccttgtaagcatgttattcgttacaagttctagatttcgttttacttgtttatattggaattattgtatgtgtgttttcttttactcttatttatatcaagaagcagtttccattaacagttcgaaataacactatgtcatatcatatgttaagcttttgattagacgaccattggaaatggaatttagataagttttgtcagtcttgaaattttttttttgaacagttgatgttccttgtatacagtattcttttttattttttatttcctgtcctaattggatgcatatgaatacttttaaagacatggagaagtagtctagaataacttgggttcacttcaataaaaacaggaatacttcagagacaattttgataacagttcccgttctcatttttgattgttgacaatttcactaaaagaagtctattgttggttcaatgaattgtcaaggtgtatatcaacaggcacatatgatagtcttcgtttgtttagtcaagtttattatgtgctaatgctagaatgttatgttgaaattgtgctatatactccattatcttccatcttgaagctacagttttgtatctctgcagaattatgtattagcttcaacactgattctagaatccattcaataacatattaggctatatcttttaacgatctgaaacaatgttcagtaacacaaatctgtgttcatttcattcatacaaagagaggggtctgattagacttggtttccttttgtttcgaccttaagtatgaactatgaatgaatttctgttcccgcaaccagctagcttaacatggtcaactgctttgggctaaggattggtggttctagaattaacataatttgactttgggaatggttagtgaaagattggaaagggcggaataattataatcgtctgataggaaattttgaattatgaagaaaaaagtcatcttgttactttatcgattttaaacttgtttttgatctataatataggcataggtttcgccttaatagtctttaattgttagtattaatttgagaggacttaataaagtcttaaactacggtatattattatgtttctggccttagctaactgccttactaaaacattggaatattgtttagttgaatttgcgttgggaatattgttaagagtcaatcatgcatttgttcaacgatgcctgcaataattttaaatgtgatgatgatgcatgtgcctgaaaactggaaatcttgcaaaatttcatcaaggataaaagaacctccaattttgaatatttcccgcccttaatgaactagccctttctctatttggtcaaataattgggctaacctattcgagtttttatatttacagttatgattaatatgtaggttgggctgaaccactcgtcaactcacgtgcaagtacgaggacaagcctcaaaccgaacaaattcaagagtcaaattttgttgaagttcagttagttctttttcactagcagaaaagaaacccacaacagaaatccattcataatttgtttgtaatgcacagtcagatataattatttaaagaacctaatcgtgtgtacttcgtacgattagataaatctcttgaacgaaaagaaaatccataatcaattttcatcaaagccagttaaagtcatattcaaattcgagcatgtagtacttagtatacatctaaatctaaaaggctatggttctgagtaaagaattccatttaagcaatgatatatttttcttcatcacagagtaactattcaatctatattaagtaataacccaatgaacaaatagctaagaaaagtaacatgaacaaaaatgaacaaaaggctaaaatggcaccatctcaaagttgagttttccccctcttgtataataattactgagatggtatcaatatatcgcaggcactgactgttctacatcattctgtcttgtcttcttccaaatcaccatccacatc

SEQ ID NO: 185474 - DNA, 6028 bp, Cannabis indica
aatgtaaatagtaaaaaaaaatttaatgcctacaaaactattacatattaaagtacacgataaaatgcaaagaaaaacaaaaatcacttcagtccactgtactctttcctctgtttctctctccagcttcgctttctccgattgaaaaggagaaaactttctgttaagtctctctctctctataaataacaaccctttctttctccatcaaagttcccttcttttcctctctattcaaatcttttcttagggttcttccagatccctcatttccaatgtaatctactacacttttcaatcctacattgtacttaattaccttcatcgttgcatgcaatgcgcttcaaatcatcaatattttttttttcatttttaattctgggttttcttcttttggtgattctagatctccctgagcttgtcttcggagttttcgagatgtcgaaaactggagcgatggatctcgcatcgggtcttggaggaagattgagaaaagcgatgttctttctgctgttgacaagtactctctctttttttttttctttaatttaagtttaattataatatttttatgttaataacaatctgggttaagctaatttcatcattagtcactaaatcatggttaaaatcacataataatgcattagtggggtcaatcaatgggatatttaggatcatttcagatgaggtgacacatcacataatatttgtatctctaccataatctatatatatatataaatataaatgtaatttatatcttgtggttcaggtctgagtagcaagaggttatgttccagaatttgtgatttgttttttttttgcttactaccaaaaaaataataataaaaaagggacagactgaccaggtggactctgcatagctatggcttggagatttcaaatgattctcaagtggatctagtcaattatactgtagttttgaacttttttttattttcttaattataatattaactggagttaaacttgtttaaaaattactacagctaattttcgggtcaagttatatttttgttttttttttggtgtgtcaaaatctctttcaaccactattcaagaccaccaaatacttggtatccacttatttttcttcaggcatgtgtaataaattatgagccaattatctctggatgtgatacataactaattttcttttgtgtgacaattctcataaataagtgcaaatagtttaatttttaccctttaaaataattatactgcttgacatatttatactagcattttattatgtaatttttctgcaattgacactatagagaattgcttttataataataattgagtttgtaaattttttcatcaggtatgaaaagtatcatgtctgtcatggaggtgaagaggaagacagaaaatctaactatagtgacatggtaagaaatgttatttacttgctttaagcattaaagcacatgctatatagttatgcctaagccaatctttgacagttgtgctaaatatgtgtctctcaatcctaaaattaaaatatatatacatatatataaattttgtatgtgccaagtgcagaatcaaaaaacccatattgttaaaatttaacacgtcactcaaaattacaaaattaccatcatgatgactcgatgaatactatatttgatacttttagaattcaattgtttatgctatataggatcaaaagagatattttgtggttaaaaataactctttttagtctgtgtgcattggagcacaaccatgctatagagtactaactttaagatcagcaaatatttcttacaagtgcttcctactattggttttgtgttaaatatgactacttatttaagctaacaaaaagaaatggaagattaaagtatctttagtactatgatgatttaaccttgttctttcatggggatttcaggtcaataaatactatgatctagttaccagcttttatgaatttggctggggagaatccttccattttgcacacaggttactcttctttttttcaatttttttcagttcatcatagttaaaagctctagtaactgttaccattagtccaccattctgattatacgtttttattcatgcagatggaaaggtgagtcccttaaagagagcatcaagaggcatgaacactttctcgctttgcaacttggagtaaaaccaggacagaaggtttgttttcttttatacgaaatgataaaaatgagagggtgtttacctcttgtcataaggctaagatataaattctctattatatttcctgtgtctaggtgcttgatgtgggttgcggaattggaggcccgctaagagagtttgctcgattcaggtaattgccctttatattagtattaaatgcattcatcaatgctataattgagggattactttatctgtgcatgctatgagtctttgatttaagtgttttttcaatgctataattgagaatggcatatgcaattttaaaagttggcgttggttgctatgatatattgaaaaataacatcattttgatctgatactgttattgctgtcaataaatagcttatctagtatgatatgctatttttatttgtgtgctacttttcattttcagacacagattttgataaaaatgtgttcaaagagagcttaatttctaacttttcgattgtttgctgtagctctacatcagttacagggttgaacaacaatgaatatcagatatcaagaggaaaggtaggtgcttgttatggtttcaagtagacctccttcaaagatagtatcccttgattcgtgtatgaattatcttaatcgtagttggtttcataagatcaaaacacttattaagaaaggccatgatgaattagtctgcataaataaataaagatggtttggatctttcaacgatgattttaggtctagtacaattttctttatatgttgtaaatggtaaaatggttaagtttcaagatgttttatttactagattgattgttacataggaattgaaccggattgctggagtggacaagacctgcgactttgtcaaggttcgtttaattttccttttgtttctaatcattaggcattttatgtatatttcgtatttcttctgcaatcctgagtttgatccttctatttcgataacagatgtcattcttaatttcgattattgcaggctgattttatgaaaatgccatttcctgataattcatatgatgctgtttatgcaattgaagctacctgtcatgccccagatgctgtatgttatgccattcaacttcttcattttattttcttttcgtatctgttggttaaaagtggcttcttttttatatgattagtacggatgctacaaagagatttacagggtgttgaagccaggccagtattttgctgcgtatgaatggtgcatgactgatgcatttgatcccaataaccaaaatcatcaaaagatcaaggtaaggataatccgagcagcaaacaaattatcttctcactctgacatcactgcagatattaaagacggtaattttatacatattatatgatacaggccgaaattgagatcggtgatggcctcccagatatcagattgacaactaaatgccttgaagctctaaagcaagccgggtttgaggttggttacaattctctcttctagaccccatatttgaaatcgaatttgaagatgccttgatgacatttattttctttttctgttttgaattctttgtgacaaaaggttgtgtgggagaaagatcttgcggtagactcaccagtcccctggtacttgcctttggacaaaagccatttctctctcagtagtttccgtctaacagctgttggccgttttatgaccaagaacatggtaagattctgttatgttgttagccacgaaagtttggagctttacatattgctgttattctgttacacagagaattgcatcatttcttgtgattcaatcaaacgtggaaagcagaatataattatgatcttcgctttaatgtaatgcaggtaaaggcactagaatttgttggcttggctccaaagggaagtcaaagagttcaagattttctagagaaagctgcagaagggcttgttgaaggtggaaagtaagttatcatcttcttcactgttcattctttatttatcgaaaaccaatcaatggactgaatcataatttcggttactgtgtttcaggaaggagatcttcacaccaatgtatttcttcttggctcgtaagccagagtaagattaagtcagtgaactttccttgtgggactcaagtgtgttagaattcggtttcgaaaactagtagatgactcagtgattgtgtgtattatttctaattttatcttcattttggtagtctctatggagttcatttgcaagtgtagttaatttatttgaccaacaatattagctttctttacttttgttggaaaaaaaaatgaaaaactgttgtgaaataatgaaaaatttatgctcttcttcttgttagagaactcatccacatgcttcttgttatttttaactttaaagggtctgtttggatacacacaaaagaccataaataacatgccttgaaatgaacaatgagttaagatggtggtggggatatgttcctctaaatcaattaatgcaaattttgctttgttcaaagaacttggtacttttgctgactctgtcaatgtaacaagtctccaacaaatcccactttaagacatttggcacctgcaagacacttttgttgaaatcttctcacagctcaagttattttgccaattggcaaagtgattcttataataaattaatttcagtaggtggtgcttgaatttaatttattagtaattattttccatcacaaattttgatgattacaacattcataaatggatctattagtaaaaaaagttaaaagagaaattttatgttcactcctttgagttttcgatattcagctatttagacacactataaatgatgctaagcatgatctaagaattcatatactattttattaactatgagcaaatattaattgggtttacatgaaatttatatccccaaccctaactaattggttttgagttggaaagcctaaaaaagtaccataatcctcttgctaatttaagattaaccctaatattttagggtcaagcataaacctaatcctcttttgctcaaaagcatgaacttagatccaaacaaagaattcgaattaagaaataacagttctttattatcaaatgaatggtctgagagcacaattagattgcaaaataggattataaaataaataaaaaatcaatctttatcataatcttcaatcttcatcgtcatgataataaactcattactcaaaaatgtttccaatagaacaattagaaataagtcacataaaagtaaaatctaaaccaaaaaagaataattttctttttatatatattttttttaatttttaattttcttcgagaaaaatagatcaaacagagaaaagaataaactccgtaggcgaaactcccccaacagtcttaggtccacaatggcgaacctgcacagaagaagaagaagaagcaccaccgtcgccgctcacttcgccgccgaatccagtcaaaccggcgccggagaagaaaagatgaccattgttgttattgtgctggtcttcgacgttaatcggtggatgataatacatacgacttgtctgaggacaatgagaataagatctcgccacgattctaactccctgatccaaaatctcgacgaatttccccatttttctttctctttcgattactttacctctctctctgtaaaaaagaaaatggaattttctcggatgagagagagagattgaagaggagaaagagaaagaaaatgtttgggaaaataattttcaaagaatgaaagaatttttggagaaaagaaaatgaattgaatttaggttttcccaaacgtcggcgcccatgaaaaagggaatgagatttttgtgtggtgatgattttggaagcctactatcgtctct

SEQ ID NO: 185475 - DNA, 6415 bp, Cannabis indica
ttttagtttgaaaaaaaaaaaaaaaaacctttgttcactgttgactgaactcggtccacaaatcatagaaccaaaatgcatatcagagtctttcgaatgaaaaaatgaaaatgctgtgattcatgagaatggaatgttgaaaaagctgttcttttcttggttgtcttcataacatgaaggaaaacagaggactgcccttttgttttttgtccctaaatctgtgaccagctcccattgttttgagcactaaccattacttcaactcctatttcttatttttgatttttcacttttgtctaaaacccaactttcctttttcttgcattttctccaacttcttcttcttctttttctggtaagaaatagaatcattgaaagtatcgaagagttcaaacaataaggggaaaaagaaaatctgaaaccgcattgttgatataaatcaagtttgctatatgaagttgtgaacaatgagagatgagaattccaagaaaagcaaggtttgagaaatggcatcatttccattggttttttttctttttttcttttttctaaaaagtttgtttgtttaggttgtatgattatactgaatgaatctgtttctcgatgaagctttcatggcctaagacacttgtgaagaaatggttcaacataaaaagcaaagctgatgattttcaggcagatgatgtcatttacgaaggtgattggtccaactttttcgtctgttatataccatttttcgggttttggaatcttaagtgggaattttctgctagagcctgaaatacgtttgcattgtgttttagttctagtctccatcacaagctagtcttgcattttgcagttctaagatctgttgtttgttttcttcctcatcctgaaatagctctctaaatttggagttttggcatgagtgggactgaagttttttgtttttgtggcgtttgaatgcgtgaaatcgatgcataaacagtggaaagaacacaactttagtaactttaagatttatcctttctcaggtgttgatgaagagtggaggaacaactattcagagagggaggcatgcacaatcaagaaaagtaaaacaggttcagtctcagatacctatgctatcctttggagtttggaccacatacagagacaattaaactcttagaactcccctaatttcacatcattatcctttaaatcttaattatccttctgaatatcccttccttaatgcacagaaagattcagcaaaaggcaccctgatagagcccgccgaggcaaaatcgatctagactcctcccaagttactgatgtgcataattataggtatgtatattactctttcattttcctattcattatatacatatatacgtatatttatattaagccttcttcttcttctaagtgggtttggattctttttttcatgcgagcagagtctttgtagcaacatggaatgtggctggaaaatctcctccaaataatttgtgtcttgaggattggcttcacacctcgcctccggctgacatttatgttcttgggtaattccactaattcaaaagttttgttctttcttccttttctagtggtgacatctcagtttaacgcggagtcatttctgggtttttcgttttcctttttcattcaggtttcaagaaatagttcctttgaatgctggtaacgttttgggcacagaagataatggcccagctagaaagtggctagccctcataagaagaaccctgaatagtcttccagggactagtggaggttgccaaaataccccgtcacctgttcctgatccaatagttgaaatagatgcagattttgaaggttcaacaaggaagaaagcatctgctttctttcaccgccggtcgttccagtcattgagccggagcatgagaatggacaatgacatgtcagtcattgaacctcggctcgatcgacggttcagtgtttgtgaccgggtgatctttggtaacagacaaagtgattatgatccaaattacaggtggggctcctcggatgatgagaatggacccggggattctcctgtggctggtcactattcaccaatgtcctacaatggctctctgtccatggaagatagagacagacagacagggcactctaggtactgtttggtcgctagcaagcaaatggtggggatttttttaacggtctgggtgaaaagtgatctgagagacgatgttcgaaacttgaaagtgtcttgtgttggtagaggattaatgggctatctcggaaacaaggtatgatgtttgtaatttgttttgtttcattctttgttgttgggataaagaaaatggtgacaaaatgaaaagaataagaaaaagctgtattctcataccttttggggtctttcagggctcaatttcagttagcatgtctttgcaccaaacaagcttttgcttcatctgtagtcatttgacatctgggcagaaggaaggagatgaacttcgaaggaattctgatgtcatggagatcctaaggaagacgagatttccccgggtccatggcattggagatgagaactcaccgcagacaatactggatcacgagtaagttcttgaggttttcctcttgtttgtttatttgttgttactaattttttttttaatgtgtattgaaattacttgttttgtgaacagtcggatcatttggcttggagatttgaattatcggattgccctctcttaccgttccgcaaaggctttagttgagatgcgcaattggaaggctttgttagagaaagatcaggcatgtcaactaagctaaatactctgacacactgacacatagtacaatgtttgtttgagttttaaaggggatttttttttttttttgaaacttctttgcctgaaaggatgactattgtgtttcagttgagaatagagcaaagatgggggcgagttttcgatggttggagtgaagggaggatatattttcctccaacgtacaagtactctaataactcagacaggtatgcgggagaagatagacaccctaaagagaaacgaagaactccagcatggtaatcaatagtttttccttaagtttcaatatagtcaagtgtgttgatatggtttttcttttctttaagtatatactgatacctgttctttaattgtgaaggtgtgatcgtatactttggtatggaagaggcctgcatcagatgtcttacgttcgtggcgagtcaaggttctcagatcatagaccagtttacagcatgtttgtggcagaagtggagtctttaaatcgcaaccggataaagaaaagcatgagttgttctagttccaggattgaagtagaagagttgttgccacactctaacggatatacagatctcaatttcttttgatggtggatttttctctattcatctctcagatcaagatagtagaacatcgatctcgtgtttcaactcttggtaatttcgcagcctattgaagtgagttagccattgtagtctttattcctatattttgtttgtccttttacttcattactaaagttatttttaaaactggcactacttactaaagttttaaacttttaatgaattgtaaacaggaacactatggttatcataaagattcccgaaataaatttcaaattcttaggatctcagatcctagtttgccttgccacccgaggtaccttctcttttctctctaattttcccccttttcctttatgctcaacggtcatagctctgttacacatttttaaattgttttatgaaaatatatgagctggtcccagtgttgctttcaagaatttacatgaattaatcctcaaatgctacacacttttgtgataaattttttgaaggctctttctcttgcatgagaaattgaatttgtacagtgcgtatttttgtaaagtatgaataaatctttgtaaaatacgtcctctttcgtattaaagtcgatatagttgagtcctcctcctgccttggttctcatgtttatcagttatttggtccccatttgcaggtggtcacggcttgcaaaggaaccttgccttgatggtgataaagacattatgactgttgcatatacaatcctaaaagaaggtcattggttctttgctttccttcctttttttttaacaaattaatgggacactgtaaacattcatcttaatttcatctgtttctaatgctatacagtcttttcatacaggcacatagttcaaactctctgaccccataacacaacttacgaattcgttttaaccactcgaaatgcaaaaccgaaattcagaagaatcttcgataatattaaggtaagacagatattcatcccttgcctcattatctacaatgaaatctttgaaaatgttcttgtaaactgacttaactctttgactttgtagaaagggattcaatcagttttggaggctccaagtagttgggcaatatctaatttgtttgacagttgatttgaataaagaaaatgaataagtttgtaatatattatcagcttaagaagaagatcatagagtcaaaaagttttcgagtattttttcacctttattttttatttttgggggcttccccaattttgtttacttatgtatataatgataaaagagctgggagatgtgatgtggtctctgattgatactcattgcaagagaagaaaagagaatttgagcttctgatgtaaaagatttttttatttttatttattgctgctaacaacactagtgatttttctgaaagaataaaataaagctagtttcgtttacttctgttgaattttatattgtatgtataatttttatttatttatttatttattttgcgtagccaaagtaaaagcatgaaaaaaagaagacatatatgaatgatatcactacctttttcatagaggtcagaagacaaaccaaacgtactcccatctccatcaatatcaattattttgcttttttgtttttgtatttgtgttactaatttgggagttataataaagtgccttattcttcgaatataaaataaaataaactgccttattgagatatgtgtgattgtattaattaatatcattttgatttgacttaagcttttgtctaaccatgattgttgatgcaaatagcaatgaaggctaatattcctatatccttcactaactacaacaaacgtacccttattttttattttttttttttttgtttgttaaatgcagtgtctcaatcagtattgataagaagggtggtccatagtgttgggaagtacctctacctctagctctaggttgacaccacaattcattttgggcaaaatgaggagcgcccacataccacaacacaaccatactaaatataataaccttttatgcccatccccaacaatttaaggaagtttagttttaccctttatttacattttttttaaataataataattaaagttattttaccctcatttacgttttcaggccaaattatacacccacactagtaagttcattttatgggtgagtacaattttaggtatagaatggatcatggatcaataaataggggtagaactgagttttcaatgctttgtttgtttggaaatttggcttccataatttgataagacacctttttcaatactctctttctctgtaaatatataggatttttttataattggacatttacataaagtttatagctaatttttctttgtaatatgattggtaggatgtaaaaacttatgatgaaattaggtgtaacgtgaatgttttttcttcaaaattggatatttttaattataaacagaatcgattattaaggtggcgtttggtaacacttttttaatcagttttctgtttttaaaagtggaaaagtgaaaatatttttcaaaaacatgttctataaaactgtttttacttttcaattttataattagaaatcaaaattttaaaacaaaaaaaaatcactttcaatatttttttaaacagtttttttttcttaatcaatcttttagattacgactagacccggacccaaattccctccctacggccctggcgctaaacccggcttttaacttgaacccgaatccgaccccggacctagacccgacttaaataaaatcaaaaaataaaaataaaaatgaactttacagaacacacttttgttttctgtttttaaaattgaaaaacaaaagtagttatagaacgcatttttgtttttcaaaaataatttttttaaaaacaaaaattttacttttattttgtgattaaaaaattaaaaaacaaaagtgttaccaaacggcacctaaattatttatgaattttttatatatatttctttttattaatttaaataaaacaaactaagaaaaaaacccaaacccacatgtttataggaccttgctctgattttattttcttaggtattgaagaaa

SEQ ID NO: 185476 - DNA, 4813 bp, Cannabis indica
agtttccttagagtttggcttaatgcaataaatgacagagcactcatttcagtaattatattagtttattaaaatatcattttacaagtagttaagtattttaaggataaaatacattgaaaggtaaatggtaaattagtccctactcaatttaaactatctatagaggatcacttactatttagattgtaacaatggataattcataacatatctatatttggtatatagagcattctatgtagtcaggagtgcaattctgagtctatactggagtcaggaggaattaataagttaagttatttacttggtaaatttcagatctacttattgggagcatgattacataggctcatggtccatgcaataactagaataatattttttttaatctcaattaactgatttatgtaatcaattaggattctaaataatgactacgtcttatttatgaattttactaaggaagggcataattgagaagaaaagataaatatgagtttatttattaattaagacactttgtggatttgattaataaacatacttaaattgtattttatttgataattatttataattattaaaataaatttagtatttatataattagatgagaaaagtgctaaaattagaaaagacacttttatttcattagttgaaatagagtggcaaaaatctaactctaaagcccatatgtatactcggccctaagagtaagattcagcccaagtctttattccgagcctatctcatctaaacctaaccttaagtgaagcctgtaaaaagaaagagaagagagactgtctaagattaatttaaaattaaactttgtaatttaaaattaacctaattaatttaaaatagttttaaattataaaacttaaaagagttttaattttgatttaataattgtgacgagaaatttatttataatataaggcttttattataagtaaattaaccataattattaaagcggttaatctgtattaattttgggaattaataaaacaaaaacataaacctaaaataatgagtgggagaaggagtacatgtcaatgtacctatggtctccattatttgtcaacaccgaaggagtatagactggcctctagacgactttatttctgtccccctaaggaaggtatttttctataatattgttcaaggttgatctcttgactgatgagtgatgtattttagtgcgataccaaccctaggatggcattactaagttaagtcatggaatctaaactaatgggttacactcataaagcccaactaagttttcatgtggttaggtgttagcttgacaaaataacagtactttatgtacacttttatcctactagcccacactagttcttgtgtgtaatagaatatttggaagatcaatgtgtgagttttggcatcaccgttccaaggatacaacatacgaaatgactcgaggataccctgataggcttcaagagttaaataatcttttcatgtttttacttttaaatttcatatatatacatatggtgatcttaggatatggtacgatgataatcaaaaatattttcctgatgcgtacttaatttagtaccataaaaccaacaagtacatcacaattgtttttcatcgtggacacaattttttctttgatggtctgaggtagatttcttcctagtttaataacttttgaaggatcttcttcattgatgaaaacttcttctaccttctctaagggctcagttattctttctacccccactctagggtccaattcattttcttcctggattatgcctagtgttggctggaggcatactgttttgggatctttttgatttccttctcagatcatgaatactattttggctgagacattatagcatttttttgtacttctctgatcacccttcattattccaatgcttccattatcacttggaaacttcatacacaagtggcagatgaaagttataactctaaaattgactaagattggccatcctagtatgacactgtaggcagtgggctaatctactacaacaaatgtgcaatattttaaggcagatggtgtattgcttctagctactcctcctttcagtgtgactggaagctgaatttttcccattgccagcaaagaatctccattaaatccttggagtttaattggacagggcactagaatggtttccacaagcccgattgcatagaaggcaattttaaaaagaatgttaacaaaacttcccttatccaccagagttctagacacccttttatttgcaatttgggcttcattcactaatggatcattatggggaaagtgcacgtgtttagcatctttttctgtgaaagtgattggaaaattcatcatttgtggacgttgagtaagtgtttgcacaagattgtacatttccttttaatcaagctgattaagatatctcttttgagcatttctggtacttccaacgatgtgtgggtatccgaatatggttgtcacgtggccatctactataggcatagaaatcctaggtggatgcggatttcctagtcagggagcaacaataggttttggaacttgggattaggtaccccctgaggagcctatacacccggagcttatattcttggagctttaggatagcctactcccttaagagaatttataggcccttgttgtccaagaataaaaagttgtatgtgtgctcatccttgtctgagatatatgacaggtattcgagcccaatcggattgatgaccctttctaaccaattcctcgatttcatctttcaagtactcgcattcattcgtcgtatgccctacatcgccatgatgttcacatcttttattttgatccctcttatttcttctacctttgaacattggcggaggatttttgtagtggaccatgttgcaagtggctttgtaaatattttctcgagtatcaactaggctagtatactcaaagtaccttgattcatgattttaccccttttttggagcttcattttgacttggagccttagaacttcgtttgttttggtaatgacttgtgttcaattctagaacttttgtttgttgacttgtttgttcgagagcggctatgccactccaaagtcggagaaacttgtatgcacaactattgttttgaagacaccaggtccatccactgttggagttgtgagcgtacttcttgaaaggacaatagttagagtagatagttggggagtctgagttgtacaactaacattggtggatggtgtcaaaagtactccataagcatggacatacgcttcttctaggtttatcaaactttgggccctgaccaagaaatttgataaagtgttggacctctttctttacaactcttcctataaaaatggatccagtagatatccctgaggttaagttcactagtttcatatcatcatttttggcagctgcacccatcattctctaaatgtacttcttgttatttgttgttcgtcagtgagctgacttccatatcataatcctttgcggctatgaattacttctttataatcacttgcagatccttccagttacgaacagatctaggaattagtcttttccaccaatcttttgtagattttgtcagagttaaggaaaaataatgacattttgcattgctaattaccttttccacttctattagttggatgtatttcgataggtgggccctagggaccaaccttcatcaaacaccatttgaggcattctacagtgttcatgcaagggtgtctctattattcttctcacacatggttaaaaaatttcttcttctgaatcatatacaacaccattttgtttcgaaatgagtcgttctgtgaacttagttaactcagcaatttgatcttccaggcccttagttttggtaccttgagattcacgtatgcgaacataatcatagatgtgattcgtgagatcgtttccacgtggccttgccttctcgcccttggttttttccttctttgcattcacacgcctgaaggtcatttgttgaaagacttttgtcagaaagctggtgaatttcttctacatcatcatcacaccggttaatggaattactggggtaatccttatttttttccaatggtaggacgttgtacctaagcattaagcctatcattctgcacagctctgcctctcggatctgttagacatccttaacttagagcattagctaccttcatttttctcagaggtttgttggcagtgtttgtgttcttacgtgtagtagttggagtggtctttcttggagtatctcctatgaaaccttttcatttgtccctattgctattattatcctaaggaatagatttatcacgaatttcttcatcttgagccatattctctagcagaagtctagcctccagtttggctaagcttgcatcctgcaaattcttcttgtactgccaattttagcttgattttggcgagttctttggtcatatcaacaactgtaggattttgcttgcaataatagtcatctttatctttttctttcccaccatcttcagggtctttgtcttcggaacattcctctcgaccctcattgatgggcttttcatcaacataattttcattacgttgagtctttttggcaggatgaatagctgcttcagttggatctctgttgactcttgttgtagcctgagcgacaagattaacatcatcaataggagtatctccatcgcgaccaccaattttattttgggtgagtaccatagttgcagtatacaacctttgatggtatcacaactttcttttgctcacaataaaagtaccaaaatattta

SEQ ID NO: 185477 - DNA, 3455 bp, Cannabis indica
tttttatttatactttacgtgtttgatgggttatgatttttgatattctttgcttagagaggaagaaagaatcaggacatgttttttttttagttctcctttaattcctcatgatgctttcatactggactagtgagctgcattttgatgcttaatcttgtaattgcaaatcatatatgaatgaaaaatgtcttaaagctgacaatagtagttgtcaggtttctgatgtgaagaaatgtattgagaccgttcaaggttcagatgtatatcctgcggctcagcagatgctcattcatcaagggaaagttcttaaagatggaactacattggaggagaacaaagttgcagagaatagctttgttgttataatgttgaccaaggtattattccactattttgtttttcaatctatctctactttatgtgaatttaaattatgttatttggttgatattctgtcctaattatttactttatggacctacaatattgctagactaagagctcgtctggtgaaggctcaacaacaagtgcacctagtaaggtaatctgacagttgtttctttttttacacagaaccattagtttctctatctttttgtggtagttagtagttgccagtttgtgggttcaattttagaaatcctgatgctaacatctgctggagtttctggagattcaagtttataagttcccagtttatcttttattttttcttttctttgattggaactttgtaagttttgacatgcaaatgtttgttcaaatttcattctacagtttatttttctttgaacctgaaagatattaggatttcatgctattagatttctaatcagttggaaatggactaattttaaattataaccttctgcaatacttggccattgtattttaaaataattgtttgtctatgaaatactacttactggttaaagcaaattgatcttagttatacaagtgtttatatcatatctaaaattcagagggtatatgtttcagtttcagtgtgtagcaaagttgtcagtcctctgaatatacctttttctttcgttgcatttttgatttgtttgtattacctctagattttactgttgagtgtctatattgtaataatatctcagtgcttattggttaaaagttaaaacctatacttttgactacatttgtatgaaattttattgttgattatacctgtatagtttttgtagttttgtcttttgattaacattagtgctgattctatcttcttgtgaaatcaagttcatgtttgtatctgttattggtctgaattcgagtgtttgttattgttagccttaattactgaaggatattttactttgcatctcagccaccccaaacaagtgccccctctcctgctcctgctcctgcagctgctcccacaccaatatcaactccggctcctgtagcaacacaaccaacgtgagttgtgcagcagttgtttgaacatctattctattggttttcttttcttcagtatttgaaaagaaatgtagatattaaaacctgcttcctatttctgagttgtctaattatttatcagacctggcgagcaagtgacaccttctcctgctcctggctcagttcctgctccagctgctgctgcttcagccacagcagtgtatgtctacttctgtgtttttcagtttttatgtgctttttttattttatgcctggtcttccttctcttctatatgttgtcttcctgcatatttagtttattctttaatcattcggtaagtttgattgagcaggccagatgctgatgtgtatggccaagcagcatctaaccttgttgctggaaacagcttagaaggaacaattcagcaaattttggatatgggtggaggaacctgggatagagatactgttatccgagctttgcgtgctgctttcaacaaccctgagagagctgttgaatatctctattctgtaagtaatatattttgatcacttattctgaagttaatcttgttgattatatgagcatggatgattcagattaacttgtatactttatctttcattttgttccttgaaagtttgtattgttgtcacattcgttaccaaacactattaggagtaagaaagaaaatatttttttttgatgtagctgcaaataaaaacctggggtcttcttactcatctcagtgttcatatgtaaatttattgtgcttaattaggcttttgaataaaatatttcaatttgatgttatccttgatgacccaaaatcagggcattcctgagcaagctgacattccaccagtggcccgaagccctgcaaatgcaccagccacagatccttcatcccaacctttgcagtcagtacaaccaacagctgccccttcaaccgggcctaatgcaagtcctttagacctttttccccaggtagttaccgagtttgttttatgatcagtttcgttcgagatcgtaatgtgctaacataagtgttttgatttaataatatgctaatttgaatgtcttaaacagggacttccaaacattggtggctctggtgcaactggtgctgccagtgctgggaccctagattttctacggaacagccaacaggtaactctttctctattaagatttggacactttatattaagcttctctctgttggatatgtgtactatttgtctaacttttttttgtttgtgttattttctcagttcaacgctttgagggcaatggtgcaagctaacccacaaattttgcaggtttcttttctcttttttgatatatgattttctctctctcttattttttagactcttgtgtcatgattgacttcctatgacagccaatgcttcaagaactagggaagcaaaatcctcatctcatgaggctaatccaggagcatcaggccgactttcttcgcttgataaatgaacctgtagaaggtggagaggggtgagtctttcttttatgtacataatttgcaaacatccattcatttatcttgactaattgtgagatgcgctgcttctatgattccagaaacgtacttgggcagcttgctgggaacatgccacagtctgtaactgtcacccctgaggagcgggaagccattgaacgtgtaagtctttgtttcatttgcgatagaagctaagttttgtctcttggtaaaccttattgaatatacactgtttgcttaaatgccaatttgcttttaatcgatatctggggttttaaagccttctaagtcagagtatcagacatagatttggaatttttttagtactggattcttagggtattaaaatttttagggttgagagacatgatatttcaagttctctctttgttaaccactacttcttgtccaaatttaaatttaatcacatgtcatgatagaatagatgatactgtgtttacctatgaaaaaaaatgcgttcttttctgctaatcgatgaagaaagtggtaata

SEQ ID NO: 185478 - DNA, 5173 bp, Cannabis indica
tcctacatattactctgaaaagacgtgtttgagggtttaaactcaaaattccttaatttcacaatgccccattcatcaacagctacattatgagttatcaaatcattagcaagagacaagtttagaatcaccaaatgcctataacaagcctaagcacatcatagagaataggcaatcatgccctatgttcaaatcttgaaaattgtgtaagacatgattcatacaaacacgacaataataatttttttaccaccattatgagcctataaatatgtcaataatacagaggggacacttggaaattccttgtaagaaaacactcattaataacaatgacttgtagattaaggctcattaatactatcacgtacaaaattctctttcttaatttctattaattactataaacaactccaattaataattacttaaaacctcaatcaacaactaaaattacaaaagtctttaaataaaaagtatatattaagaatgatatttgtaatgagatgaaaagaattttcatgctcatagaaactaagaagaagttacagcagaagtcttgtcttgtgacatgttgagagtgttatactgtctctaagtattttgtctgttgctacgctggtttgtttgtttctgtctgtttgttaagcatggcttcaagtagtcgaggaggctttgatctcaatgagaaatatagtcaaatctgcctggaggatgaagaagaaggggttttaatcggggatgagaatgagggagaggaggctatatttgatgataggtggtgcttggtgggtaaattccttactggtaggacgttcgatttcgatgcaatgagacatatgatggcatccctttggcagcctgggaagggtgtatacatcaaagaactagatactaataggtatctctttcaattttatcatgaaattgatatacaagcggttattgatggaagtccctggacgtttaatagatgtcctctgatttttcatcgtttgaagaaaggagaggatccgagaggagtactgctaaataagatggacatttgggttcaaatacatggcttgaagactggctttatgctggaaacggtggtacgaagggctggaaattatgtgggtagctttgtcaagtctgatccaaaaaatttcaatggcttatggcgagacttcctgcgtgttcgaacgacaattgacattgagaaaccgttgaagagacgcatgaaattgtgcagagaaaatggtgattggatttgggcaaatttccaatatgaacatcttccaactttctgttttgtgtgtggaatcatcggacattccgaaagattttgtccgaaaaggttcgatcaacctttggatgaaattgttaagccttacggcatggggatgaaggctcaattgaaaaagaaaaactacttgattggggctcaatggctccgtacggggaaggaggaggagggggctgacggtggtggaagcttttccaggcaaccagctacagatggtggagttaatttgattcctagaatcatggatattgataaggttgactctagagttgatcacaatctcttgagttcaggcgtgaatagtggagataatttgggagggaattatgtgcttaaagataaagttgttgggaggggacaagctagtgtggctggaggtgatgaggatgagattaatgaggaagatcctcttatgatttttgacagcaaaaggagacgtatgggggctgttaagtcattacatgttgtgaaggaagatgggccaatattgggctcaagtgatgaaggggacattgttccaaaaaacgtttcaaaggtgggccttggatctcaggcccaccagtcattatgagcattatatcttggaattgccatgggcttgggaacccatgggctcaacaattcattaaggatctagttgtccaaaagaaacccaatgtcttgtttttatgtgaaactttagcaaggaaggatgttgtggagaaggttcgggtgttgcttggttttgaggcagccatttcggttgatgttcagggaaagagtggaggagttgctttgttttggaggactgaggaggaggtaaaggtgttagaatttgggcgtacttttattgatgtggtagtttgcgatccagataaaggtcattggcgtctaactgggttatacggcgaaccaaatagaagcttaaggaagaagacttgggatctgatgggtgaattgaaaagcaaatctactctaccttggtgtatcattggggatgttaataatgttacttcccaggatgataaaagaggaggcaattcttatccaaattggttagttgatggcttcaatgaaactttgagtgagtgtggcttattcgatatggagctgattggttacccgttcacttgggagcgtagccgtggttctgtggattgggtggaagtccgcatcgatcgtgcgttggtgagtcaatcttggttagatatttttcctctagcaaaactttataatttagaggtttctacttctgaccattgcccaatacatctgcatactgtcaattatgttatgaatgcttctaaaagaatttttcgttttgaaaattcttggttaaaagaacctttgtgtcataagattattgaggattgttggggtgttgattctttactgtccattactgagaaaataaagaattgtggggagaagctttcggtatgggggttggattatactgggaatttttcaaggaggataaaagattgcaaaaaggaggttaagaagtggaagaggggtagggacgtgatttctatagagaaccatgagattgcttcggctaagcttaatgatgttctgttgcagagagaggttttttggaagcagagaagtaaacaactctggcttcgggaaggggacaataattcgaagtatttccacgcggttgctacagcaagaagaaggaacaattcgattacaaagcttcgaaatgatgctggaaattgggttgattggcagggagatttaccattgattgttactaattatttctcgcaattattctcggctactgctgttgatgtttcgaatgtggttcaatgtacccaaagtactatttctgatgaaaataataggctgctgctagaaccagtttcggaggaggaaattcggcgtgctctatttcaaatgcatccagataagtctccgggtccggacggtatgaccccaggcttttaccaaaaaagttggcatattgttggtggagatatagtgaagtttgtccagaattttttcgtcacgggttcttttccaagcgagttgaacaacactaatatagtgcttattccaaagaagaagagtccagagatcatgtctgatattcgaccaatttccttgtgtaacgtgttgtataaaattatttccaaggtcttggcgaatcggttaaaacaagtgttaccctcggtcatttcggataaccaaagcgcttttattccgggtcgtttaatatctgataatatcatggtttctttcgaaatcatgcattatttaaaaaggaaaagaagtgggaaagaggggtacatggctattaaacttgatatgagtaaggcatacgatcgggttgaatggatttttattgagagtatgctgaggcgtatggggtttaatgctcattgggtacagcttatcatggtttgtgtatccacggtttcgtacaatgttatccatggagggaatactatgggacctatcactccaggtagaggactgcgtcaaggagatccactatccccgttcttgtttttggtttgtgccgagggactatcttctttgttgaaggattttgaaaggcataattatttgactggttgtcgggtagctaggggagctccaatggtttcacatatgttgttcgcagacgatagttatgtctattgtaaggcgaatgatagagaggcacaaaatgttattcgtctcctgcacatgtatgaacaagcttcgggtcagcaagttaattttgccaagtcttctgtgtttttcagcaagaatacttcaacggaagtgcgaaatcggatgtgcggcttgttgggattgcatgaagcggctgctgatagcttctatttgggtcttccttgtactatgggaagaagtaaaaatgctatcctgggttttttgaaggaaaaaatgaggaaaaggatctttagttgggaaacgaaatttctttctaaagcgggaaaagaattgttgattaagtcagttgcccaagccttgcctagttatgctatgagcgttttcctcttgactcaagaaatctgttctagtcttgaaggaatgatggcgaaattttggtggaaatcacaatcgaaaaacacaagcataggtgtaagttgggtgagttggaagcgtctttgtcaacataaggatgttggggggctaggatttcgtgatcttagggattataatctttcatttttggggaaacaaggttggagactacttaccaaggagagttcgcttgttggcaaaattttcaaagcccgatactatccaaatggaacttttttaaacgctgaattgggtcaaaatcccagctttatttggcgaagtatatgggctgcccaggggctccttaaaaagagtgtgagactctcaattgctgatggttcttctgtgaacatacttaaggatccgtggcttcctaatgctactaatccttttgttatcactgagaatcaaggactccaaaatcaaaatgttcaaagtctaatggttactggggcaaggtcatgggacttagaaataattgatgatatgtttttggagagagatgctaatcttattttgagtatacagcttagtgattctgttgagatggactcatggagttggaatctcgagtcttcggggttgtactcggtcaaaagtgcgtacaaatacctccaatcggctagtggtaattggctctttttggaggaaaatagttgctggaaaaagctgtggcaacttgttattcctcctaaagttcgtcattttttatggcgtgcttgctcaggatgtcttcctactaaggttcagttacacactaagcatgtaaacgttgatcttcaatgtcctttttgcaacagggagaatgaatcaattgatcacgtactgctgggatgcaattttgcaaaatcctgctggtttttt

SEQ ID NO: 185479 - DNA, 3296 bp, Cannabis indica
ctgggaaaagtatggcttccaaaggtccaaggtctaagcttgatcatgaatcaagagctaaacgccaaaaggtttgtttatgaatgtctgaagcttgttatcttattcattatactatttcgtgtgtgcatttatatatgctgtatggtatgtcacaatgctaacatgtaacaacgtgatatcatcattctacgtgtcaccttattggttagggacagaaactctaaatggtatgtaaagctcgtgaaaaatcaaattagtgcagtgacctttttaattcatgctccaacttgatgattacactcaatgttctaggaactgtccataaattgaattgtcttcctgtagttgctttttttgactttttgacatgttctttcaggcgcttgaagctccccgagaacctcgtaggccgaaaacacattgggatcacgttttagaggagatggtttggctttcaaaggtaactgatagaattttttaatgtacccatttttccttaatgacaatgtatatggttgataaatattttcttgttacattatttttaattttaaggactaatttataaaatcaagtaatatctgagatatattttcatattatttccttgctcatggaactggttccttgcaggactttgaatctgagagaaaatggaaattgtctcaagcaaagaaagtcgctttaagagcaagtaagggcatgctcgatcaggctacaagaggagaaaaaaaattgaaggttctgcctaattcttttggcatagaagtttttctgtgatcaaatttgttgctaaagtctttttggccattgtgttgtgaattttgtcttgaataggaagaagagcagcggttaaaaaaagttgcactcaacatttcaaaggatgtaaagaaattctggttgaaaattgagaaactggcaagttcacctctaatatcagtttacatcaatcaaatctattctattgtcctcgaatatttgaaattttacatataacttccaaatttgctgttcaggtactctacaagcatcagatggagcttgatgagaaaaagaaaaaggctctcgataagcagcttgagtttcttttgggtcaaactgagaggttagtctgtgattttcttgtgctctaatcataactttcttgttctttactgaattctaccttcaacttctggctatgcatttccaggagaactggaatcacattatctattgtgatatactttcaggtactcaacaatgttagcagaaaaccttgttgacaattacaagcctttgcagcaaaatcctacacaagatcaacccaaagaagaggatggagatgacgccaatgggtcttcagagctgaatgttggtaagtggaaggttgttgtttcatcacattcatcttttaattttcaaagaactgaagtagattttttccttgcaaataattatttttcaccacatttggaacagaacctccatcagatacagcagatgttgatgatgattatgatatacaatctgatgatgaatctgtaggtcttacttatccttttatttctcttgatgtttggtatctctgttgaacttcagggtttgatatgcatgtgcattataaatatatgaatattgtaataaataaactacatgtatgcattaagataaatttaaatatgctcctttactagtaaataagaatggtttgcatttatattaattgctcatggatttataagacaaaagaggttgtaaggatatcattcttggatttgtgtagagagtgaggcaaccttttgctttaggagtagctgtagctgtacaagcttttggattttagcctttcattatgttataaattctgtcttatgtttcaaaaaagaaaaagggtagagtgttgattgttgtagtaggcctttcctaagttttcatgtaaccgaggttttcctctggctctcaataaacttgggaggaggtcagttttagacatttgacctttgtatcttttttaaaaaataaaatatcaattgcccatgaatgtccacaaaagttgtgtgatgttgatctttttataaattgtggattcataaaggattttttcctagttgaaaaacatgacaggagtgtttatgaaaaaagattggctgctgatgtatgcctccatcttttctttgattgcttggcattgagcatgcccaagagtatagctgaactcactaatgtaacatgaaaaaagaaaaaaaaaaaacgctgcgcagaaataagaaggaattaggaaagaaccaaataaatctttgttcttcagaagaatgcttccacctgtctttcatgttgtgtcctatctgcttcatccatggttgcctatactgaggatgctggccaatgctcacatctgctggcattccactttagtttacagtgttaatgaaagaatgaaccaagtgccatcttggcagatgatgcgtatagagtagagaaacgtactttaaaaagcagaccactgccaatgttgatcttgtttttcaccttcagtgatagggtcaaaagcaatgcctggtatatttttgggtgctgttgaaatactttaatcctcatgagtcatatcccattgccaatttaaaaaaacaggctgcataaagcttgctatctctgcaatctttcctcttactcaatttatatcaaagtgtatcaaatatgattgtacatctgagaaggcagcacttactattatgtttaaccatgatgattcctatctgaagtttagactataattctctgtacattttttttatttcatttctgtctttgtattctcgacatgtttaacaaatttatctgcctgatcgtactgttttaggaagatgatgaacatacaattgaggaagatgaggctcttataactaaagaagaaagacaggaggagctagctgctttacaaaatgaaatagatctaccccttgaggagctactgaaacgttatgctgggaaggaaagtgagtactgaaaaatttataaaatttaatttctttttcaaaatgttttggaccttggtgtgaccatggaaattttcttgagagttttataggcaacatttttttatgcaaaacaaatttgttagcagttattagttttattttttacagtttgtgtgtgtgtgtgtgtgttgttttttttttttgtttaattgtaggattttatcattctccctaacgtatctatcctctttgtttttcattataattattttgttttgttaagagaataaaaggcaaaccaatatttggtccatgccatgaacgtaccttgag

SEQ ID NO: 185480 - DNA, 3188 bp, Cannabis indica
gaattttagaaataatattgtaatattggtaataataaatgcttgtatattattaatttaggagattatacatctgggctctctctattatatatttatgtgtatatattaagaataattgtttaaatctaagacaaccttaattaacgtcgatatatatgtacaccccataataacttttatacacagcattgcaaaaataaaaacttctaacacagcaatttttgaaatttttagacgaccacaattatcaccaaaagtcctgtttatagtatagtaataaaattctttagccaatataataatttatattttgactatcaaaatgtatttttgatgttataaatacttaaaaaggtcgggtttttcttttgccatttaacatctctatatgttagcgcgcaacttaaaatgctttaaaaatcgaatctctgttatgcatggttttatagatgtaaagtaatttagataaactttgaatataagaatgaaaaaaaaggtatagtgcattttactttctttatttgagtaactaactgcttatcataaagttgtaattttgccaatcacctagaaaaatagataacatcaatattatgcgagtattcaccaaaaaacaacaaatactcaaaatatgataagtaatgataattgaaagtgaacaacaagcatatgcaaaagcgaagtaattaaaagataaaaaaattataatagtttagttagagcttaacctatttaatttatttttgcaaaagtttgtgatgtgtgaatcatatatctctttatatagaaagtaaatgttcttttaattacataaccagtcagatgggaacattacacacaatataattacaatatagatgaaataaaaaacatttgtaaattaaataaatgaaaaagaacagaattttgaccattcttattattaaagcccgaaaatatgcgactatcttcattgcatattgacagttcatgtattagtctttggaccaatctaagtgtcgcaggggaaaaacacttggtcatcatatatgtatattcgatttacgtagcgactatcttacttttttatcccttttactttattcattgttatatgcaatgtataattatgtctgactagattctgtctcggtttttaccttctcccatatttctatcatgtgaaaacacattatttttctgaatttatatccttaacataatatataatataattagttaattaaaatgtatattcaaaagtaattatagacatatatatatataatctagtatactttatttctcaataaaagattaagtcaaagtaaaaaataattactcaagagaaaggatttgtcatttcatacagctaatagacactaaggattattctaagaatattataccaaacccaactttttaaagtggtatacatataaaacatatctatgtagatttactattgaaagatttaattagcagtcaaatgtcctcacgagtatacatttagaccaatcttaaataaatattttggtgacgacattagttgagattatatatttaaactatatgagcacttgtctttagtttataataaaatcaattataatcacaaggcacagtattataattttttctaataatgcagtcagtgattacaatgaaactttcatgtagtttatagtaagattttgatatataaccaaaaagaagattttcatgtatctatagttagtaattgggaaaatggtggatgatatatactatgagatcaattactgatcattatgatatgtcgatgagtataaatatataggtaaaagattcttgtcccttttaataaaaaaatatattcattaatatatactatatatataaattttgtttgatgtagtttggtttaatgtactctggttttcgataattaataattgctgaatcaactcaattatgatccagcaatttatgagataattaaacggaatgcattcctttaatacaaaatctatataaaatatgaaatatagagtttagccaatttgttcatcatgttataattattaatgttgttaatgtataaaggaaggggcctgaactcgattgaccatgagtgcatgggtacaaaagctaatgacatgagatatttgaagaggaccccattcatatatataactttgatatttatatatacgtacgtgatatcacttaattataaccatgcataattaatatagcaatcaatgacgattagaaagggcctctattatgttgcgtgcatggcctgagtttttgtggccaaccaataaaatgccacctgttccctgacgttgactttccactttcctggctgttaattaattactcataatttctcacctttttcttttgagggattcgatcgtaatattttatttggcttatatattacctagcctaaccaagcctagcctttctttcaaaatacagatttacccttttcttttatacatatattccatatatagcaccactagtagtgctcttgttgtgatacatacatgctatacaaaatagaattaaaatgatgatcttaattatgacccagttttaattttaatttcggctaatcaatagacgttcatatataatatatattacaatatctcataaacagttagtcaaatttgatttgattataaaacatataattattatttgataataaattataaatattctaattaaggaataacatagcaaagacggagacctgagattgagcctaagaatctgtcaaccgaggccttcgttctcaaacactcctttatttaagaatcaacggattatgatttaccaagtatttcatgatctatttttatttttaaattaattgtcacaatatttagataattaatatgttatatacatactaatgaaagtcccaaactcattactcatgcattccgagtagatctatctaagagtttaaaagaaagtttggaagttcgaacacttagctcacttttgatttatttgtagatatgaagctcgtgtgagatcaaaactaaaaattaataactctaattatttgaatattattctatgatactatttatatgttggattattatttattctactttatatagtcattcttatactttatattatatatttttataaatttctaacacgtacatactactcatattcaaatatatatt

SEQ ID NO: 185481 - DNA, 4776 bp, Cannabis indica
ttaacatagtaaaagtaactccctctggaatagggtatttggagcagatgttgctgaaattcgactcacatttagacatgaaattcagatcagccaagggagaagctttctatatagccttagatttatttttgaatagttgcagaatacgaaaagaaaaagggaaaactaagaatatcagggtaaacgtagcaaggagatgaagggaatgaaagaagaaaggaagcaaaagattagagacaagaaaatatcagagaagttacttaaattcttgattcttcctttaaataaatatcacaattaaatttgaaataaaaaaaaaatcaagataattagaaaggtcgttgatagtttccctaaaatttaaaatggttacttcattaaatcaatcacgactcattatgacacatgagaattatttttagtaatcggttccacaacacctaagcttgaactgaaaaattcacaagctcaaaaattgtaaaattgaggggaaattgtaagggataaaaataattttgagggtaataaattaattctaccataataaatgtagaggagttaatggaatgatgtgacaggaacgatatgaaacacactatttcattgaaagaaaacaaggaaggagaaaacaaagctttgaatgcgaggtagagctgaagggaactagaagtagagtttacggagcacaaaaagttggagaaagcaggaaagcacgtgaagatttgaatagaatgagtccgcgtggaccaatctgaacgagtaaaatgagaaggtttgacgaccattcccgcttgtaaataggaggccccatcgtttaaaaatggcaaggattcttcatcacaccaaacttttcgaaactctatcggaatacatccttaaattattcttaactcgggaaagaaataagggtttagagaggaattaacgaaggttatagagaatgatgtaaactagtagaatattgtagttcgattggattatatcctagtgtaaagaattcaatatcataatacaaatttattattgagataattttgagcatcaacacttggtaatagaggaaacttttcaaattgaactcaaatttaaaggacaagaatcataagaagttgggagagtggaagaacctatatgagagaatagaagcttcttaccatccccaacatatggtttcaatgccattgtaagctacagattaattgaggtgagcattgtcaaaggtgacataattcgtagcatgtgtcagcataccaagaattgtcatcaccaaagtcctaaatcaatgtggtggagtatgcatgtggatcataaatgaattacaagtatgtgaggtatacacgattaggaggagggcctagtttaggattagtcctcgttttttcaaatcagtaatgaccatcagtagttgtgtgaccgtcctcatataaacctaaaacacaattcttggttgtttaaaatgagggaaacccctaccacgaccaatcggttgttatgaggatttagctggaccagaacaatgattggcaaaagaccgaacacctctagttcttccagtactgaatgcaagattggctagcattttgacagacaaatttgtcatagtgtgatgatgttctaggtgattcacatgggagagaagtaatgcttgtacttcgtcacttcttgaagaagtgatgttggagactatagagtcgaattctggtccaagaccattaagaagttgtaaaacgatgtcttgatcactcaccagagatccaaccacagtcaaagcatagtctggtccaagaccattaagaagttgtaaaacaatgtcttgatcactcaccggagatccaaccacattcaaagcatcagatatcgattgagctttgtccacgtattcagagattgagagactccctttttcaaagaaaactagcccttcaattgtaggcgacgagccttagtttgagatgaagacttttgtttaaaagcacaccaaacaatgaaggaggggtgtagttggcaactgaagcaagaagaccttcggacattgatgatcgcaaccaaggatcaggagctgatctttgcagcaccattgttggtactcaggattaggtgcacccgtgaccaagttttggggaggaggaacactagtaaacatgatttcatcaaggtcatgactaatgatcgtaggaaccacctaacttccgggcaagaaagttcaggcgatccaatttgattgtaagtaataaagttagcaaatgagagaaggattccatggagcatgagtagggacaataggagtagggggcattcgccattgttgcagtagcagtaacaagatcaaaggtagaagatgatatgggctttagtcaagaatttctgatactatgtagataattaaagaatgcaaagcataatctgagagagaagttaatagacaatcagctgagaaaaaaaaaagcttactttactattagagagttcttttgatttatatcgaagggagtaagattccaatacacaactaaatcttgaaaataaaagccaatagagaatcagtttagtaaaaagcttaattcactattaaagacagtggcagacccaggatttaaagtgagaaaagcgtaattttttttttttggtaaagtagaggcaaaagtaaacttaaaaagaaaaaaaatactcttgatagtatttgaactttgatctctattataaatacaatctaacttaattattacaacaaaactaatattatgtctatacatattatcttttattataaatatatctaactaaatacatatatagcaactgtccctctcacttctatgtaagtgcacacctaattaaagagttcttttttatttatatgagaaggaattaagattacaatacacaatcgaatcaagataatgaattaactaccttttaacaactagctaaactaattaacagaacacactagtagtttaggtgctaatataacacaagaaacaagtatttaaagcacaattagaaaacatagtctaaaataaaattttaaaagacaaagatccaaactcactaggcctgctccttcactgcccttcaacacttcaaacacaccttcttcccatgccaatcactccccccaaattgactttactgttgctacttctggtttttccagcatcaatcaatactacctaaatacaaccttgccaccatattgcgatgcctttaccaacctttcaatctccaccaaaaacatctccacaaccacttactctgctgactctaccaatgctactgcagccaccatgaaccacacttctccatccaacccagtaaaagatcacaaccacaacaccgctaccattaatctctcacacattttcacacctgatactggcctccccaacgtattttctacctaccccccacttgcacctcccaatcaaacattttcccattccaaatcttcctatgtcagcaacccatattcaacccaatacacatacactcaacctattattcaaactgacaaggaaaacctgccccacattcacatccgaaaaggcctaatgattcagcttcaatgagaaaatttctaaaaagatgttgaggtacaacccctttactttgtcaaacgaagacggttctgagatgttagtttctgatggccaagattctaccatctccaatgactcaagtgcggtggttgctacgcaatcctgcaattcatcatgaaaatcctcagctggaatgcacagggcttggggagtccgagtgcgttccgagacctacggttgcttgttcaacaacaattgccccatgttttgttccacatggaaaaaaaactttgtgtaaactaaataacgcgtgttcgtcaatctttaaactacagtaatggaattgaagctcctcgtgttggactaagtggtggtttgatgcttctttggaaaactaatgtggatgttaccttgcttaattttgactcctgcttctttgattgctacataaaatacgaagatgatccaaggttccatttcatagggttctacggtgctccaaatattgctaatcgatcaagttcttggactttgcttaagcgattagcagatgttgctcccctttctccttggttggctattagagacttcaatgaaatcctctctaactccaataagtcaggtggtaatctgagaaatgagactcaaatggttgactttcgacaagtttttgataaatgttgcttccatgttgcaccgtatgaaggagatccattcacttgggttaagaactgctcagctgctgctactattaaggagcgtttagactggtattttgttaacagccattgggaaaacaacttctctactccaattgtacatcatttggactactaccaatcgaatcactgggctattttggctgtcttcaactcacaatcagcaacagccaccgagacaaaacgaagaagcagattttgttttgaaaagttgtggctcttcgatcttgaaagtcaagaagttattcactcaaattggaatattatgccatctgctaatcctatcactgctgtctttggtagtattaattcatgttctgaatctcgacaatcatggcatatccaaaaatatggaaagatgaagaagaagatcaatgcttgccaagataaagtcaccaatctcaacaacttaactaaccgcaccagcagcaacttagctgaattgcagcaagtcgaagcaattcttgatgacttacttaaacaagaagaggtatattggcagcagcgttctcgcg

SEQ ID NO: 185482 - DNA, 2718 bp, Cannabis indica
taactttatttttagtcacttatgttagaaagactcaaactcgaacaacatacagtcttatcataataatagcaaatttactattttaattttaatttgaacatgaaatttttccaatcaaatcttgtcaaacaattgtattaattaggctcttaaggaactaataacaaccaataagaaaataacaaaatggtatgatatttaaataataattagttacatacaggtagttgattatacgattctccatctccaacgaactaactttttttttcctttaaatatttgtgtgtaatgggaaagtattaaaacagttaaataaaaggattagaatataaaaaagaagaaaaaaggaaagcaaagcaaaggaatggactatggagaggaataggttagggggggtatcgtggcagagtgtgaagaagcggatgtccctattagacccacccacacctcgttttgatcacttattggcaatccaacaattgagtgctgctttttgtagcaatgcaacacgtggtcatctactacatgtctcaggtggaccttctttcgttttacttcttcaactcctaacctcactcctattctcttctttctcttccaaccctatatatatccctcactctttcattcccttccctcctcatcaaattaaatctcatctcatctctctctctctcatttttcatcccatcaacactcaacacttactgtcactctcacttcacttattgcctctctctctctctctgttcttttctttctatcacactctaataattgtcttttaacaaatcagaaacatttcaactctctccttattctaagccaatcagaattgaaagaaaatataagaagaggagaaagattttaagtagtggcagtaccaagtagttgtgtgctaaaataaacttttcaatatggcttcatcagcatctccaaacacttgggttaagcctagaattccttcttcttcttcggtaaaaatcagaaagcccaactacataagttgttctcttcaagctccttctcttccaagaatccccaaaaagacaactacttctaccactaccccttataaccaaccttcttctactccttcaatctccattaatcatcgttcgaaaaccccaattgaaaagtctcagtcttcatcatctggctctgagctcaacttctttcaaaaagtggcggcgattgctctcgacgcagctgagactgccttagtatcacacgaacgcaaacaccctttaccgaaaaccgccgacccaagagttcaaatcgctggaaactttgctccggtgcctgaaacccctgtagaacactttttaccggttgccggtaaaattcccaaatgcattgacggtgtttacgtaaggaatggagccaacccccattacgagccggtagccggtcaccacttcttcgacggcgatggaatggttcacgccgttcaaattaaagacggcgccgtcagttacgccagccgatttacagagactaacaggcttgtccaggagagagccttcggtcgcccggtttttcctaaagcaatcggcgaacttcacggccactctggcatcgcccggctcctcctgttctacgccagaggaatgttcggactcgtcgacccgactcacgggatgggagttgccaacgctggacttgtctacttcaacaaccggcttctcgccatgtccgaagatgacttgccttaccacgtgcaaatcacgagctccggcgatttgaaaactgctgggagatacgatttcggcggtcagcttaagtcaactatgattgcccacccgaaagtggacccggaatccggtgagcttttcgctctgagctacgacgtcgtttcaaagccatacctcaagtatttcaaattctctcccaacggagagaaatcccctgacgttgagattcctctgcctcagccaacaatgatccacgactttgctataaccgaaaactttgttgtcgtccctgaccagcaagtcgttttcaagttgcaggagatgattcgaggtggctctccggtgatatacgacaaggaaaaggtttccagatttggggttttggacaagaatgcctctgacgcttccgggatcagatgggtcgaagctcccgattgcttctgttttcatctatggaacgcttgggaggagcccgagaccgatgaggttgtcgtaatcgggtcctgcatgactccacccgactccattttcaacgaatgtgacgagagcttagagagtgttctctctgaaatccgactcaatctccgaactgggaaatcaacacgacgacccattatcactgctgaatctgaacaagttaatcttgaagctggaatggtgaaccgccaccggctcgggagaaaaacaaggttcgcttacttggctttggctgagccttggcctaaagtttctggctttgcaaaggttgaccttttcactggcgaggtgaccaagttcatctacggtgacgagtgttacggtggcgagcctatgttccttccaaatggccccgattcagaggaagaagacgatggttacatcttggcatttgttcacgatgagaaagaatggaaatcaaagctccaaatcgtcaatgcaaaggatatgaagctcgaagcaacagttgagcttccatcaagagtcccgtacggtttccatggcacatttataagctctaaggatttggagaagcaagctt

SEQ ID NO: 185483 - DNA, 4395 bp, Cannabis indica
ctgccaccatctaatgcaactcagaaggtggcctctaccccagcgccccaaacaatcaataggctcgaaccatctctgccacctagtgttacaaaagcactgccgccatctaatgcaaatcctctacctcccgttggtcaaatacatgcaccagccacttcaccaacagctcctcaagaaaaagcaccagttacgaagcctcctgtctcagtaccagtaatgtcaactcctccaccactttctcaaggtcatgcacccactgttccaccaactgcttctcaaagaaagaaaccggtgattgaggctcctatttcactgccagttgctccaggtagatgatctatttggaatttaggggtgtacggggtgcacatagtttttatgtttttttaatctagtgtatttttcagctgaacaattattttgaatggctgctttcgttgttccagttccagttgcaactccttcaatgaatataccacatgtttctccagctttccagccaagtatacctgcaacttcgccaataaatataccacatgtttctccagctttccagccaagtatacctgcaacttcgccagtaaataacacccgaagaaattccactgataataagggtcctatgtcttctactactccaggtacatgattactggattttctctttgacatgctaaatgacaagtagattaattctctttcctgcgagtacatcattaagaaaaacttggacaagatcagtgggtcacttgtgcttcttaattcatataatattttaaaataaaggcaaacatcaccattttacttgacaatattgattcttgttttcttgcagtcaccaatcacgcagttccagcggtatctccaacaagtcaagtgccacagagttcacctttcatccatccagctacacctagaggatctccatctactgttattcctggtaactttagttttttgctcaaaagaaacatggttttaagttcatatcccacatgccagtcaaaatggttaagaatgtttgctgttagattgttgttgttcctcagaaccatcttcggtttatatacctctatcttctgcattgaggtgagaacccacgactgaaggaaactcacaaatgtgaaagaccttacattttttatgtattgagatgtggtccagcaatacatatctgggctttaatagaagacatatggttattgtggaatagttatggtaactagttctttctgtgggtaggacaagtaaattcgtggatgccatcaaattgaacgactactccattttcttaaagggcacgttgattcattacttctctataatatagctactatctaacattatttcccttgtgattgcagaccatgaagtctctcctgcttcttctcctcccaggagcattgaatggaaaaagaagggaattcctgcttctgcgcctttatttgaaaagcctaaggcagtaccacctgtggaccatatcacagctaacggtatactgaaacctcagtttttgctgtttcgtaaactgtccaacttgaaatgatgttatgaaagttgctttaccactgctcacattaattgtaggtccttcaaaacacaaatctgtgcgacattcttatgttgctcctgcaccatctacatggcatcccaatcctcctaataaaggagatactcctgtctcatcaccttcagccccattttatgagcatcatcattcaaggaacaaaatcaccaatcttgctccagcatcatcatatcctgtttctcctcctcctatacaacatggtgagttcatacatttcctaaattattttcttctccatgcacagcccactcacccatcttgagagaaaacatatttaagaaatatataattccttttatcctactctccccttagttgggtgttatttaatctgtttttaatgcaatggcctaaacgtggagtcccaattctaacaccttcctgtggcaggtttttcaggttcaccatctgatactcgtttccctccaccattgagctatattccacctgcacctgctccatcccagaaagctgcatcgggcaacaccaaaagtaagaaggccatgttgtatctcttttgttttctcaaaatgttgttttggaatcactcactatatatttcatttatatcaacagctcaacaaatgattctctttttcacttatacatacatacatgtgtccttttcttctcacagaattgtttccatctaagcctccatcagaaagtccaaaggtttcacttgcaccaccaccaaaggtttcacgtttaccgccaccaaaggtttcacttgtgtttcctcctccacctcctaatgaaggtatgtaaaagctagaaagtttcttgcttgcgttttttaatcatggttccacagcttttatctactgaaatttgacgtttagtcttctctttgttgcagattgttcaacaatgatttgtacagagccctttacaaatactcctcctggatcaccttgtggctgtgttttgcccattcaagttggattgcgccttagtgttgctttatatactttcttcccattggtctcagagctcgcccaggaaatttctagcagtgttttcgtaaaacaaagtcaggtacgcattattggagcaaatgccgctaaccaacaaccagagaagacagtagtccttgttgatttggtaccaatgggagaaaggtttgataacactactgcttttttaacgtatcaacgattttggaacaagcaagttaccatccaatcaacctactttggtgactatgaagtgctatatgtgcggtatccaggttttctttaacactttaaattgctgatccctccacttatcctcttgttggtaatttttatcttacacaagaaccattcatttgtaggtttacctgcctcgccaccttccgatgttggtatgatagatgatgggccgtatgctggctctgacaataatgcgagaacaataaagcctcttggggttgatttgccaaaaaggcaacataaaaaggtgcttagtggtggcatcattgctattattgttctatcagccttcctaattttggtttcgtgctccgttgctgcttggatttttcttttcaaacatagagacaaaggttctgaattagggccagctccccgtgttttgctgccttccctgtccaaaccatcaggtaattcagccaatagatattgcagaatcaagtgctcgctaatgtagtctatgaaaataaaaatagacatgcagataaacacatcgattctagcttgttatgtagtattaataaggaatacacacagcgtacatggaatcaaataatgtgtatttttgccactaagtttgggttagcaaaatcagtgttgaccatggtgcatgattaagatggtaattagtgttcatttatatatgaaggttatctttttatctgtttattctttctttctataatattaattctttacttaattctaactaagtgaaatctgaacttcaaacttttcatgtgatttcatgctgtgctgggacttgttatcatgtatgtaagcaaccttagttctgtaaaaagaaataagtgaatagttttttcttgatctagataaatcttagaagagatttatacaaataggagccactaattacagaaaattacatataaatcacttcaatttcactgttcacttaatttcaatttatgggtatgaaagttagccttaatctcctgggtctgtaataagattatggatgacatgctggcaatcgggtgtttaagaattttattttattataattatatttttcacttttctaataagagaagaagacatattttgcaggagctccagcgtctatgttaggaagtagggacagttctgcttctttatcatttggatctagcattgcgacctatactggatctgctaagactttcagcacaagtgacatagaaaaagcaactgatcattttaatgcatctagaatacttggggaaggaggatttggacttgtttacagcggtgttcttgaagatggaaccaaagttgctgtcaaagttttaaagagagatgatcaacagggtggtcgtgaattcttggctgaagttgaaatgcttagccgtcttcatcatcggaatttggtcaagttgattggtatatgtacagaggagcgcaaccgttgcttggtttatgagctggtcccaaacggcagtgtggaatctcatttacatggtacattatttgactctacttagaattattcccaaaaaaaatgttttgtagatgttattgttttgatacagttttggagattactagttttgctgtttattttgttttgctaggcattgacaaggaggctgctccactcaattggcc

SEQ ID NO: 185484 - DNA, 1739 bp, Cannabis indica
aaagcttgccaaacaacaaagcaggtagaatgattagcaacagaagccaagatcccttcagatatggaggactggagccaagaaagcaacaaatgatcgtatttctttcattgagtgtagattagattgatttcactagtgaccaaatgctgaacatgagggacaccactgaacataatttcatccaattcatgcttgaatactgttggcacaaaccgagacttccacgtatgaaaattaattcaatctaactttaaagtataagagaagaagagagtgaactggataaaggattccagatcgatgtggccggagcaagggcaagagcaggtgcagatagagggtgattgattacatgagcagtggtacgtctagttgaatttgtaggatcgaaaaaagtggaggtatgaatcgaagactccaggtgactgataccatgtagaagctcaactaaagcaagctaaaagagagaaggtaagaaccagagaagagagaaacacagtaaagaaaatgcttaagaaagcttgtctctcatgaattgagagaacctttatttataagaacacataattataagtgaacaactagagctcaaaataactcaaaagtaactgaaacttacgaacgttctaactaacttaacaacttaagacaactaatgaactgatttctacttaatcatttagtcaaaatcgtttcttgcttcttttatggaaggacagattgcagtgttatttctagtgtcctaacctaacccaaccaaactaagacgtagcattgaaaatgatcatcaacacatatgtaacccttaataaacgtcatcaaataatatttttgactaaattcctttatttattttatttccaaataaaacctagttggggatgaagatgtggctcaaaaattatactagttttcagggcaatatacttgactgtacaataagattaaaaaaataataaagaaaattgttgaacccaaagaaaagtcaaaagaaaattacacttattaattaagaatagattattcaaataaaccttatcttctttttcgtggtgctcaagagtctatacattgcttgctattgaaatggatatttccaaattagttaatcttaatcaaactttgattaattgtaataatttagaaggtataccaagaatattatcatattaatatattatgacaaatattgtaattgaaaactaacactaaatagtaaatatatagtgtaccacaagccaataaaagtgttgaaaagtttaagtttaaaatttgagttttatccatgtttttatatactttatattttcatagaagactcatagtatatatcatgttaatctcattctcaatacaatataccatatgagaatcactgtattaatatggtaaagagaaagaaaaagagaacattccttaaatggaatgatttctttcctttttctttgtataagtcttggaatattttgttttccttatgagatttaaggtagaaggatttcaatttccaacttagaatatttttttgtgaggaaaattataacattactaaactataattgtgtctctagaaagaaaaaaataataataactatgatcacaaacaattatagaaagagtaattacgatgcacttaaattaaatatatttatatataataataatgtttaattgatttcgatcacaattaatattgatatatattttaaattctgatatacatgattgttcatgat

SEQ ID NO: 185485 - DNA, 4450 bp, Cannabis indica
gtgttgatgaaattcgggtcggattcgggtctctgtgagggtaagaagatgtgattggattcgggttcttcaacgacgtcgtttgaggaggttagatctaaggaaaaacgagcgtgagagaaagcgaagaagaagaagagaagagttaaggttagagagagtttggccatggcgaggaaatttgcagagagagaagagattcaaaagaatgtgctgtgaatttatatgtgtgggatgaatgtatacgtggcaggatttgattgggttgtggaaaatggaggtttgaggtttgacactttttttttttttgatggagtgaacgacgggggaacgtggtcgttggattgggataatgggaagagtcttgccctatcgcgtggaggtcgggtcttttcgtttgtggaaattcatatttattattatttaaattttagttgaaaaaaatggtgacaaattacaaagatataaatggcatgaagaataatgacaagtaaattattaagaattttgaatttgttagggtttttcgttcttaaatttttagtcgagggaggttattatttttttcggtgaaatttaggtgtagtttggtcatgttttgtaaatttgctaatgttgtgaaaattgtactaagtaagtgcacgtatcataaaccaacatgcgttagttagtcaaccaacactaaatcataaaccaagattcaaaagaatttttaaaaaatttatatcacctttatagtgtcagttgataactgaaactaataacctctttaagtatcaaactggcaataaagagcatgtatagaaaccaacctaatctcgacacccctcactctcgttggtctctcttgccgctagaggtcacccattaatcctgaaaccccctgttgatgttgcccaaccctgatcgaccccctcggtccccattcgctctcggagagacccaacccaaaccttgatggcctccattccactccaagattctcactttctttctccatagatcttcttcatgcccatcttcttcttttaattttttatccacttccgtagcaacctttgtttgttgtttttttttcttcatctcaatcaatcctctccaatggctattgaagaaccagaaccagaacaagctgagagttgtggtagcagaccactcttctcttcttctcaccctcaaagaaagaagcttgacatgtataaggatgtgtgatattagaataatttaattcttatgtgtgtttcgtaaattatagtagtagaatcttaaacaattctacaatatactctcttaaaagggatgcactgatgtcatgccctgcagactaacacgaatatttctagcgtactttgtcctcactcgtatgctttccaggaagtcacccatcctaaaattaccccacgtcaaatacgcttaactgtgaaattttttcgagatgaactaccagaaaacaaaatgcacattgttaatataggtaataccaatcaattcatttaagctctcttcatctgtgtaatctcatatctacacagtcttagaatcattacacttgacctttctcaggtggtgtgggattgtacagcttactcggtattttctcttacagatcacgggactactgatagtacccctatctattttgttgtccgagcaaattttttagtccaattctttaacacgctaaaaatatggttcaaacagtttattgcatgcacttttattttatactcacgtaaaatagattgtttgaacattacttattatattgtaaattattctaaatttcttagaattttataggatatcttaaataagtataacatacacgataataaaaaaaattgacttattttttttttcaaatgtaaatatttttatacataatgtgtatttaattttagttataaatattatatagaatattgagagagttatattcttccattttgatagggttttctccttagatgacatagatttggtatttttccaattagcttcattaataaaatgtttgctctcaattatttgttgtaataatatatccttactatattataatatacacatatattaatgtttttactaattaatgtagcttttagttacaataataatgatcaggatcaaataactaatagaagaaaaattatttttagaaaatttaggtttgataatagtgatatttttcaatataactggcatgggctcatttaacttgaaggcctaagctaggtacaaataagttgaaaaatacatctttttttgtatccatttatcaaatatactcatattaattttattaaaatatactcaattttttgaatgagttgcccaatatacccactctctacttagatctagcatataatttacattaacctaagggatctaatagtaacattatctataaaagtgggtatatcttaaaaaatataaaaatagaggtgaaaattaaaacaaataaagtaaatgagtatacaatctaatttcttttacaaatctagtcttattatgcttgagcctcatactattttttttaactgaaatttcattcaactcacctcaataatgacataaaattagcatataaccgagacgttctaaccacaagcaacccaattaacagattatttgacgaaaaataaaaaaacaatcataaagatttcatttttttttctaacatgtgctacatactatatatgtaatatattataattataagcttcaaacatatattttttttttgagtttccattttgttttttgtttttctatattcaacttaacaaaattttataatttgttcttagtttctgattaattaaaattttttaatggttaccgaacactacctatataatctgtaaataaaattttaaaaattgtaaaaatatgtaaaattctgaaaaactgtgattataattttttttatttctaaaatactctttttaaaaatactatatatctattcttatatataataaagtcaccaaacaaattatttttctgaaaacccaatacaactcaggatcaagagcttggaagcattacaagtttttgacattgctttgtcttgcacaaattgtagatacatgtttgtaacaatatagtgttataatcaagattttagcttgctaatatgatataaatatttataactattatctcatattggtctctataattatttgaaattaatagtcttgctatttgtatatgcttatatgtaattttagtcattttgttgtattactattacctaagctttattattgatagtaaaaaagaaaatgacagcattgtaaaatcacaaaatgtcattaatgtatacaataccatatcttgttacgggaaaacgacactacttatgtaatacgacacaatctccggtaatgtcttaacatatcttgtgaaaaacgacatatttaatagaaaacgacattatttcaaaaaaagaaaaaatcgacacacaaaatccccacagttattcaatgggtccgccttgtcctctcgtgtgggttaaagcataataataataataataataataataataataatagggttaggttggaaatgtaactcccgtacgtacattatgagttaggttgaattgtattactatagtcggtatatactcttcaagacagtaccaatctctaattagaaaatttgtaattctcgttgatcatttcattcaccataattcccgtaacagacttcggccaatagtttttaattcttgccaatctatacaaattcaacttggataattattggctctgaaatttcataaatttactcatatagtaatttaatagggttgaatttgacttgggttaaatgagtaatcctacattttgtgtactcttaagtgtcgtcgttcagtaatatttttttttttaatttttcttgtgaaaatatttttattaaaactattttacttttcaaacttggtcccgacctcgaactttgccctagtcttggccccagacccagacccaaactcggtccttggactcggactccgaccacacgaactcgatcttggccctggaccccaaccctgaacctagacccaaaccctgaacgtagacccgaccacaaacccatatctcggccccaagcactagaccccaaccttgaacctagacctgaaccccgaacttacccggatcccaaactcgtatcccagccccgggcactggaccgacatcggccttagacctggacttcgaccctgaattggcatcggcctcatactcggactccgatcctaagcccagcctcgaaccctgcccggtcccaaccctagaccccgatcccgactccggatgccaccatggacctggaccccggacccccaaccctaaatctgacttaaataaaatcaaacaacgaaaacaaaaatgaatttcacataacacacttttatttttagttttat

SEQ ID NO: 185486 - DNA, 4894 bp, Cannabis indica
tttttttttgttttcactttctctttcacattcttcttcctataacctctttatgttaaaatggctgtcatattacagcattgcccaccactatcaggggttgaaggatctgtggagtcttatcttcatgttttaggtgaaagagaacgctggaatgttgatgttttacttaaacttctggcggagttgcttccttatgtgcatacaagagcaattgaaagatgcccatttcctgccattcctgaaactactggaactgaattttctacatcattgcttgaattatatgcagggtaagctctttgttttcccttatttatttatttatttatttatgtattttctcatctttttgttttgtttcaagggtgatttttcttttccattccattatctctgtgttagtaatgcttatgagtaattctatatttggctaggggacatgttcaatggccagaatttgaatggatacatgtcgattgctttcctgatttaatacagttttcctgtttgttacctccaaaggaagacagtttacgaaatcgaactaccaaggtttgtttgatgttaatggttcttttatttggatgtgtaaataagttgttttttaagaaagttctcttccagttcttaatctcagtagtggtggtgcagatcttgttggctgtatcagaactttttggggattcttatttgacgcacattatgcttcctgtgttcttaatagctgttggtggtgatggtgatttgaaatttttcccatctgctatccactctcaaatcaggggtaattattttgaagttgacacaaatcttttgcgctttggttgcatctctaattgttccctcataccaggtttgagaccaaggacggctgtggctgagagactggccaccatgtgtgtcctacctcttctcttggcaggtgttctgggagtttcaaacatgcgagaaaagttggcagaatacttgaaaaatctattagttgaaggcactacaaaggaggctcagtcaatgaagtgcaatgctgagattgttgatgctgttcgcttcctttggtttgtagcattaccatgccttgtaaatttattgtctacattctgttgtttgctcagtatgcatctttcaccatgcagcacttttgaagaacaccatgcaatgatatttaatatcctatgggaaatggttgtaagctctcatataaatatgaaaatctgtgctgccggtctgttgaaagtcatagtaagttttggccattcatttttagattttagttactgatagtagaagttgcactcttaacactttgtattaactttgtttattaggttccctatgtcgatgcaaaagttgcatccacacatattttgcctgctctagttactctgggctctgacccaaaccttaatgtaaaatatgcaagcatagatgcttttggacctgttgcccagcatttcaaaaatgatatggtatgtacattataaaataacaatttgaaggagttgatgcaaggtatcatgctgaccaattttataaattccagattgttgataagatacgtgttcaaatggatgctttcttgaagatggatcccatgaagctacagttgctgttgttcgagctctggtgattgctgttccacatacaactgataggcttagagattatatcctctacttttcttattacataatcttacatttccctaggacttaacatttgttgctcatattttgccacttttcttttttccttaatatgccatacatcttttgtcaaagatttttcaatttacagctacgccaatcaattccagtgatcttatgcgtcgccgtgaaagagtcaatgccttttgtgaagcaatccgtgctctagatgctacaggtattattcttttctgtcactgattcactttcttagtgcctatcctgttcgccttatcctctatatctacaataaataatgttgaaaatgataaaccaatttaattgatgcatatttgatgctttcttggtttgaattcatttccatttgtgctttctagtttttgttcgcaaggggagtttataatattttattgattaggaatgctgagactttctatatgtagataactttggcatttctatattgatgttttgatcacaaggaaagttgcttgcatgatcaaattattacttcaagagctgctgcagaattagtttgcccctaggggtgttcattggaccatatccaatgtttttagacctatccaaatccgatccaattatatattggatgttagattttactatctgatccgatctaattaattgtagtcatccaatcgacccaacatccattggatgttggattgaatcggttctattcgttggatgtatttcatatatatttattggtttaatctagggtatattcaatattttagacctattatttttttggatcggattggatccatctaatattttaggtccagtatgtattgaattagattggatccatccaatccaagaaaaaaagagtaaaattttaatgttaatttttatatacatatatattttacgtataataatataaaatttaattactcatccaaactaaatgaaaatactaattagttcgattggatgttggatgtattagatttttggacaccccatccaatatccgatccgatccgactagatattcaaaaatagcattcaatccgatccgatcataattagatatccaatgtttggtggtcggttgtaattggatcggtcggtattcattggattggatgatttatgcatacccctatttgcccctagtgtttgcaaaatcatatatgtgcaattgtgctctacattttggacaaaaacttgcctaataagagcaggctggtacattgtgctacctttttctggtgttcagattttaaggaatagttccagttctagcttatatttgtgtatcaaaacatgtgacgatatgattcgtcatgtcagattatgagattttctacaaatgtgagctactgtgtttggttgtccatttgcatctaagaataactagctggagtattgaaacattgatttcatcctggggtatgtgaaaattgttatgactcaaaataaatgtacttagaatattccttcttttacttacatcatcaaaagcgaaattgacaagagcacaattgaccattgaaaatctgaaactaggtgaagcacatctacaactttttgtttatgagcgagtctggttatgataacactccaaatttaaagcctggacatggaaaaaaaaaacatttaacttgaaggtttcacatttacagattcctcgtgttaacagttaacatttttcattggaaggtgtcttgagaaacaaatgattgcacctcttacaaactagtagcccaaattttagatttatctacaagctaatttgacattgtttttgtgtttgcttgtcattcaaaatgtgctgctgactggtgataacaaagttattttggtttgttgagttttgacgtctttgatgcacaatctcttttctgtttattacagatgtttcagcaactagtgttcgggatttccttctacctgccatacagaacttattgaaggactcagatgcattagatcctgcacacaaggaggcgcttgaaattataatgaaggagagatccggtggaacctttgagaccattagtaaagtgatgggtgctcatattggcattgcatcatctgtgagcagtttctttggtgacagtggactcttaggcaagaaagaatctgtagagataccaccagagacagttgaatcaccaaaggcgataccaccttcaccggctgaggatactagattcaggagaatcatgagagggaattttacagacatgctaagaagcaaaggaaagggtccagaggaaacctagaaccaatcactgaaatcttagctccattatcgatcatgcaccaaagagtacgatcctctttttcccactcgtgtgaagattaatttttttgactgtagttgctgttcttatcctctgaagagccaaagtttatatttttatctgtagttttgtttttaatttaccaagtaacaggaaaaggagagtagaaaagcaaagaggaagagcaaaataaatctacttgatttttctttgttctgaagttattgaattgatttggatagttcgcttcagcgtatatcgcactgagagtgttaaaatgtactttggagtgctctctttctgtcacaaccttattatttttattgactgaaaattaaaataagtacagtctgataatttaaagacattacacattcaaacatatgcacacaaataaattgtatacaacagtaccattacaatgaaacaaaaagtacctgagtactaattcttcttgcctatgcctcgagactttttcggacaggatggcacagaaaatgtaatgtagcttacaagcacaaatgtcatatattataaaaagtaatacatcttgcctcgtaagcaatgtaacattataatattgcctaattatttagctttatcatttcctgtgtggaagggtttgactctggtcacaacactgtacatctctatccatgcacattatcattgttgttccaaacgtccagtacacaaaccgcaactaacgctaaaatataaaatgagaagaaataagtaggtctttacttgttctgcttacttttcaccgttttagatctcaagctcagttatagcaccagctctatgtgtataaattactaatttagacatatatgttaaatcaaatttctttgccttatggcatcgattttcctagttgaaccacatggtgctgttgaaggtgcaaagttgataccgacatcagcggttgaaattgacatgaga

SEQ ID NO: 185487 - DNA, 15180 bp, Cannabis indica
ttagaatggtgagctatgctcaacctactataccgtgtacaacaaagggaataacatccaaataggaacactctcaactttaatattcaatatatttaatgtttcttacatttaccaaaattataaaaatgttcagagtttgagttctaatattttggcccactaagatttcctaacaaacaactaaacaacttaggcctaagactattaaatctcttagccttagacattgatgaaagcttaaacaagagtaaaggaaaaacagcagaaggaagagaaagagtaaagatgaacgattttgaaagttatcaaagtaatgatttatatacagcttagcattctgagtctgttacaatcgcatttacagctcagcaaatcctaaaaaattatgtacaagctaataactaacaacttctaacaattgactgaattgacagtctcaatagctcccctcaaactcataattgaaacatcttcaattttgagtttggctctaaaatctacaaataaaaaactgttgattgctttggttagtcgatcagctaattgatctaaagtatgcttttatttaacctcgataactctttgtaacaccttttcacacacgaaatacaagtcaagatctaagtgcctcattcgagcatacaaaaccagattgagtgttaacatcacagtggagagtttatcacactagaatgttggagattttgacagttgaagatccaactccgagaacagagaatggagccaataaatgtaagcttcgatactctgcttctatacttgacttagagactgtgtgttgtttcttgcaagaccaggatattaagtttggtccaaagaagatggcatgtccagatgttgacctcctatcatttgaatcaaatgcccagtcaacatcacaaaaggtccaatctcataattagaaggtagttgaagatgtattgtagagtccatttttatgtatcgaagaattgtcttcattgcattccaatgtgggtgaagaggattgtgcatatattgacactgtaggacacctctggccgagtgattgttaagtattacaatgttcccacaattgattgataaagttgcacatttgttgatagctttagaccactgttcattggagtggaggctaatttatcattgaacatggttgctttgagaagttgatctttggcatacttggcttgggacaaatgcattcatcctgtggtgtgaataactcatattcccaagaaataactcaataaggtctttgagagagaattgagcattcaatgagatgagaagagctacacttgggaatcacgaccaatggttaatatatcatcgacatacaccaaaaataaagtagtgaattgagtagtgtgatgaataaaaataaaatgatctgtccgagaggaaacaaataccaactgttgtaagctatgttgcaactttttaaaccaagctctaggggcttgctttagcccatagagaggtttatgcaatttgtaaactaaatgttcaaaaccaggtacctcaaaacatggaggttgagacatatagacctcttcttgtaactccccattaggaaatgtattgttgacatctaattgtgttacaatccatccctttgataatgcaagagttaacacaactctgattgtaagaagtttgatcactggactaaatgtctcggtgaagtcaaaactgcttgttggtgaaagcctttttccatcagtcgagccttgtatttattgactgtcccatcttgattttcctttagcttaaacacccatttacaacctatttctttccttccttgaggaagtagaaccagtgtccaagtatgattttgtgcaagagctaatacctcatctgacatagctgtattccatggttgttgctgcaatgcttctttgattgtggcaagttctccagtaacaattgaggctcgaggtttctaaattcctacctttgcacgcgtaatcatctagtgtgtatttacaatgtgaggagccggtgagtagccagtagcttgaggaatacaagacaaagtagctggtggatcaacaacaaagtcattcaagctagtattgacagtgagatcaggtgttgaagttgtagaagttgaagtactactaggtgaggctactggacttggataagcagcaccacaagtttgggaatgacttggagcagcaacatttggatttcagatgatcttgtactataattaggctgtaaaagtgagtcactgtcgttagtagcatcatggtcaacatggttaataataggcatagttagttgtgaccgttagtacagttaagacagttagcatttattagctctagttaacctcttgcatagttagttagaagtagttagtgtcaagtgacaaaacacattggaatattgtctatataaagtccttgtttttcacttaaaactaacacacaatatagttcattttgtaaagattaaacactatcaataaagagctataatattgattcattaaacacattgtaaatggttatggttgtggggcattcaattgtgagactcaacagtgtggtatcagagttggatgggttcttggagcttggattgaatcaagctagcgtgggatcagacgtgaagaacatccagggaagaaatggggaatgccaagtttgctatcgagaagtttgatgggaaaaacgattttagtttgtggagggtaaagatgcgagctctcttggttcagcaaggaattcaggatgccattcttggtgatgaagatcaaaggcaagataaggtcctgagggaggtttcaaaggaaaccatagtagctggtctatggaagaaattggagtctttgtacatgacaaaatctctaaaaaattgtttgttcctgaagctgaaactttactcattcaaaatgcaactagggaaaagtattgaagatcatatggataatttcaacaagataagtctttatcttgaaaactgtgatatcaagattgaaagtgagtaccaagccattatagtcttgaattctctacctacagacaggtatgaacactttgttgatccagtgatgtttggaagggattcactaacattggaagaagtacacaatgctttaatgtcgaaagaattgaaaagaaagtctgagaaagaagataattcaggggagggtttgttaattgctcgtggaagaattgaaggcagatacaataggaatcaacatcaagctcattccacaaaaggaaagccaaactccaagttcaagaaaagatgtttcatctatcacaaaacatcacatctcaaatgagatttccctgaacttaacaagaaatcaactggtggcttcaagaaatatggaaataatgatcttgtatacggtgaatatgccagtgatgatggttatgaaagtgcaggagttttagtggcttctataggatactctggtctttactgggtcattgattcagggtgctcttttcatgtgtgccctgacagaacatagttctctgaatacaaagaaatcaaaggttgaacagtcaagttaggagacaacagatcattcacaatcaagggaattggatttgtgaaattccaacttgcaagaggatccattagagaactacaccaagtgagacatgttccagagttcaaaagaaacttaatttagtagctatgttggacaatggtggattcacagtttaggttgaaggtggagttcttaaggttacccaaggagcaaaggtaatcacgaaggggtctgtgatcaatggtgtgtatgttctacaagggagtacagccaaaaatcttatatatgttgcttccaaagaaatggtaaactcatttgtgctatggcataaaaggttaggccgtgttagtctaaaaggtctggagattttaatcaagaagggattgctagggaagaaagttgtaaaagacctacacttctatgaacatcgtgtcctaggcaagtctacaaaactgaaatttggaactggtttgcattgctccaaggatacattggactatgttcatttagatctttgggggccctttagagtcacttccacaggaggagcaaggtactttcttaccctgattggttatcactctagatatgtatggattcatatattaaaacacaagcatgaagtgatttcaaagtttaaagagtggagaattttgcttaaaaatcaaattggtaggaagttaaggaaattgagaacatataatggcttggaattatgtttagatttctttaaggtttattgcaaacaacatgggatagccgagcaccttactgtccccaagatccctcaatagaatggccttgctgaaaggatgaactagaccataatggagaggatcagatgtatgttaatccactcagggttgccaaggaatttctgggcagaagtagctgtaacaacttgctatttaatcaacagatgtccctcatctgcaattgtttttaagacaccagttgaggcaagaactggtcaccctgtagactatgaaaagctgagaacttttggatgcattgcctatgctcacatcaagcaagataaactggaaccaagagccagaaagtgtctttcttggatatcctgtgaagggctataaattgtggagcatagaaattggcaatcatcaaaagtttttcattagtagggatgttgtgtttgaagaagacagtgtatagagatacactagaagtgagcccaaactctaaacttgagaaaaatgacagtatacagtttgagattggaagctgtaaaatgcttgacaccagacagccaggaaatatcaccagaagcaactactagaactgagttggaagaggaagaagatggtggaaaggttactgaccaaggagaactgaaatttgaagacgatgagaatcccagtatcctgcaatatcaattgactagggatccaactaaaagaactcataaggctcccaagagatttggatgtgcagatatcattcactatgctttcacaatgtctgaattctgtgaaaatgagcctagaacttataaggaggtaatggaatcaagggaaagggtcaaatggaatggtgcaatgaaagatgagatcaaatccttaattaaaaacaagacctggatactgatcataaggccttctgacaaaaagataaataggctggaaatgggtctacaagtacaaagaggagattccgggagttgagggagcaaggtacaaagctaggttggttgccaaaggcttcacatagaaggaatgagtggatttacatgagattttctcaccagttgtgaagcatacttcaataagaatgattttggcaatggtagcaatccaggaccttgaacttgaactaatgtatgttaaaactgccttcttacatggggaattagatgaagatattctaatgaagtaaccagagggatttgatgttgaggaaaaagagaatcatgtgtgcttgcttaagaagtccctatatggactaaaacaatcatcaaggcaatagtatagaagattttatgagtatatgatcaaatcaagtttcaaaagatgtgcatatgatagttgtgtctacaccaagagttctaaggtaaagtcaacagtctacttattactctatgttgatgatatgttgattgcaagcaagtacaaggaagacatctacaaagtaaaacagatgttatgtacaaaatttgaaatgatagggccagccaagaaaattctttgaattgagatctacagagacagaaagtctagagaattagttctatctcaggcagggtacatctcaaaatttctatctggacttggttttcaagataccaaacctattagcacacttctagctcaacatttcaaattatccaacatgcaagcaccatcaacagaagaagaatccaagtacatggagaagataccatacacaagtttggtagggagtatcatgtatgtcatgatttgcactcggccagacctatgttatgcaatgagtatgctcattgggtttatgcaaaatccaaggattgagcattggaaggccgtcaaatggatgatgaggtatctaaaaggaacatctactttgggtctaaaatatcattcaaaatatgagacacaagaaatcacaggatatgttgactcagactatgctggtgatttagacactagaaggtcacaaacaggttatgtttttttgtctaagcaactgcacaattagttggaaagccaacttgcaaaccatagtggctctttcaacaacaatagcataatacatagcctgtactgaacctataaaagaagctttatggctaaaaaggatggcaattaattttggtctaaactagagacatatacaagtgcttagtgacagtcaaagtgcattacacttgagcaagaatcagatatttcatgagcgtaccaagcacattgatgtgcgattacacttcattagggaggtgattgtagatgggaaagtcaagctagacaagatttctactgctgaaaatccctcagatatgctgaccaaggctgttactatagcaaagtgtaagcattgcttgaatatacttataattttgggattcctcctcccccgattgcacctattccatgactttcttagagctccgagtagtcaccattcaccacgacaacctggctctgataccagatgatatacccctactgcacaattgaaaaataacgcaaacaacacaagaagcagtagagaagaaatggccggttgagtgtaattcaaatcaaaagttggttacaagcttgagcccaataggacccttgctgtaaagagagaaaactcaatacatgcataaaaccccactaaacccctcatacacgatataacacttgcaaccccacttaacaattacaacaataccctcaaacagaaaaagaccccattacccttgagtagtagcattcttcccccttctaacataagtgaaccgcaccgtagtcctaacagtccgttgtaaatgtaaattgctgtacgaaaagcctcattccaaaacttgatgggcattgaggcttgagctaacaatattaggcctatttcaactatattgcaatgttttgtttcaactaggctatttttttggtgagtactggggtcaagggtgcctatggatgatacctagttattgaagatgaggaataaaggacctaaatttccctcccccaatcgatttggaagaccttgatctgtttgcctagttgaagctcaactttaaatttgaaattaagaaagctttttaatgtatctggcttgttcttaagcatatatatccacgtgaacctagaaaaggcatctacaaagtttatataataatgatagccatttgaggaaagggtgtgggagggcccccacaaatcaacaacaattagctgtaaggattcaatatatacaacggtagatgctttacgaaatgggaatttatgaatttttccaaggcaacaacaaaaacaaaaagatgctttattattggtaataagtagattacaagaattaagaacattttttagtgttctttcaaaggagtgacatagcctattatgccaaacatcatatttagaaaactgatctctattacattgtttacaaacgaaattacaaagagaactcgacacttctagtacttgaatatttggctgagagaggtttatggagctgaaacaaagtaacgattgtggttgagactcggattgaggtgagactaagatgaaattgagttgacattggctaaaagtctataagccattttttgtgctttcccatcaaacacatctgatgagtcaattttttcttcacacaacgcatgtcagagtgaaactcaaaataaatatcagtatctttagcgaattttgatacacttcatatattcttagtaatctctgggacatgttatgcaaaataagggttttgatgacaagtttgtggaacaatgagattgaccaaaattcttaatagtcaaacttgttccatcaccaacatacatgtgttctagtccattgtagcctgtacactccatgatgttctgaacgtctggtgtgtgatgatttgtggcaccaggatctagataccaatccgcatcatcagtagaggtgaagacaacaagattggctttaacccgtggtcctgtagtttgagttatctttgagatttgccctatgaaagccttatcaaagtagtaaaaatagtcatggattgtgtgaccaattttcaagcataattgacattgtggttgattagtggttggagaaattcttccacttttattcatcatcatattacctcaaccatagatattggaatttaagcattgttaaagctgggggtggaaaaacctcgaggaggccctaaagagggtgccccttgtccatgagtaggaaaaacctagaggaggccccaaaaatattcatggatcatgtgaccaattttcaagcataattgacacttaggtcaaccagtggttggggaagatctgcttctttgattcatgatcatattacctcgaccatacaagttgggactataagaattgttaaaggtaaggatggaaaaacatgatggagtccctaaagaaggtcccattaggaatgagtaggaaatccataagtgactccaacgtttggctgttgaaacccattgtattgagagactttgtagcgagagaaaggttgttgttgctgtctagagttgtggtaagccagattaacttcaagagaatctaaaggattgatcaccatgtgagcactgagatcaatctttgagttttttttttctattaaagactctgatgaaagcaagagggcttcaatcttagctattgagtagctctcaattcgggtgttggatgaaatcacgaacatatcatactcactgggtagacctttgaagattgcaacaacgtgatcttgtggcctaataggtcctccaacacaggcaagaagatttactagttgttttacctttaacaagtactcattgagacttaaagagcctttcttgaggttttgaagcttgatcatgaattcaagattcttggaagagacttcaagggtgaaatgtttctccagggtgtcccagatctgacgagctgtgttttaacccaccattcgagtgagattgcactggtcatagatgatggaagcttggataccagtaattgatcttgaacttcccaatcgttataagtaggactgaagttgtgaagtgcacaatcttcatgagataggaattgggttagaggatgatcaagattgtaactttataattgatttcctatgatggctaaaagaacttgtatttcaaagcaaaaagttgtggtcattgaagcgaattgaatgactgattaaagaacaatatgataagcctaagacttatcttgtgcatcacaaaattattaaatgacatacttagtctcttatgtacataggctaagttgtcttagtgttttaattctattcgtctaattgtaatcctaggtggcctaagtcaccaatgcttataaatagagagggagcaacctcatttagatgagcttggaattaaataagagtagactctttgtggagagaccaatcctctcgaaagattagagatttggagagacgagcctctcaaaagcttgatattgtaacttcatgactaattttcaaaataaagatcatttgagaaattcattactggtatttattttgagaaatagctaatagaatatttctactttaggattattctatcaaattggtgcgatgggcgtggatcgaagacacgaccttttggtcggattagggaattgggagagacgagcctcttgaaagctcgatattgtaacttcatgactatttttcagaataaagatcatttgagaaattcattactagtatttaaattgggaaatagatgatagaatgcttctactctaggataattctatcaaattggtgcagtgagcgtggacatgagacctcaaaaatagtcggagagaagtgattcctccatggcttcagcagaagagtgtgaagctttggaagttgacacttctggatttaaggaatctcttcatgattcaatacaagagatagcacaacaacttcatcatcacttgcaagaatctctccaagaaatgttacagcaacaattcaagactttcttagaagttcaagaaaaattaagaactgcccaagaacccaaagaagatgttaatggagttgctggaaacaaggaaaaggaggaaagcaagggcctagcgagccccatggcacctcaacacaacactgcaatgctggaacaacgatcatcgaccacgggcatcactcctatggtaggtttatgtctgaatcgaagctcgaagcgggaattttttgacaagaaccaacaagactcaattttgacatgaaaaatggcttaagaagttgaagatgccgagttttgatggagagaatccatacatatggatattacaagcaaaaatatttttgtcttgccatggatatgacaacgacgagaagattgaggctgctgtcacttcatttttaggggatgctctactaaggtatgcatgtgaaatttaaatgcgagacatattaagctgggaagaaataaaaaaattggtgttgaagttttaaaaaacacataaatggggtcctttatgacatttttagcagtcaagcaagagggtttcgtgacgaaaatgatgaaaattatatccggctctcagctccatttgatagcataacaccagaaattcagtttggcacatttttaaatggattagtaccatcaataacagttgaattaagggtgtaacgtccaagaaatgtggatggactgagaaaacttacccaagaatagtcaagaatcgttcaagaagtggtaaacacatccaatgctaaagagatggaggagaaaaggagcacagtagtgtctattaaggcaagaaccagtaacattcactcagaacacaaccacgaggctgccaaagtgccacctacatgggaatttcatggaaataagcttttcaacgaaagatcttacgaaagagaagaattaagaactccttccacacacaagaagcgattaagagaactaaaaatcccaacatttgacgaggaaaatttcattagcgtgaataataccgtccgtgatgaaaagaacattgttctttccgagtaggtggtattgtcgctgatgaaaacccaactggttggagcagtttacaaggatggacaacaactaaacaatagagaagagacctcaaaagcacttctgaagaaggagtcggctttaaaggggtatttttttaagaaaaagtacttgtttgttacaagaagaacacatttattctctgccacaacaacacctacacgatggacagctaccacctgaagagaagaagatgccactggtcatgctacaacatctaataagatgttagagtttaattttcttcgctgattaagaaacttgtatgagtggggtgcaaaatacaataggagtcttctacattcaatgtatttttgatagaggaaaaacaaataaaaaagagaaatacaaccgaaacttagcccatcaccaagttcactaacaagacaatgaattattgatcaagtggcactttctctcaaaatttaaagcaacagaggaatgcataccattaaagaacatttccaagttttcaccttgaggacaaggtgaaggttcttggggggtattgataagcgtaagacttatcttgtgcttcacaaaacgattaaatggcatacttagtctcttacgtgcataggctcagttgtcttagtgttttaattctattcgtccaattgtaatcttaggtggcctaagtcttattaaggccaatgcttataaatagagagggagcaacctcatttatatgagcttggaattagataagagtagactctttgcggagagaccaatcctctcgaaagattgggaatttggaaagacgagcctcccgaaagctcgatattgtaacttcgtgactgttttttagagtaaagatcatttgagaaattcattactggtatttattttaagaaatagctgataaaacatttctactctatgattattttatcacatttgagaagagaattttgtagatctaactcgtaaaactgatgatcctccgaccgccaattgttgatgttcaccatgtttgctgacaagggtggaagtggctccgataccatattaaatctcttagacattaatgaaagcttaaacagaagtaaaggaaagacacaaaaagaaagagaaaaagtgaagttgaaagattttcattcattagaaaagaagtcatcaaattaatgacttatattcaacttagcattttgagtttgttacaatcgcatttactgttcaacaactcctaaaatctagatacaagctaaaaactatcaacttctaaaatctcacacttttgggggagatttcaattgccataatgaacgccagaactcaaatttgggtctcagatcactgaccacccgcatcttgcaataacctgtatgttgatttaactgactaaaaatcattcttttcctttgtccaataccacttatccttgttgcaagagaagctgaatagcactggtaaaaccaaatctttatctctttcattcagtacatcgttctacatttccttatcccaaccacacccctcatgaatcataagagagtccaccattttcccaactgacaggatgaaaagattgaacataaggatcattttcatttggaagctaaggagaatgaagaatacttaccaaccatccatctattacaaaccttaactaaatctcttgctcctaaaatattaccttgaatctaagctataaaacaagatcgcctaggatagtattgggccttaaaaattttcccaccaaaacaagtctcttgaccatgaacctccatccttgctttccaagaagagcaagtttaaaatcttgtaaatctctaaatctcatgctaccattggatttatgttgacaaagcttcttctaacttttccaatggataccttttcccttagaagaattaatttgccaccaaattctacagatcacatcctccattttcttcacatccatttatgtaaaaaggaatacacccatggcataacttgggatgtgctctaatagatttaagaatctatggcgacattaagaccccaaaataattctaacttcttcttatgacctaggttgagtcggttcacagaaccatcatctcccttaaaacattaaaagaaaaagagaaatcaaatacgactctaagagagacacctctctaaaaagagtaccgattttctagcacccaatatggtcttaaattagtaaaaaggtcgagagcggcctaaagagtcactaggtcccttacgcccggaaagtaacccatatgaggttgacgaagcttggcgagctcacagtccctcattgcagtagacacaaatcttgaaaggggctgagataaattataaagcctacgctcctcgcgaagggtaataaaaaggagaagggaagaaaaattaagtcgtaaaaatgaaactcaccacacttagtctacaagaacatttaagagaattcttatagactagggggcaagtgttgacgcccaaagattactaaatctgcgccttcccccgcggccttcgcccgccgcccttgcatggacgcagcctttctcgcccgcggccccacccccgcccacacctcagtaaaaaccaagtctttaatgaaaggaccaaacacatagatgtgaggtaccatttcattcgagatacaattgcaaaaggaagagtcgagcttccaaaggtgtcaattgaagaaaacccctcagacatgctcacaaaaaaactttcaacaacaaaatttaggcactgtctaaatttattatagatcacaaaataatttgatgtatcttcgttcttatatttgtaatggtattttgtgtgttttctagtgcattgaaagcctaggtggagatttgtaatatttagtatcccaatgtacagaataagttaggaatcgttaagaggtccggttagctatattagttacctaagctacccttagttgaattaggaccaatgcctataaatatgcatctaactcattcatttacaattaatcttgtaagaacacacttaactatcaactctctgtgttgagtatttgactaagataagagttctaaggctcgagagccattgttcaagggagctgatcttaagattgagtaagatcgaattcgatactttgcataacagtaactctttatatctggttgtattcttaaccatttatattggattggacgtggatctttgaaagaacaagactttgttgtatgtgttttcttatttcttgtatattagtcttgattttatttgatgataactttttatttcacttatttattttttatacattaaagtaattgaccaaaaataatacatttagctaattatattttatctcttatatcttgaaagggagaagctagaggaagaagcaaacaagagtactaatggacgcctttgtttatcctattttggcgaatggtgtgtacgactttcttaaaaacagaactatttttggcaaagaacatgcgaatcgactgtttcactatgaaacttatcaaaggaacgtgaagatactcactgaacgactagatatcttggagaaacaccaaaatgaagtgataactatggttgagtcagccaaacaaatggacaaggatgtttatcctgaagttttagaatggatcgaaaaaactcaaaatgatttatctagttatcgtgagaaggtaaaaagttccagccaaaactttagtgatttcgtggtccatccacaagcaatgatcgatgtggcttttgtatcaaaatcgataaatgaatcaatcgaacatcgtataaagtttggtgattttattgctcatgattctcgtttttacgataaggattacatgttctttgagacaagagaacgagctttggaaggagtcatgaaagcactgaaagatcccatggtgaagatgattgggctgcacggaatgggcggcatcggcaagacaacgcttgcaaaagaaatagctcgacaagccaagaaggaagcaaatttgtttgataaggtgatc

SEQ ID NO: 185488 - DNA, 1874 bp, Cannabis indica
gatttgtatatttacaatatagacattaatcactaccaaggttccaaagatctttcatcttcatcattggggtaattccccaaataagtactccaaaactctgcattatctctataagacacaacttcattgctctcattatggccatcctcaaaaactgaatcttcagattcaaacaaattctcaaaaccatcaccataatcatcgtcgtcttcactatcaccatcatcttcatcgcgtttatcatcattagaatcgcaaatgtcaatgccactcttccgagctcttctcctgtctctcctcattctcttcccctctataaccaatttcattaactcttctcttatatccaaagatggatctttctccaaaagcctgccattatcatcaaacccttctaccaagagcactgaatctcgatgccctttcaagctcacatagaataactccggatgccttatgatcatccccctcaacttgttggacagtccaaactcctttctaaaatgagtcaagtgatcaatcaatgtcctcttctctactgtcattcctaacacctcacgcaccaccgcgcaacctcttttctcagcctcaatagactccttaaccaactcagcagcaggagttttgtaaggacaaacatcaggaatttcaccaaacttaatcaaaaaatcatggtgacgcctcttcaaattcaatcctttcctcaatctcaaatgcttaaacttcaacggcctatcaactatcaactcccgcgatttaacatcaggagaaggtaaagcctttgcaagatcttcctcccaagtgacaagttcaagtgctcggccatacgaagtgtcaacaatcttgaacttatccgggtgatcattacaaaggcgcgatctaaaattaggaggaagaccaagatcaggagcaagatgaacgattttcgacaaaagcaatctcttatgagaagagagcataagaagtttctgaagcttttgtaccaatgtagccgaaatagctaacttgtagcttaattcccgggctgcaagagcctctgcagccggggttaaacgaacacagagttggggatatgtcttggtagcattcagtggaaatggtggccattcaatagaaaagagttcaaatattgtggggtaacgacatatcattgaaagaattgactttggtgttgaaatagagagataaggtctacatttggaaagtatatgaagaggtatatagtgttttggtttagataagagtaaagttatcaacttttgaacaaaccttatcttgtgttgctttactatatgcctatctaaactaggactacgaactgttttaatggaagaacaagaaattgaaagggaaagatttggtttggttttgttttactgtctttacataattttcctatgttgcccagatagcaacgagcagggtttctagggaggaattcagttattgggtattctctttgagtggtggaaaatggtaaagataatgccattgatgacattgatgattttcaagaacagaccatcaaaacgaaagagtaacgaaggagcccatgaatcaaattaagatgtaaaacgagaatttgagactaattagagagagatagagaagggggcagaataaaaataccttctttagggttgagaagggagaagagcggcggatgtgggtgtggtggtggtggtgccgccgtggtgtggtggtgtgtaggccgccgtttgagagaattttagagagaaagggataagagaacgatagtgattagagcatctcctattctaatagctgaaaaaaaaaaaaaaaaacaaatgattatttaaaaaataaaaaaaaaaacttttattattagacttcaaaccatttttttttta

SEQ ID NO: 185489 - DNA, 1421 bp, Cannabis indica
caatgtaaatcaatggcataatctccttagatccatcaatgtgtatttcaagttttttcaataaagacaataattcttcacatattaattccaaattacattgtcacatttgccatttggccaagcaaaaaaggttgccttttatttctaatcacaatttttccaaaaacatatttgatttggttcatggatatttggggtccttttcacatcactagtgtggaaggttttaaatacttcctcactattgttgatgataaatcaagttcacttgtaatgcttaaaaacaaatccgatgttcaaagcataattcccaatttcttcaatatggtttgtacacaattctccttgtccattaaagcaattcgctcagacaatgcaaaagaattgaagttacaatctttctttgcctcaaaaggcatcattaattatcacttttgtgtggaaagaccacaacaaaattcagttgtggaacgaaaacaccaacacattctcaatatagcccgagcactaggattccaatccaacttacccttggtttattggtcatacccagtttaaacggctacatatctcataaatagaacaccctccaaattgttcaaaggattgacatcgtatcaagttctacatggcacaactcccaaatatgatcatttaagaagttttgggtgtttagcctatggctccacccttccttcaaaaagacacaaatttacacctaggagtagggcatctattttcattggttaccctcatggcatgaaagcctatacactccttgatattgaaacaaaacaagtttacatttcacgggatgttatctttcatgaaaacatttttcctttgttttcagtagcttctccatcccaaatacaaagcttgtttcccgatgtcatccttcctacatgcaaaccaatacaacaacaacttcatgtccctaaactagtaactaatccatccacaccgtctggtttcccaccagcaccacctactctccacaacacaccaccacaaccacttaatagtggctctggtatactgatttccacaccagaaatcaatacacacaaatgctccaaacctggtaggctatccacaccagtaccagaaaaaacacttcaacctcgagttgatgcttccacaccagaagcctctccacaaagttctctaaaaactggcagccctcaagcaccagttactaagaatctttctcaacctgggactacagcccctatctctgaagctacttcaccaggttgtcaacaaaaagatgctccactagcaggcccaatgcccttaagaactactaaactgggcaggactttgcacaaacctaagcatctcaaagattacatctgcaatgcttcctctacagcacatccaattgaaacttttctttcatatatcaagttacatcc
